United States Patent Application Publication US 2009/0119022 A1 - sequence listing, part 6

SEQ ID NO: 5235 - DNA, 5387 bp, Emericella nidulans
  unsure (1)..(5387): unsure at all n locations
aaagcggtcccgtatgttcgagggctttcgaaatagtacttctggcgctccttgtcgtgttcggtcagaaccggaccaaccttccaattccaaacgctgttggacaaaatgaactctttcagtttgttcttgagcatattacacagccgagtaccgatgtactgcacgaagataagctgtaagacatcctcgtccatccagatgcgatacttcccattcagctgctgtcgcggcagaaccgggattccctcttcgcccgcaaaccaatcccagttctccaagtcggcccatcgcatgttgagaacgtccgctatctctgtaagggcgacttcgtttttgagaaaacccttcagaacatcctgcttggcatcgctcaggatatcctccgtcaaaaggcccttaattgttgccgttagagctttcttgtcaaacggagcgtcttcctcgaacatttcctggctttcatctgctatcttctctcttagttcattcaattgcttcctctcctcatcgccgggaaaaagctcgttcaggaacgcgtagatctcttcggcgttggtctccagcggggtgaatacggtttcttcaaattggtcgcacagctgctgcaaccgctgcttctgccgttcatcaaccacagcgtaatcctcctcggtgataccgccatcactaccggggacgtccccagcattcgtccactcggtcagcagtcgcgaacacagatccgcaagacgcaacttccgactacgggcatccagctgcgagcgaagctcgtcctcgtactgtcggagcatgccatctgtaattgacggttcataccggtgcttatcgagccagcgatcgatactgcggacagtttcgtccttggacgcagtagggtggatcgcttgagtgcctctgagaattacactcacccgcgcggcgaggtcaggctgcctctctgcctcagccaaaatagcggctttgcggtcttcgtataatgagcgctgtttctccagctcgcgaatcttgctccaagtgagcgattcgagcgtttgcgagagtgcggaaatgtgcggtgccatgatgcaactccagaaaggacaaggggatgtaggtgagagaataaattccggttaggagatatcttgtgaagggctcttgttctcgtgcgatgtaatgcgaagggcgtccatttatggctcagccgcatcggccgatcgctaggcgccagttgttgccttgtcgtattcgacattattgagcagttggttgagaattagttagaacattacatagcacaacgggaaatgcaatcttagtctcgcagaaggcagcagattgattccaaattgcgaatacaacaatcagatgtatggtgtagatatgtcagtgaccggcggcagtccaagtagaagacattcggcagcaaaacttggcgtcaaagtgctattacaagcctagtacactttccccagaagtcttgaatccactaagagacctgagcccagtcaataaagcataatataagacgtggtctcagcttggtgtggttcaggattctacccataagacatgattgagaaacctatatcgggaaccacgtgttgtagaaggatagatatatataatgtgaacgtctacatagctagttatggattctgtgccttatcattgagttcacctttgtcctcggccagcccaaatcttggtctttctaagtctaatctcactttcaattgctatatgagctctccatgttcgctcctgcctgatagcatctctataatgcgggcaaacaaacatagaaaccgtgtttgcatatattccttctcattcatccgtcttttaggatgaagataacaagataaagctgattcaagcgggcgaaaacgagaaattcaatacacttacaaaaattgctatttctgagctcggctacctgtacataatcgaggtttcggggtcaagggtctggtatgttgatccgttcagagatgatttaggtctttcttaccgttctctcggtatcttctttagttccagaacagctgtttccaattctcacttttctttctttccttcttttttctcttttcataatcgccgttatgttggtctttgtaataatagcaaacgtgaatataagtctgatagtcaaggttcagctcatctacgatgtaaaggttcttttggcatacaagagggttagtccgatttgtctagtgaagctacccattagaaaacattgcttaaatttcattctccaggtgtaaatcataatgccaaaacgctgcttacaccgtaccgattccccccaatacaaccgccgtttttttcccgcatttcaattgacatctcgccatacctgacaatttgcagatttggctcatctgtggagatcgctgttgttccgagagggactttatcattttcgatatatagcctctgatccggaaatctagaaatattgataacgccgaatccctccttcctggtcctcaaggtgaaaacggcattgaacgtttcggatccgattgatagggacacagtacctttttcgtacctgggctgtcaaaagtctatgattcttactgtcagtgaccgctaagtctatcttgagcacacatactatagtatttaggtcaagcccggcaccattcgtcgagagcgatagctcacccccagacagcatacgattgggccggtatctcgaaacgacagcggtgatctttcggtatggaggtttagcacccaaacgcaaagtggaatattccccatcgctctataagctgcagctataatgccttatgatcaacatcaatttcggcaccaagtgcatcgccgattagagatttggatgatttgagggttagacttgcccgttccacactaaatcttactgcacctgtcttgtctgtaccctgttccctatgcaaagcctctcagtcctcgttgattcacggtggataggaagggggcttcttgtatgcgggaattgtatctggagttggaatatcaacaacgtggacgagatttcaactttctattggctctcattttaagagagctccaactgctcgcaaataatgggtctggtaggtttggagcaaggctgaatgggatatgaacaacatcataaaggacagatggaacattctcgtcgcttgctaggacccgggcgcctccaaccgctgcacaggtcacgagctgctccaagctcgaaagggagccactgactgtcttcggcaactttcctggctgtgctaatagtttaagatccactcgagaattggttgttacaaccactaactgctcggggacctcctgggctttgtgaatcctgtctggccaactgagtttcagccctttcagtttcccaaattcaagctttccaagaatctacaccgtagggcatttggaacatgatcagactcactaagccaacacaatttacatcaaatacccatacatatacggtagttgcgcctttgtggaacaacgagatgtagagaagatcatgctcgaagaggatggccttgccatcatggtcaatgcattctttagccttgccatgctcaactaatccgactttggcatatacatgatgcttcaacgggatttcgccagtttagaggtagaggttaagcaagtgctgtgcccgagctagctcctcagctgccatgacgctatcacagaaatcggccgctggcgacggttcatgaagacttaacttagaagcaatctcaattacagattgagtatacagcgccgcaccatgtccgcgctgttggaccacagcaagagcagtatctgcatcaccgacttcatacggtcttaagagcttagatctgcccaaggcctcgcgcatccctttcagggtggagggaattataaccggccatctggggagtgcttccctctgaaggaaggctattgcgttctgatcctgcagggtggtcgaaggcggcaaatgtagctgcaggtcggcataaaaacccgtaacggtgctgactggggccgaccccaatgagaattggccgtgtatcatctcgtgcccaaaaggcatgagataatttacattcccctcgcggacaccggccacacgggccccctggagagcagcctccccatcttcaatccgcacctccagcgagccccgggtagtctcctcggtggagaaaagcttagaaccttaaacttacaaacaggtgtacaagaaaaaggtataaaaacctcattctttctcttctgcttttacagctagaaatgaacattaatctgtatagcagataaagcagaacctgagttgaccttttttgtacaactaactgtagctcggcgaagttgttctgccccagcagtatggttgtactgtgagaactggggttttggtgatggtaaggcaaaggcagagattgcacgagaaggagcaggaggaggagattcaataagattaatagcttctacctcaggtatacaagaaatagtagcaaggcatgagccacaggagagagcatctctatataatctgcctgcacaagggcaaagacaggataagggagctatataactttcttttggtattattactctttcggcaaggaggaatatgtcaggttatttatcaaaaagaagtagcagtatagtaaaaagtaaatataaactaaatcattaatcatctgcattatcatccctctctaaccgttcttagtcatattccagctctatctcaaggatttcctgggtagagataggctgctagtcaaatactcctactagccgctctagcaagccgagctctggctggttgccttgttgaatataggcttggatccgggcccgtagatcaaaatatatcatatgatagggggtgaggatatcattaccagcatccttaggcagattttgggaattaaaaccaagttcttttgattaggctgaggtccagttataagtactttcaggtaggtacttatcaggatctaccatatgattagtaaggttaatatatagatatattatacttactctagtcttgtatattattctgaagtaaataaaataggtctgtattaaagtatacaggatatgaccactggctggcttatactacatattatcatggcctggccatgatcttcaacctttaaggatttgacccctcaatgtacgttttgtaatgcgatatatagaataagaagagatctactattaggaagatgtatatcaacagttaaatagtatctaattcttagtagataatatttatatagctgatgtagttctgttctgccctttcccctttaagcatatatatccgcagcattctttcagacatcatattacttgttaggcgntaatttaggcggaatataagttcaacatgacatttcagatcttcggtt

SEQ ID NO: 5236 - DNA, 8689 bp, Emericella nidulans
tccactacggaccacctgcttttttttccccttgagccgtctgtctctgatttttcgtttgtgaacacttatatcaagcctcttttctttatttttcttctttcctgtatgctctacggcaattcatttcgagtactacggcctcacgttgttgatgtgacgcgtggtcaatcttatggcacaatgaaaaactaagaaagagcgcgagaaagcgggagacgaactcgacagggctggtgcagaggctgcatgatcaagtggctaagcaagttcttacgttcgctattagtattgtggcgtgtagactgatctatctcgtccttcgatcccatgcctctgccttttcccgttaaaacttgatgtaaatattattctccaggttactatcacttctagacgaacgcccgccttgatagccaggcagataatataagtaatcaccacgaatggtactgaatacttatagcttcttcccttcaagacagaaacgcggctcttacggatagactgcaaagctaaaagtcaagcaatctcgtgcatactggtacgtgccttttctggaggagctttttttttgtcttctctgaagcaagtccataagacttgtagttgataggttgtagtatttagggtgtgcagactatatatcatatggatgataggaaatcattatctccgatactgcaagcatccatagcgtacataccgaagtgcgcaaagatatgcgattacccagttatcatccgaatcgatccaatagagaggaatagaaagatagcgaaaatctgcctaagctacatatatgggtagacctatttaaaccagatcaattctgaatctcgctctctttccacccatcatcatttgcctcgtcgggcccagcggaaattccctctcctgcacgaccggtggcatcaccacctcccacaagacgaccaccttgtgccctcttaacacggcaccacggaccgacattctcatctaggataaaggtccaaataacccagacccagctccggtggcagggtaaaggctcgtaaaactcgctagcaattcggtggagggtatgaagttttgtccacggaatagcggggaaatcgtggtgctcattgtgcagaccaacgttgtaggtgagaatgttaagcgggccgtaatatgagtacgtttccggaggcggaagggaggtgagaggatgtttttcgcccttttcccccttcagttcccggagtgattctgtgccatggtctacatttgaaaaaaagtagtgctcggcgatgaagtggcctgcgcaggggtggagggaacccgcgaggaaggagctgagaaggaggtagaggagtgggttgagggagccgttgcagatctttgtgagtatgtagttgaaggagaattggacgaagaggtttatgaggtgaattattgtgaagggcggactgtagataaacatggggcggacagcatagaagaagatttggaaggtgcaaaagaaggctttgccgaggagagagtcgagtacgaaggcttcgaaggctgtaggaagatcggtgtcgaggccagcgacgccgagggatttgtggtgggtgagatggtagggctattgcatatgatcagtttctttttctattgcgaaccaaaggagtttagtatatgcataccctgaaagcggcgctgtagggcaatccaatgggaagattggcaaagatagccaggagcctatttgccataggtgaccggaaagcgaggttatgtgatatttcatggatggcaaggaagaggttttggttcgaagtggctccgatcacgtacgccgttaaccagaaccgccaggagaagaaggacgtttcgcggagaaggtatgcgcagcatatctggagggaaacaacgcccagcaccacgtatttggttaacggctctggtccgcagagcttggttacctggaagatcgtacgagttagctctctgaagcacagagtcggaagtgaggcggagagacgtacttctgggtgtgctttgatgattgcttgccgtcgtgaacggtgcggctcctccgtgtaggtccagaagaaatggtcctcgatagaagaagtctctggaggcgggattcgcactgagggttcatcatttcgtaggtctggagctttgcggcgattcttcgtggctgacatgcggagctgcggtgtagcagaggaggcgattgtcgaggccatggtgcgaggataaaggaggagaaggagaagttttttttgaatgaaaaggggttatagcagttcttaggccatcgattgaggtgaaaacagtgctcggcctacagtaatagaacagaacaaagatatggttcgattcgaaaatgaaacatgggagtccagtctcggaacctttgcttcccacgtggggcgcgccaaccgttggaatagtccgacctactgctatggacaaagcgatgccacgcaaaataaaaaaatccttcattttgttcgtctttacttcaaacctgttggtaagagctatgtatcatctcgtgcgtccaaataatatgaccaaggttctaactagtagtcgtctccgcggctaataacctccttcacggtaggtcggagcacgatcgtctgtaaccagggttagtctctatgtccggaaggcaaaatctgggacatacatgttcgaattgggcggtgtatgagcccttgatgtcacaaagaggcgggtaatcttgaacaattcctgattgaaccaggttgttcaactgggagggcattagctagatgctcgatttggggtacaacaatacttacgccaagaagatatttatcctggccaagtcggtcaaggtaacgacggcaccaaggcagagtgccgaaattcttgttgatgacgttcaagaggctcttcgcagaagatagccgcagaggaacttgaggagcattcgcgaccagcgcataatgagaagtttccatctaatgatcatgagctttcaatcaagcatgcggctctaaaacaacttacatcttctctcacgtagccctttccggtactaccaaaggtctcaatggcgaacacttcaccctcctccatcttggtctgatccgaacccttcacaattgggacactcttgccgccgtgaatgacgtgctggtcaatattatgaccgttgaggttacggataggcttgataggatacgttgtcccgttcagctcgatttcgtaactttccatagtttcttggatagcggcaccaatgtcactcatgcggacatcaattccagcctcctgcaacgactgtcagcagtagatatagtaatctagaaaaagaacacgtacgcgaataccagtattggtagcatccttgacagcctcaagcagaggatcatacacagggtcgaaagacatggtaaacgcactgtcgacgatgcgaccgttgatatgagctccaaagtcgaccttcatcacatcgccctgctgcaataccatcttgttgcctgcattcggggtatagtgcgcagcgcagtgattgatgctcaggccgcaagggaaacccataccgcccttgatattatcaccctcctcaagaccttggtgaccggtcagcgcacgaacagaatcctcaatgccctccgcaatctccgtcaaggtctggccgggcttgatgttcttctgtgcatattggcggacctgacggtgaacctcggcaccttggcggtactcctgcaggaagtcattgttcatacggtcgaggtagcgtttctcttcgttggtcgtgcgatacgaattctcattcttgtactcgacaatctcaccctcggggtactggccgttcgcgaataggctcgacaccggaacgcggggaggagagctctgtactttggcgccacccttcttcttcttcttagacttgcgcttcttctttttctttgcggctatagtccgttctctctagtcagcgaggaaatgccgaaacaggccgcgggcaagcgaggttcggttttaaacatacctccgttggctgcaccatcagcagcagcgccggcatcgtcagcatcatcatccgactcatcctccacctctccggcatctgcttggcccgcttttgctgggcccgcagcggactcgccgttctgaccgttcactgtgggagaggtatttagtgatggcaaatatggaaagcgagacaagaaaactcacggtcaagcttctcaagcttctcactagcctgagcagccataatgagaagatagagcaggggcaaggagacaaagaaaggcagattgcggtctaaacaagaggaaaaaatagggcggggaatttgccgatgagataatgagacgccaagcctggcgccgcctcgatgtctatatctatatcttaggggttaagcagggtatcacctgttgaaaccaacgtagatacaagtaattattccagacgggatctcgctgagcttctagctaggcacaaagtaattgatgtatagctggagctgtgtacttgagtagggctcgtttgcccctccgcagtatacctttcctacaggacgatatgtaataacaccagcaggactgtatatgtttatatgcgaacttcaatcccctagttactactattcaaaccgttctatataggaatcaacgatatagattttataggcacatttgccatgcttctatcctcggccctggaggctgactcgcgcactgatgacgcattgcacctccgataagcggccgacgccatcaggaaatgtacttccaccctaatttcccatctacaccctggccacggaccccatatcttcccacataaactggcagagacatgtctttttctcgccctttgaggaagccagtcacgcaatttctcgatcattctcgctgccaccaagctatctttccgcacgaccgcatctcccttactttcaatatccgcagctacgaacctaatcgcaaaagtagatataagcatgaccatggtcagtacacacgcaaagcacaattctcaacagcaagtgtccggttgctcgcgtcatctcgagagccaacactttacgaagtcctcgatgtccccgtaacggccacgccggccgagattaaaaagtgcgtttacatgtcccatcaagctcttaccactacctcaaccatacagtagagagtgcgagtgctatgctgacatatatatcatacagaaagttctacgccctctccctcgcccaccacccagaccgcaatcccaacgaccccagcgcatcctcgcgcttcgccaaaatctcttccgcctaccaaaccctcagcaacagcgcaaagcgctcaacatatgaccgggaccacggaatccactcgcgaaactttcaatccacgcactccactgcaacacccggtcagcaccccatgggcagccacagcagtcacggcgcatcatatttcgggtcgcggcctgcaagcggactcagtaaacggcgaggcgtatttaagggtcctccgccgagtttttacgcgcacggcgggtatggtaataatagggctcgaagggcgggggggttctattcagctgggtctggtgctggcggtagttcggccggtgccgcgggcagcactaagaaagaagatgatccaacggggtttattgatcggaatccaatatcgcattttaacgcgcggggccattatcgaacacagacggcagaggatgcgcgaagacaggaaagacggtccagggtggatgccgatatcaatgagcagtatataggtagtcgcggagactttgcgttgcggttcattgcagtttcaagcatcttgctgggtgcgggcgcattggcggggttccttcgttggccgagcagtgatggcagtgttaatgagaagtcgcgccaaacaaagtattcgaggatgaaagatggctgatgctatttttgcaggaatgccagttcagtctgtcttgggcgcattgttgtggtaaactgtatatagtccataaagcggcgggttatgtacggtcttaaaattcctttagagcagctatatagaattatgtctacaagcaatttcaaaactcccttcagagtccgcagaacaaaggaaatgatcatattgatatacagtggtcgccaatgattacctgatatctagatatcacggtccaactaatcctatcttactgccccttatatgcaataactcgcatactggagcaaaagagaggagttggcacgtcctaacagcaaagaggaaggcaaagagtcgcttaagcctcgaaagtgaagctggcgccaaccttgtgagcagcctggttgaggttctgggtatcgaaagaagcaccaaggccgagggtaacaccagggcggagaagaacgttgtaagccagggcggcaataccccggtcgttgatcttgacctaaattgagaggggtttatcagatctgcgtgattccaatttttttgggctaggactatttaccttggcaaaggaagaaggatccagtctgtacttgctagcaacctcaaggccgacggagttgccggtcttggagtcccaagtggccttagcaccagcctcaacctgagcgttgacgcggtggtagtagctggcagagaagacagtcaggttgttagcagcctggatggcagcggagtactgaggaacgctgtagccgacggcagcggagtacttggtgatggcggccttctggacatcgtagccaccctcggcaccgacgaggaagccttcgtggccaagaacggcatcgaagtttgcagaggggccgttgaggagatcgaagaaagcacgagcgtgcaggttgggctgcttgaagtgaaggttgagcttagcacccttggactgcttggcaggaaggtactgggtaatgatctcagccttgaggcccttggcgatgttgttgtcgagctcgagcttggtgtcgagggcgttggcagtagtccacgcctgggtgagggtgaggcctgagcaaggacagattattagcatcaatctatgttcggcgacccttgacgttaaagtgattctagtggacggtgacaagcaatgcgaacgtgttatatcaacaacgagcgctttgtctggcttcttgggagtttttcgtatgcgattgtgggggcgtttaccagtaggggcgtcgacgtatttggcctcgagctacacaaggagggtgctgttagtgacagcctagatgacatgtattggcgatatgtacttacactgccagcgataggaccctcatgagcggacttgcccttcacgttgaaggtgacgccattgggggccttggacttgacctcaaggctagctaaaaacaatcaaatgtcagctatgctcacgatcaaggcaacgagcttgaacaggcagccgggtagttacttaccagcagagccgtggtagaagtccttgttaaggagctatcggataaagtgatattagcttgggattccgcgattcttcgtccaccattgctagcttcattgcgaaacaatgtgggagaatggccaacacagcacgtacatcgttggccgccttggcgatgtcggagaaagcagcaggagcagccattgtgtaggattgaatgagtaataagacgataacgtcagagagtattaaagcagaaaagtagcagaaagacctgagcgaggaataggatgacgagggaggaagtcgggagaagattcaattcaaatcacttgggaggttgagttcgcgttccagttgctggggcacgggaagctggctcagttgtgattggccgtggcggcaaaacccgtgagcaaggatcccgacggtgccttaaaacgcctggggcatccgatattacctgaccgagctttgcttccggcagtctcgccagtctttggtcgacttccagacacctgaggctacacctagtctaagtactgtcgcttagcctttacttttgatatgagagaggatttgacgaggcaccgctgaatttctactaggctcctgcccgtatggaatctgtgggtcatacactttcgaaacagcacatgatcacaaggtaaccaaaactctaaagcaactaaggtctacaagaggagttcagagaagaggcgatgatttgcattttatctcatctggtttgttgcgtcgaagagcgcgcaggacttgaccagactggaccaaacgctacgctaatagtaaaaactcgcttgcgtctaaatgaccatgatctgtaataatcatctattcatgtttctatatctcaaaaatacgatatgcaattcgcaaggacttgctatacaatcatctattcggcgtcatcgtacttggcgttgtgggtagcaatggctctggaaagaagcatgtagattagcatcagagcaggcagctttacctcgaatcgacgtaccttccactggggtcgctctgcttcgaccatgtggggacccaccgctcgactgtggacgcgcagtaggatgggaagtgctcgtcaaacatcatgcggtaccagtaactgttgccatgttaacttctcaatttacgccaatagaatgggaaagacgtacgcttccttggtagttggaatatcatcaccccactcgggcttagggttcttcatcatctcgtcggtgacgtgaagctcagcgtggtccttcagaccatcgatccagctgtagccgacaccgtcactgaactgctccttctggcgccagaggatcttgtcgggcaggta

SEQ ID NO: 5237 - DNA, 4718 bp, Emericella nidulans
gcccagatctcatagttccagaatagtggcaggaagccgtcgactgttgggccatactcgagtttctcctcgtcccccttcgaaaacagccggtcatccttattgacctccagtaggtgcaaaggcgccgaaggagcgagagtccctcgagagtcgtctcgtcgttgagccggccacccatcgtccacagttcctcaactttgcccagcgagacctcgttgatgatgccgtaaattttgagtcgcgtctgggccaaaggcacacagtcccacgcaatgaacgtccttaaatcccacgatccactatcctccatatactcatcaaccagttcgagcgcctgttcacaatcgaactggtccttgatccgctcaagcgaatctcgtatcagcttggcaaccggaacccccgttgcaagactcttccaccgcggatgcatatagcacttgaccaccgtgttgtcccccttcatatcgaatcctagagcagtatgcgtcttgatcccataggcatctgggttttcaagggcagccgtctcctcgtccgaaatgaagattgtatcccgaacatgatcgaagagtgtcatatcgaatccctccaacccttgctccaccaaccctgcaagcaagtcctctgtaggtcgcttgttcaagggatccgcagcatccttcccggacgcgtaactcaacggttcaaatgcactccgaataacgggattgcctgacgcctggaaattaaggctatattcaattgcgagcccctgtcggctgacaatgctgaaccaggttggtggataggtgccgagaaaagggaggaggtagcggtggaagaagagcaggtgtttgtattgttggccggttgtgtactgtgaggcttggaggaaccgggagaacaaggagcccgagtcgagccaccattgtctctgggcctcattcgtgaagggcagataggaggtaagaagagtaaatggctgcgtagagataggcttaggcactagcttgccctgaagtggtagcgacgttgagcttatctgcagctggtttccgttgctgaaagacggcatttttttttagcttgtagaccttgctcgaagaaaagaaagattagagcgagtaatatggcgttatagttcgtatcaactggctttcacaggcgcttcccaagagtatcctgcgttagggcatggcgatgcccactgggacacagtcccttttaatagataacaccatctctacctcaaccatcccttcaatacttcgctgtccgacgtgtagaagcccgcgaatcaatgagatacaatattcgccgacgggctgggtttacagcagaagcagtggcagaagcaacacggcaccttcatgcgaaccagtcgtccatgtccccgtcatccggtgcgtgctttgcatgtgtagatacatcaacctttaccagctcgattcagaatgcacccagccacgacgtcatgttaatatcaactgagtttgttattaaaaacatgaagagttcccttccttcaggtccaccctcgtctggtatcggactattgagctagagccgagctatatactgcggatggcgcctctactgtttgcttgggcaaacctacctcctccagctattccaagctaaggtaaccgagcgggctgaaaggtctagatcagttaaccattcggttgaatgtcccattcttacatgctccgagcgccatccgaacacgaggccaaatagaccgaatacgaggtcagcaacaattggtagcatgagtggcgggatgttcactcatccatcgctaactgcatcttgccgcaactagaccttatcagagctctgggaacccggtttgggtgatgcaatcaacagaactacttcgaaatcggagggaggcggaaatatttgggaataaaagaggacgaccacaaatgctagattgaggctctaggagcagaattcctactatgtttagaatgaggaaaagccgcttttttatatctactgtgctagggcctagaaaatcactgtatccccattttgaccaattcaatatagtgaaatgcatactcgaatggaataatactaataacatattgcagtgctaaagaacagtcagcaccctttggaggaggaagcaacgtgagccccgtagtaaaagcaatacagctgaaggataatatcttctagagagcctttccaccatcccttcagtttcgacaatcccttcgggaccaacaagcgtgagctcgtttctccaatgtcttgataccaaataggtagctacgggcttctacagcccgcgtgagcatattttccatttctggttatgtcagtaaggccgttacatgaacggggaaagggcgtcgaactgtcgcttatcagggaatctggcagatagtgccgaagcggcgtcgccattcttgaatacctgatcgtaataatatgtggattgtaactcttgctcttgatcagttgggtcaggtatcggaaggaggtgggggatatggcgtagaagtgacggcgtcctgtcactctaagagtggcggttagggcagtcatgacgttggtgaagggaaagtagcgttcttttttttgttttgaaggtatcctggtacgaggcataggtaggccaactagtttcttctggaattacaactgagttttggtgctgttagcaaaggccataaacattggagagatgcgtttaaccctttaagcccgtattctgatcccacctgattgctaagatatagctataacatgaatatctcgcaacgtgcaccataaggtcagtcttatcttactacatgactctcctagacgaaatactcgccggctgacggccgagtatccatatgcggccgtgctgacaacgcccttgcctcattcacagagtgtgatcaagctgcacgactcaccaatcacgccatgagagtctcttgaggttactaggctgtgaagcctttgcaatcctggcccaacggttgatatctagggtgactgcgcctcaacccagagcaggaaattgcttactgccgttacctgcccctacgtatattagttgttagcatgagttatgcgccaaggggcacacccgcctgcattcacaccaagtcggtgcatactctcgtacgatctgccctcattggttagagaggctagatgtgctcagttttcaaatgcagtttttttaacggatgtgcctacgcctacggatgctagggcaccagtgatgctgatcctaagccaaagctattcttattcaggccaatgatccacatccttttcctttacgaagtgacaatgctttagaagtctcgttgcggacatgactgaccgctggaactcctggctttgttcgattgcatgagcttctagtcagagcttgggggagagcacacgcccgcttataggagtcttaatgccggtcaataggcaagcactctatgcttgcttgagagacaagatgcgtacaggtagacttgtttcaccaattccgcagcgcaaagtcggactcctggtgagcggagcaggtgaactttcctcccctaaccacatcctcaacactagcataccacagctacagatgctcactttatctcgctattatataacccgttatggctgaacacactcgatgcaataaggtaacgctcaagttggagttgactcggagttttggtgatctttgaggattagggtccatcctggcacgagacatgaaccgagaacagacgcttaggacaccaggagatacctgcctaatacctttctgtaccatgcgtgcactatccttgtcccggtagtcgtgaatcggcctttttacagctgatgataaggtcattttgctataaaccaaatctgtccttgattctaaacatgagggccggcactcaacgctctcccttctgttgaactatacccttcgtttaggccggagcttcgagccgtattcattcctaggctgcagatgcaattgatggcgcgcccttccccttgtgcgcttcgcagtgatcactgctgttcacaagtcgagtctcacgatcattgttcggcgacacaagtcacacagtggaatcatcttctttgaacccagtagagtctactgtttattcctctctatcaagtctctaatcgttcaagtggcagggcagcctcggatatgacataatattctgatctccccagcatcaatatgtataccgatactctgggtgcctatccccaagaatctcaaactgctcttcaaagctaagtccttccagccctggctcactcagaatctccgttctcttcacctcctttcgccgattcagccacatcaaaacaccgacttggagcaccaatcccacaagcgaaaccacgatgagcgagagattcactgtcgcacctaaggtataataaggcgccgaactcttcgggtagatccaagtactcagcacgccgcccgaactagtagtgacgaacccgagggcaacggctgtggcgcgcctaacatggcccgctgtattgttggggacccatgagatgagacacggcgctgcagcgtagattcctgtgacgagcagaataagtgccgcgtagcggagtgcgatgctgcggccgacaagcatgagcgctgcgccgatgagagcgatggaggtggttgcaaaggcgcagattccgcgctgccgataccggtccgctatgtatgctgtgatcatagtcactacgaaagccacagcatacgg

SEQ ID NO: 5238 - DNA, 2525 bp, Emericella nidulans
gaagccctcattgtgattcatttgagggatgtcaggaaggaattgatacaaatcagggcttgtgggttgggaggtcttgctagctgcgataaatcgaaaatgattcattcggtgcggttatggcgctagccgctttgggatgactcattggccgttgaacatctactgtatgctttgcacgacctctatatacatgctcttgggctactcttagagagatgcaaatatgagataagataatcacttgtaggtacatctactttaaatccatttaaagcggatgtatagcttccattgtgccgcacacaaaactatggcggaaatataaactccgttatcggccttgtcaactgcactcggcccaacactgtaatagttctccaacgccggttgagagacaagatggaacccattatgatgtatattcgagcacgtagcatctgtcattctctgatatttagcaccaactacatgctacctgccaaaagatatgcagaaccagcagcccagcaatctacaaccgggagatcagaaacctacaacttatctgccatacatctaaggtgatttacaaggacccagactttggactcctgaccaacatctatccgtcgacatgcaacccactggctatagccagctgcgccgacggtctaaatgagcaccctgctctgactctgacctgccgactcacctagaataattattaacacccggatccaagtcgccagctgacgcgccctgagataagttgagggaggctggcgccgctgttcagatggctgctatgtggattcggacgcggtagacgtctttgttgatccatcgatccaggagccgggcccagagttaggcctgtcggttggcaggcagaccttagacttgggatgggtgacatcctggcatgctggtcggttggagccgatggctagggcccgggcgcatgctagcagtagcacatcaataatgcatcgtctcagctttgtcgcgtgtcatcttttagtctccagatgtcaaatcgacccgagtttctggaaccgaagcggcgcccgccggctggctgacttggctcgctgtcttggatattggatatagtgcccaggagtatggatagactggtctcccctgcgtaccgcagatcctgatgttacccctggagcgacgcggaatacgaaggacgggcgtttcaaggccgcaacccgtggaggacccgagtacctggttcagaggctagcagccccactgaagcggcctgtcagacgggatcttcgacttcatcgagtgttttgtgtacagagtcataccaaaaatgggtagagcagagtagactggaggatcctgttcctggtcgggtcctgttcctggtcgggtcctgctccttgtagggtcctgaatcctgggacaccaagtcgacttttgagcccagggatccggcctcttattccagcttgggaacgcacaatggcactaatattgacattaatattgactgggatcttgactggggttgaaccgtcacaaagtcacacggcgcttatttctcatcatagccaagatgaaacttgacaggatattaatagatcaacagaccatcctcgaatacgaatatcggagacaaagcatactctggagtagaatgttcgaaattagatgattcgatggcaggaccagggtgttcctcgctaagtggaacgcggctcgctccttctcgtattcttggagatcgtctaggtgacaggtcaaaatcaaattctccatgactaatggggtgacagcttgagctaggtaatgaactaggtaaggccctggggtgggaaaacctcgcttattttagttccattgcattgggatacacagagcgaggtggctggctgaatgccgaggtacatcctacctgcccctgactaaatccagagaagagcttgggacatggacaaggagcggttgaagagaaggcaccatgaggggaaaaataaaaataaaataaaaacaaaaataaaaggaacccagatggaaactcaagacacgaggatcccgggcgatctgcatcctgcatcgtagggctcggacagaccgatgtgaagtggctgtgctaaaggctaacgtaaaacgaactctttgcatattctccataatagttcgtcaacgaaatcttttcttcttgcttgttcattctgatgatagacgacttctctattggttgcacaaatagatggtctgcgtcagggcgggatatcattttgtaccctggttctcagacacggctcagtgccccaacgctaggtatacccatgtctagtactatacgaaatgtgagcttgaaattagaggatagattcctgttctactttcgccagaaatagctcttctaggtgaagacggggccctggacacgaatgtaaccgactcgacggcaagcgagatgcaaagacataggaaatccaaacgaacaacaatcagagaccaagtcgtaactcatcattcgaaactaagagcaaaaaaatacgccttttcccacgtcttcc

SEQ ID NO: 5239 - DNA, 2798 bp, Emericella nidulans
acagcggggaagatcagctcatcttcactggccggtggtgcgctaggaaaaggcgacgcgatatgctggacctatgtggcgtccttcatggcgtctgtccagccagtgtccatgtgaggtcagcatagacagtctcaagcgcggatatctgctcctgcacgactccggccgccgagagggctgagtgaatttccggtacacccgagaaagatcggactgtcgtgggcacgcggtagttctgcttaagcagtgtggcaatgacccattttgcgatgaagctggtgccgccggttacgaggacgagggtcgagattggagttggggctctggcatgacgggtgatgaaatctgtctgggtatggggaatctagctggcaaaaatcctggcggtgatgaagcaaggttgggatacagaagaaccaagtatctaggaggtgaactttgcgatgagcctgtaactggaggcgaaggctttgcgcgcgatgggtgataccaaccttaggtcgactgcagcgcgcggaacgcaattggactgctcgcgctggatgatgcgctcggctctaacctttcaacggtatacagtaactagctagatacggggtggtcgatagggccatatctcccggctgacgaggggaggctgagtgttgaggcttcatattaggccagagccactattcgatttccagtgcagttgtgctttgtggtataaacagataatggagattcgaaaaataaaaataagaataaagcaaaatgatataacaacacaaatcaaatataaataacgggtctcccaggttgaatcattgaattggttcgtatttcggtgccccaatactgaccaggctcccttaagcataccattagaccaccatcagtgcaggcgtggctttagcatgatagtcacagggattgtcatcagtattatcctctacccagttaccctacctggcatcatctgaaccacgaggtcagcttgcacaaataaccaagcacgtcgacaagtccctgagatccagtactctatgcttccacctggcgtgacccaggtttaggtggctagctaactatgccgggcatgtctcagttaatcatttccctagtgcccttggagccagggtttccgcctccatgagaccccatggaacgccagaaatgctatggctgttttcgcctgttggacaggatcataccatccagccattcaagtcaaatacttacaatattacggcgatctccggttgagggaaccctgagccctgagcccccaccattttctcaacgatgacagctactgcagctattgcagcaccggcggcttgaatacattatcccgagtataacttgaggatagtcgcaacggcgaaggcgcagctttatccagccgattggaccagcaatgcaatgcatgccacgtatgtctcagtcagaatcacaaccaccaatccagggccttggtatctctcagaaaattctcagccgtacaagcccgccaatagtctatctcaactgacagcagcgaaccccgagtcacctcgttccggtaagcagagtcagacagccaaagagagatcgcggatcaggaacaagcctacagcaaatccggtaccgattgggcccatccactatctgaaacgacgcaagctctccactcaacactgatcgtttccctttctgtggaagccccctgccaagaaggcaaaagctgcggattgatgatattctcatttctgttctgcttttgtctcttagtttgttctggttctctgcgtcggcttccgtagggactgcggaccgcttcggatgcgatggcgttgtgtgaaacaagtgcagtgcgttgtatagtgcttttctttctttttcatttttcattttttcttttttcattttttttttttaccattctccttttcttcttttggtttttcttgatctacaatgcgcaacatcaggtgcaggccagagctcaaccaagtttcagatatctccattattagtattctcctcttgggttatatactagcactctatagtcgttaattatacagtgtacacccaatttcgccccatattaccccatatttacaccccgattctacaaagcaaccccatatgtactgtcgatatcatcgacccaatcatgcgccaacacccccgtttcacatcacgaccgattaatttaccacccggacccgggcttcgcaatcttgcccttcaggtcggcatcaacagccacgcccaggttgagccccctccgctccgcagagggagaatcagaggtgtagccaactcgctcctccttccaggagttgcgcatccgcgtaatctgtccctcagtaaagtgggtcaggcactcatcctccgtgtagtccatgaagttgtggatcgggtcagttccagggatagagtaggtgttgttgctctcgacggcgcccttgcacgtatcccgaccgataggacatccgaaagcagcgtacgcctcagcaggggtgtcgtggatgtagtcgccgtggccgaagcacccggcattcatggaatcgctgttgccaggctggaaggtgtggaagaggttcagccagtggccgatttcatgcacggccgtgatgccgcggtcgtaggggggcttgccgccggggagagactggggatcgcagacaacgccatccatgatgaactcttgctcagtcaccttgtcggggaaggtcctagtcattgttattacttttccactgtcaaaaaggtttctcgtcgagatgaacgtacgcataaccaggatccgtctccgattttgccat

SEQ ID NO: 5240 - DNA, 3929 bp, Emericella nidulans
tatctccaaggaccgcattcgcattaagatcgcctcaacctgggagggtatccaggccgctcacatcctgcagtcccagcacggcatcaactgcaacctgactcttatgttctctcttgttcaggctattgctgctgctgaggctggtgccttcctcatctctcctttcgtcggccgtatcctcgattggtacaaggccgctcacaagcgcgacttctcgaaggaggaggatcccggtgtcaagtctgtccagagcatcttcaactactacaagaagttcggctacaagaccatcgttatgggtgcctctttccgtaatgtcggtgagatcaccgagctcgccggttgcgactacttgaccatctccgtacgttgccacccttcaactataatttttgagggcgtatcactgacgaaccacagcccggtctccttgaggagctctacaactccaaggacgccgttcccaagaagctcgacgctgcctccgccaccaccctcgacatcaccaagcgcagctacctcaacgacgaggccctgttccgcttcgacttcaacgaggaggctatggccgtcgagaaactccgtgagggtatctccaagttcgccgccgacgctgtcacccttaaggacatcctgaagcagaaggtccaggcgtagatgaatgaaccatgaatgaaaaggcaccggctgccgcgtgatgagaccaatttcgttatgtaaaaatttggcgacttgcaaaaacttgctttgttttagaagatacgagttacggaatatcacttcttatataagttcaagttttggttgctttttgagtgagtcggagtgtatatccgctttagatacacggtgatcgagctcgggaattgcgtgagtggggttagagtttggctgagctccggaagagctctgttaccggattataagccgaatgctttcaattctaacacctgctttaaagctatcggctcgcttactgagttactctctagctgtgaatgcaacccgaaatgccatataagagaagatcgacaaggacagtcaaatagtgacaccgttttcgaacattttcggaagagtgctatggtggggttactctgagactgccatctgaacaggcgaagtgacattccattctccctggactgagaagagtaacctgaatgttgcacacgtacaggctatttagggacactgaaatgtgtgtttatattttaattccattcttgtgaatacattgggtagatacttgagtctggattgcactgcttaggaatccgatgctcccctccccctcagcagcagcgaaaacgtcattccgacgtcccgtagggtggggtgcacacgaaaaccaccaagaggggggagaactgagtggcaggaattgcgagggtcgaagcccatcgaataatccaccgaggcctctcatcctcagcttatccagtcagcgttgcgaccttgactacccctcgtccctcttcttcccttcgctccctgatcctcttcccattcattccacctctctctgtctgtatccagtatccatcctcacatcactttcaggtttaaccaattcaactttataattccatcaaaatggtcaaggctggtaagttgtgattgtctttctttatcttgtgttattattggcttctgtcgtggttggatccacgatcgaccgttgccggaggaccttgtgtgagcacatttgagcacctttcgagctctgccctgagccggcagcctatcatcggctccttttcccctgggaggcgttgatatatgctccaggatgagaaagctctagctagctagggtagctcatctgctgtcacgcggccaggggtccggtcgctgggtctgagcccaggaacaccccaggccctccatctagaccccagatctcacagtggcgatctcgattgccctggtcttattcttaaatcattggatgcggtagcggtgtaacctttctgacatggttgttcttagttgctgtcctccgtggtgactccaaggtctccggcaccgtcacctttgaacaggccgacgagaactccaagaccaccgtctcatggaacatcaccggcaacgaccccaacgctgagcgtggctttcacatccaccagttcggcgacaacaccaactgctgcacctgcggtggccctcactttaaccccttcggaagacccacggcgcctcgaagatgaggtccgccacgtcggtgaccttggtaacttcaagaccgacgccgagggtaactccaagggctccaagacggataagctgatcaagctcattggtgctgagagcgttctgggcgtgagtgactcccttacctgagatagcagcttgagaaatgctgactcgaaatagcggacccttgtcgttcacgctggtactgatgaccttggccgcggtgactctgaggagtccaagaagactggtaacgctggtgcccgtcctgcttgcggtgagcattcttcatctcgaatgggggttgagtggacgaagctaatgggaatcaataggtgtcatcggtattgctgcgtaaattcacccataaaatgacgatatgatgactcaaatggataatgtgggcgacgagagctaggtagcgcaaaactgtcttcagatgctatttcagtggccttagttgaaaaatgtaaggtgctgtgagctagccacattcaaatcgaacggcagttacgtgattatcgtatattcgctttttccatcattactatgagatagggttgtagtcaggaggcatattgtaattcctttgacccctgaaaatgatggcagctggcgggtgtcatggccagatctctccccactttgcaggagccagtacggagtccggccacggctctggcagtttgaaccacgtttccgcttatgttccctctccaaccgccagttcacaacaactacctatcatcttacctttcgctacttactaactcctttttctctcttattttctctcctttatcttatctgttttctattgaaagtccctccttggtcaattgaattcactcggttttgcagcatgcctctggaagctcgtgttaagtcagtgctatctggcgacactgttgtcttgtcgcatgttcacaaccctgcacaagaacgtgtcctcagccttgcatatgtgtccgcgccgagactgcgacgagaaggagatgaggtgagcctttcataattccgttttgctgaagtgtcctgagatctgtccatggaggcagagctggccttgagtaatgagcaacacgacacgatattttgtttcgcccgttcctcttcatgtcataatcatatttcttgcgctcgaatctttactaaacacttttattctacagccctatgcttttcaatcccgcgaattcctccgcgaacttcttgtcggcaaggttgtccaatttcaggcgctgtattccgtcccgtcctcgcaacgcgaatacggaaagatcaaacttccaacatttgaggttacgttaccggagatcgtcgttcaggagggatggagccgtgttcgtgaggaagccggcaagcgaagtgatgactctgaggaaactcttgcaatgctagaacgcgttcgcgctctggaagaccacgctagaaccgaaggaaagggtgtctggggaagtggaaacggccgcatcgagacccgctatgatcttgaaaatgccaaatctctggtggacgagtggtcaggtaaacatctcgagggtattgtcgagaaagtcttgactggggatcgtctggttgtcagactgcttgttgtccagaggagcacctccaggtcattgttgtggttgccggcgttcgggcacctgcaactaagcgggtaggtgctgatggcaaagagcagcctgccgagccttacggtgaggaagcccagcagtttgtcgaatcta

SEQ ID NO: 5241 - DNA, 3095 bp, Emericella nidulans
ctaccatcgatcacatggagttcctggagcgggaagttgagcttcttggcaagttctcaacgccagtcttgatcgcaccaggttcaagagggaaagcttgttaaacaaaggcaaaatggcgatagggtagatggtgatggcgaaaacctgaacaaagacaccaaaaagccaaaggtagtaaaagcatgaagtcccagtcttctggacaatcttcagaacggcgctaatgatgggcgcgcccagaacaatacccaacatctggcccttaagcatgtcggatacccatagcttaaccgtctgcttgttaaagccaaatttctcctcaagcacgaatgtgttgtagtaggagatcgggagggagagaacagtacttataaggttaaatccaaaaagaaacaggagagtctggggtatttcgccctggaaccgagctgggaggtattgcgccaacaaaaagccgctgagtccccatagcttggggaggacatcgccgtagatgaatgcgagattctgaatttgaccatataacccagagatgaaaccaaattttgcctttgcgcgaccgtacgcctgagaatcgtgacaatgatagtcagccgagccgttgctattcgatgggagacctgattaggtacttacttggctctgatcataaaccttttgagacacttcgccttcaagcaccttaggggccttggttcgctggagaaccttatactgacggaacgagagaatcccctcaagaatgaactggcctaaagaaaagccgacgagtacgttcttccatgggaagaaggggcggtccagtagacgcgccagttgctagaagcaatgacatcaactccggttcctgaagagatatgttcaggatgaaaattttcaggatctgaacacttacatcgagaatccacatcgtaaatcgtcagcacagcagcagggaagttgcaaggtgctggtaggttgtaggtccgaaggcggacaaaggacagcttgaaatacttggatgatgcagctttacggtattagtcaccctccgctgcagccctggatcgccctctcgtgtttaatgcgcatgcctcttaacgtatgtttcctagtcatcgtcgcgagacatacagcattggagtcttatttaagttcgttgcatttcgtgtccccttgaatagctcgtctaattgtccatacaagtcgaaatcagaatgcgataggcacaatataaacaggttttttcccacccctaaagcaaaaagccgtcataactctcatcagaagtggccgtctctactttatattctcctcgtcctctgatcagcccaatctgcctgccggataaaccttgcccgttttgcgaaccttcaacggattgacctgcatgagaggcccacgcgttcttgtctttgatttccggcgggcagaagaggcgactagtggaccttcaagcatactctatcataacgacgtttggtataatcacttatcaccgcacgcctctccccttttcgccagatttcccctggggagggctgcttccccccttgcagtcggtctcggaaacctgacctgagcttggcaacaagtgtcttcgaattagttgacaatgggctcgagggtgttaccactgctcaaagttagacagatatactccgatttggtagatcaagcttgtgaggaacgaggaaaatggttttgacttacgcaacaatgttggcccaaccaatcaaacgccagtgcttctcaattcttcgactaatggcaatcttctcgccaacctcagtacaggctgggctagtcaagctcagcttagcagcatcagccttgacaccgaccaccttcgcaccggtagctgtagagccgatattaaccatgagaacctcgttcttagccagcttggcgaccttggcctgcttgccgtcggcagtcttgacacccaaaagtcggcgcagcaaaaagtaattgacctctagctctgtgtagatagcgggaaggcgcccacggtgaccgaggacgaaaccaaccaggcgatcggcacggcaaagagtagggtcaacacgagtaccaacaccgatcaatccaccggggacagcgaatttcaggtcgttgtgttcggcaaacaaagacacaacccgcgagaagatagggcgacactggatcttgccgttctcgtccttagtgacgagacctggtcgaatttcgatttcatcgttcaacttgaggacaccagtcaaaatggaaccaccagccacaccaccctttagctcatcaatctctgcaccaggcttgttcacgtcgaaagaccggataacaatcatgtgaggagatgccgtgaaatcgcggactggcacggggatgtgcgaaaccagatactcgttgacggcatcgatgttgtacttgagctgagcggagatgggaatgatgggagagccgtcggcaacggtaccacggataaatttcaagatcgactggtaatgctgcaacgctccatcttccctcatcaaatcgaccttgttttgaaggataatgatgtggctaagcttcatgatttcaatagcagccaaatgctccgaagtctggggctgaggacaggtttcgtttccagcgataagcaaaagagcagcatccatgacagcggcacctgacaacatggtactcataagaatgtcgtgaccagggcagtcgacgaagcttgggtggacctaaattagcaaccccctggcaactacgtcaagatagctgggcgctacttacgaaccgtgttttaagagacggtggcggccagagcatccatttttttcacgggcgggacaatttcctctcactttatagctcttgaaccagtcgcccaaggcaagcgggtggcccactttaaatttcggttggataaccagttgtggaaggttcgcccaccgtcttaaacggcagttgaccttgaatgcttccccctgataaccggcgagcgcctggccgttatatctctggggttatttctacaaggtttgacagagcttctgtggttcttcttctttctaaaaaaaaatcctcttttgggtctccctccggttgtgtttttcctgataaagatctctctccattaccgt

SEQ ID NO: 5242 - DNA, 2081 bp, Emericella nidulans
ctattgttatttttttctgacttttcgtggtctaacgtgcaccaatcgttgtctttgatgtagacgggctatgcttcgggatatatatacactctcactcttgacacggcaaaaggctgccaaaccaagcgctattttggactcggacgacatgtagaagtcagcggatcgactgctacgacatacattcatagtctatgacatttcaacgtgttctatcacgggctagccattgattggcagtggggcggaagtggcccagtgattgcctaagtctcctctttctgactgttcgtgccaaatgcaggattgtcgatcccgttagtgacgaagctcgaaatgcattagtctgttcctggtttgtagatgtcaattccctgatcaccaagttactgatgctgatgaaaggggctgagcattcttgcacctttcaagtactataaggcataaatctccgccaaatttcggacaagatagcgcggcgaggacgctcagaagcgtctcttcgagcgaagctagtagctagtttgagcacgtcacagcagcagcagcatcctgtgatcacagtactccactctttgtcgctgctctagccgttcgcctctcatgggttgtcggcataatccagcatcaacttatgtcaggacaggccctgcgagatcatttcatcatactggccactgccgtcgcatatcatttctgtcgaaaatggcctactcggaaaatcccggttaggcttttctcgctacgaacgcgtaagattctgctctcgtagatcaattgagatattcatgcatattgaagagctttctaaccaagaggagtgctcagcgaaatgaatgtgctacaatctcagcgctgaagtctgattatcatctgtctggatgctgtgaaccaaatctgagccgcattcaagcttttcaatcataactttgaaatcttaaaaaatccgtttccctcaatcatttcaatgccgatgcgcctcaggggcaaggaagaatcgacaatgatgtaacacacccacagcaacgctgccgaattcggaccggctagggcagatgggcgcacacgggaggcaaagggggacattaacacgggttgattatcgcagtggagcaggcccagtgacgatcagttgataaggcaagtcctaagaatttggcggcagccgtttccgctaggatcgtcagggccagatactcaagtacgtaagctccttgaagcgtccttgggacagaaacgcaatgctgggctcagattttgagaaactgctggctgatatcgggaatatcggtctaggtctaactgttcaaactctggtaccgttattccgatagccctaaaccctgaaccgtgttttgaagccctgagccctaaaactcaaaggagactttatcagataacgacttcttcaaggggccctgagccccttgcgctccgccaatcatagtctcggtacgctgcatgcccgatctacgggtgcaaccttgaagatcgtgccgtgatagcggcactttacactggatcccacttctacgctggttctcgacgcgtcttttcccggtggtccccgtcgatccctgaagtcacagccacccctttgtctcttcggcggttgacttttcagctggcctccgtcacttcttctgctcccccaatcctcgcctggacttggctttacccagaaactctcgccttttcagaactcttctcatttattcgttgttcttttcttttggtagtggtgtttaaccacttttcacttatagactgctgtcatgcgtctctcaacgacagctatggcgctagccctcgcagcaacagcccaggccaaggtcgcggccgaatggctgcaagagaataacaaggcaggcgacccgccaccaactggcaaagtggacaagtatcagacggtggtgctcagcggtgctcgcgatgcatatgatagaagccagccgtcgagttgtccgaccatcatgatcgggacagccgtaccggacggggacaagaatgacgggtggaaagaactgtacatggtgattactcgcaaatagaaccggacatttcttaatgctttttgg

SEQ ID NO: 5243 - DNA, 7032 bp, Emericella nidulans
ctgcatctttgtcagcgctcattctaaccattacagatagtagtgtcgatacaatgtgtatagtcattcccgacgaaagtgcataacacgtttaaccagtgctcagggactaggaccatgtggatacgccgatcgcgcccgcgcagattgtgtacgttatacaattccaacctctcttcaaagttgctgtcgttgtctgtggggactggcccgtttcacgcacccacgactgccctagggaagcttatctggtcagttgttccgcgccaatatccatgattctacgagggtctcaaaagtcccacggccactgctactacggaatgcttttgagtttgcggttccgccggtacaacatggccggtactatccctggttctgtccctggttcaggtggttcgtcctgggtccggttgggcccgtatggtgacagatatctacacaatctacagtgtagactgcagcacagatcgaaggaaaatccgtctacgctctgcttcctactccctatctaggccagtaccgcggaacatcacggtaatcggcaatatacaggatatacctgcgttctccagactgcccagtcttgatgatcaacccgcggcttgccgatcagcatatcagcagactttgctagtacaggtatactatgtttggcactgtcatcttcaaccttcagttcacaccgcaattatcggtgcaggtatgggtagtcagttagcaaggaatgaatcgtaccaaacaatcagaacccaccaagagacgactacctctcatgtgcaatgcggtcccgtgacaccggtcccgtcattgtcattgatacgctgtatttgtcagtcggcagtcccggtccctggtagcgataccgattacttatcactgtgtactgtggcttacacacatgcatacattggccccagtctgttcggaacctaaccgagagacgggaatcggtagccgggtgtaaatagccggtattcctactccgtgcataagactacaaagcggcgagtacgatatctatgtcttttatgggatctgctattcaagtcactatctaatgataatcctagcttccaggcgcagccctgcagactgcagagatcctaccaagcgaaggatcagttaggagtgggccacacacatgagatgacattgtggcaacaacttgttgcccgggttcattaaccgatgctttactgcagtagattgccagctagtaacactagcaagtctagcctgagcatctacgccactggtagtcaaacatgaagaataacgcaaaatcctgcaatctggccctgcgccatccgacccaatgctgggagcaggagtcggaaagaaaaactgaatctgagacctcagatgcgcaaagattaaacttcagccgctcgtcggtccccaaaccggcgtcccaggaaccagaatcatggaaattgtattgaggatagcgagcacatcaaatgatttgatcgacgtgccaggaaggcaatgacttaaagaaagagcctgaacaggttgtcggtgacgggattcggaaagaatactctataggccgcggctgtagaagagtttgaactttaataatcccgttaatcactgcgctaatcgtagcaagatttgccatgcacggcggacgagaattcctttggccgatcaattgatccgctcaggccgtcatatgcctgtgcctgccaaataggatcagcatgatcaacattgagggcaaggcagcaactacggaatagtcgtgcacaatgctcccgtcagtttgggtttttggatttctaaataggagaaggtgtaggagagacagagggtctctgtccaacagtgtctgtacagcaggttattcgtagacaagaagggaatatatacgtaggcgttcgactatcccgtagacccgtcgacaaggcgagaagcaaatctatatacaggaagaacatggaagatatcacataaaccacccgcagcaggagaaagggttataaaggacgaaatgaatccgctcatatactcgtcaccaagtagggtatatctgctcgcagccgacttcaagaagggaaagaaaaaaatatgggtacagaatcgggaagattgacgatcgacaagaataagccgttatcttgaagacgagaaggaccaccgaagtagtatattaaagagagtctcgaagttatgggcatccattaaaccacgtaaggtacagttcgggcatgaggtgtagttgctcggccgggcgctgtcggccgaaagaaggaatgaagcaaaagcaatgcgtgcgtgagtcgaaaagcaggtactctatcttccccatcttcttgccgttggtgacattttgcctgttggctgtagagaatcggcacttgatcggccactggcgtcgccattcgaaggatatgcaggttcggacgtgatctcgatggtggtgtgctgatacacttttcctataggagccagctcgacaccgccgccggtgttcttcacgatatcgtccgttgagccgtctcgggtttgctcttcttcgtcgttgcccttgtacgtgtgtagagcgctaatgtcggtccgcatgttcttcaggtctgtagtggtgttgagtcggttcttgccgctggcaaacttctgatagctcttgtccaagctgggctcggattcgatgatcagattctttcgggtgagcgtgtagagtaggacatcaactagtccagagcttgtaatgagcgcaccagagacgcagaagtagacgacgctcggagtgtctcctcgtgcggttgccattcgtcctgcggctagaggaagagacaggataatataagcgattgggtatataaccatgtatccgaccacgcgacgaagacgccttagactctcaatatgactgcttcccaaaatggcggactgcttgatgcgtcgacggagttgaaaccataaaatagcatatagggaaaccgtgccaaactctgcgaagaaaatccaaaagtaatgcgtgccaagtcgaatgggttcgtagctctcgtcaatccagcactttacaggttatccacgaggccaaaaagagcaaaagagagagcttacccaagcaccagagggagtgaacacctgtctcccatgagccgcaatcgggattatgacaaggattgcaacgaacacccaaaggccgaccacaattgaaacaaagactcggtagctcagcttcttgcccaaggcgactaggtagaaggtatggaaagcgatagcgagcacaaaaattccacttgctggatctccgacttggagccagaatccctgaagaaagcaggctgccgtatttgccgagattttgttgtccgcataccacttggcgcatatcaagaaagcgagtgactgctggatatctgcgatgaccaggttgtaaatgagaacgacatactgattgtaaccaatgtaccgttggtagctcccgcgccagaagatcagtctgtaagtaatgaacgaaatcaacataaaagtagcgactgtagagagaatggccatgacgaaaacagccaccagacccctgcgatgctcctccggcagaggatcaatatcgagccccgaaccattatcaccctccacataggctacccttgggaagagagggtggctgccgtcattgctgctggttagagagaggaacgccttgaataggctcatcgtggtcgttcaggacggtatagtgcttcgaagcgccgcaagcatcatccacggggggacttgtcaaggtcgttgtacttctgcgctggggcaagaagtcgcgcgtcgggaagatatcggggctgacaagagtatttgaaatggaactggagcagatttgcatttagtcaataagctcgggatgccctctgatcgtagccctgagcgcgagatctacccactttcacagaatacaaaagttaaaaaagggagcgaagacagtggtataacagataatttcattgaagaattttgaaggatcaaaagggacaaggtagcgaagctagtcctgacgtatagaagcaatcctgagcctcgggcgagatttgagttggcgccatacgacagtcgcagttaacaaccccacgaagtgtaccagtttacagaccgaggtggatcagatttgaattctagaggcgtgaacggccgagtccgacacgagatggacccatcaatcagacagggggaagctcagggagcgaataagaagcagtacagttgggagagtacggatactgcatctggaacagtggaaagtggaaagcgaaacggcagagcgacgacgctgcactaccggcaactggatagaagtattgctaatctgctatatagttgtattcaacgatggcaaggccaaaccaaaagtacctattcagtacacttacaatacggtgttctccgtacttggtgctgcccgtcgggccttcgagccctcccgatggagctgaaacccggcttatagatacctagcaataagcagcgccgcaattcgaatccctgtctgaccagtggcgccagtcagcgctggtgtgctcgcaatatacagtcaagcatgttagatgtgatgcccagcatcgacgcagattagcgtgagggtcgaaagcttgcctgggctttgcactttgaaagggcagcaatgcaacttacgtgtaaccccgcagacagaagggtggaaaaccaacccggccacgagctagcatggcaatctaggatcacctctctgtgctccccaatcaaacgcccgtcatcaatccagccaagtgtagtatgactgccgagcccacaccggcccacacctcccgccgatcggttagagtctggagcacattccggatataacgcacttttttgggacaagcggcttataagatccccgctctccttctcaaaggggcatttctcgtacgcagcctgtactctttctcgaacgacgatcgtgcttcttgtcaggacttgggtcggctccaattcaaatggacctgtctctggtccggaatgttatgtgagtccaccatcaaattgtctttcagcctctcgaaggacccagtgccgtcccggcatacgagccgagtatcgatgtctgaatgtgttcccactcgccttcgacgataccctgtaaattgtgcgtgcggagccgcgctgaaagggagcgatgagaggcacgctacccatgtgaccacagtggctattcctgtcctgagtcccattctggaaatgacagccacagttccaatagttgacggcaactggatctcttctgtttcatgattgacactgtcattgatcgggagtcccaacgcgcttcaaatactaccaaagtatgacgttgcacagttgcaccctagcaattgataacaggagaagcccggagctgaaaatttcaaggtgctggtgagatgggatcaaaagagctgacgccgttgagcttagtgggtttgaggttgattggtggcggaatgataaattacatacatagcgtactactctgaatggcaagagcctcggtggtcgggctatctacggaataatgattattccggtcctctctcggtggccatgacggctgaaggcttcccaaaccccaacctctggactcgaatcgaacacacacaaccacgagctgttgacgcaagcgaacctcaggcgcaagccaacggcttcatgaagtatggttctctccagtctcggcgcaacaagtctgtcactagccgctttttcgtcaccaataacaccgcgacaatctatccaaacttttgactacgctcctactattcaataaccccgcactacctagcccggtggtttggagtcattactcgcgcggaggcgaaagccgtgccgctgggatgcaattaatcgaatgagcgaccacagggtctgagagacgaactctagtcgaccagggctacaaacctgcaacccacacggacactccttacagcacaaaacgaggcccatggttccagctgtcatgcagcagacgtggataatggggatctgctattgttccgaaatgggtctacgggctgcggctcgaggccatccatggttctgtcttaggatagagttcgtacggttctaccccttaacatacaacgcgcgcatgagtccatgacatgacatccaaggcaggctccaggaacccgccctgttggactgttgggctattgcccccggaaattgttcggttcgatttgggaagccgccaagaaacagcgtacgctacaaccgcacaaatcatgccttctattccgtatggtgcaatagaagagatctcacctgactctcatgtaataaataccagactgaatgttacaggctctccgagtgtcggtgaaggaattattagtctggatcgcaatacttctggaactggctcttcttatcgcacgttgaccaggaccctgccgctgccatcttgttgcaggagatatcgttcgttaaccccatggttctccaagggtcagctgcggtaccgtgcacgattctttggacttcggatcgggggacttgtcgatcatcggctcttccccgccatgaacggagggactacttgttcacgatactaggtagttcctgttcaatatcatatccatgcgccgtcgtacgataactgaaagatcggacaatggacggaataaatctctgacgccgcaaattataatactgccaaggtcagatttcatgcgagaggcttgatcgctaaagccaattcaattgcctagtctgggcactgggcttcgaacgccgcggatctcagcccacttcgctccagacttattacatagtctgaatcctgaaagtatactatattatgccattccattcgttggattttaacatagaatgaggtcaaatgtctatcaaatgcgggggctgcgagctcctcctcgtcctcctcgtccctcctcggttgtacgacgtcgtaaacgcttatttaagtgcttctggaatcaagccactgaactaaccccatcttggcgggcaacgcgcgcaccacacactttcccgtttgagcctgcggcccgtgaaaatgctatt

SEQ ID NO: 5244 - DNA, 6283 bp, Emericella nidulans
accttcacaagactattttccagattagtgatgcgtcgagtataagaatgtgaagcttctactcagtggtattcggagtagatattattgttggactggccatcactgatgtttccggttttgagtgttctaaagatccacaaagtcattgtgagacccagagaattacataggtacggtggagttcagtagttggtaaggtgactagactagtacatagtagtagtacatagtcgggccaccacctgaacagcctccgaaggcccgatttgcaggtacagatgcgtaacgacgtcaggactcgaggagcgacaggtaggtagacaattctagaactatgccgacttcttgagcgactagaagacatctccaaggctccatgatctaatgcagccatttctgttgcagcgtgcagcgtgcatgggtgatggatacttgcccggcttgattggacagtctggttggtcacaccgaccaatatctccgcatccgtccagatagcgttcaggagccagccctccaggtccgctgctgtatcttcaccgccgtctcatcccccaaagtcagcccacctctccagcttctttttatctattcatctctaatttcttacatcctctaaatttcttttgctccatattcttacggcggagcgatatacgcgtctcggattataatttagatcgctcgctccttatcgtcgagtttctgaacgcttccaaattcctaactcataccgcgtaaccatgcatttgagggctcatcattaaatcatttcgttcctagttttaccaggaacgacaaagaggaggtgagggggcgacggggtcactgcttaccgcactcaagtatcatcaagcgagttcaactcaaaaagcacatctacatgtcatctatctcctcgactgtgtgtaggtgttctgttggccgagatcgcaatagttaaggccgagtttattgtcgagaactcactactcggacgaccctggaatacattttattccggacacctgtgagcaattcaggcgaagcgcaagaagacatgtctgctcagagaactgatcgcaaaaacatttccaaagcacaaatcaaacctttgctgaaacgagtctcacgggatggttcatcgtctacgtcgattgacctctcgcggcactcgtttgaacaggagggactagggatttacacagatgacaagggcacagagttatacaccaactttccgaccaggaggaaactatccgacttgcaccgtcgatctacgagcggaacctctcagctttccacagctagcagctcgagtatgggcaaaccaggctcgcagtatgtccatccgatgcgccgcgctccgcgcgcgtatactcctcctttattgacacagagccaaacttcctattttgagggtcaccctcatcaggaagattcggagtatgcaaatgattccgtgtcttcagggcccaagccacgcttgtcattgcatttcccggacacaacatttactccaggggcgtcacagaccaatgtaaccggccgcgcgtctttcggatattcacgagaaaacgccagcacgttagatacaacatcgcccacgtcccgttcgtctctagattttgtctttcgctccagaacaaggacgagcatggaccctgtgtctcgagcagccacaatccaagcagcacgccaggcgtttgaagaaaaggaagcggccaagaataggaaattcgaagaacagcgtatcaaagcagaagagaggcaaacaaaacggaaagagaggcaaagtcaccgaacgtcaatcaaggacgatatacgggagaagagttggggtcttgatcctgatgataaccatggcccgcgtcggaccacagaacaatctaccccggggagctggaaatcccagtcaaaaagcacttggatgcttttccttacttggctgcgaactaggatattcaagttcagaaggaaggtgcgcagcttgagctgactatatgagtggggtatctcgttctatcatgtacataaagcgtctttttataccaaccttgagagcaactataccagttcgtatttacactagctaacctcttcctgaatatgtgctattggatttcctagccgcaccggaaaatctagacctaggtagtctagatgcatcagccgtacagtctagtgaacaagatatgactgtagaaggaacgatgtctctactactcgctactaccgggtcaagctcattggtcgtataatcaaccaacaaaatttctctggaggtaaccctaagagagtatacaggaacttgtggaaagcatgcttccgttacttttagtttcggtcaaacggactctgattttataatagacttgaatattgatacgaaagaacacgatcaatgcaataatgggacaggtcctagtgctgtggctagaagggtaccttggacttaatcgagtttggaactctggctgatggtggtgattatttctcgccttcagcttttatgaaagcagcgatgcagtagtttatctctgaataaatgacttctcgagcttttcgtggcagcgaacaaaagattcgcattcaggaaaccaactgcgcagcctggatgttggatgtaagaggattttgtcagctagataaaagtagctgagaaatccatcaaactggttatcgcaatatgatcgtcttgacattttgccctcgatcgaacaggagctcatcagcccggttggaattgtttgcgtgcgttgcatttcggattcgcaatacccctccaccaggcacgatcttattgccgctttcttctcaggttgggtgccgtgcaatacattgagtgtctccctaattaggttttcatcaacgttaaaacttggctatgttgataagcgcagaatctgcccccttgcatatctcttgtatatacgcatcggacgtaactagggcaaagagctcttggttacataatgacagcgtgcgagtgcaaaactgatatttctcacgctaatcaccatgtgtggtttcttgggtatttatcttttgaaacgtgtttcatacagcgacgctagacctcgtagtaacgtactgagaatgttagccaagatcattcttccactgctcaagaccgtacttaccatgatgaaaagataaaatgagaaatttcccttatttcctgttagcatgatgtaatgacaaattggcaacaggatgcacaccgcacaacagacagtggacagtggaagagttatggatgacagttgtggagttggcgtggctatgtaaataagatgcaacatgtgctaggtatcaactgattgcctgactacttcatctcatattattcttgcttaatcaagactcttcacttgccttcaacccccttgtagaaatgcaagtatatgttgagcatggaaactctttattgaacctgagtttacggacatttgcttgtgcaggattaacgttagggacacacatatgttaaggcatttctataaagacgcatgattccagcaatgttataactcaaagaagctgattagatattaatatcgtggaattaacaagtaaaaaaaaaaaacgaactctcagaaagcctcccaatattgatctaacaaggaaaaacgataaaacagcagtttttaatcaaaaggtaggaaaatgaagcgacgagaacccgcccacgcttttgtaatttacacagaaaacatataaataaatttgcgcaacaaagaataggactgccatatgtgcaagtcaagccgagcgtggaaaagctgttctagcggttctcacgacagcaagcacgaatgatacatcggccggggcgatgttggctggagatgaggagtttgggggagttcctcgcattgctctcacaaggatcgagtcataaaccgtttcttcgtaaagtccaaacaatcagcacgccgacatggcaccctgtactgtgaatatagaaagtcaggagatatcggccgaggttacactaggcactagtcgatgatggaaatcattcgcattaagtctgaacttatgatagtagggttttttgagaggatcggcatcgggtcgcctcttcatgcgctcctcatcgaaatcatcggcaccttctcggctaccccaagttgtctgaaattagagagggcagttagcctagcacaggacgtattgcgaatgtgactttcattcacacagcaaaggtgaagtgaatcctatggataatttatgagaatgcagatgaatgcccgcatggaaagttgtagggaacccaaagcgtaactggaatacggtgcattgtagctgattgtcaaggggaaaagggaccgtactgctttaagtgtcatcacagcgtacatcttaatcgcaccgtggaaatagccgaaaagaatcgacacaggaagaaaaacccagtcaactggaaatcgtatgtaatggcctaggagtttgataaatttactgacaaacatccaggcggcaaggaacgacattgccagcatatgggcatgttcgtcccaggaggcagtagccttatgacagaggaaaataaggcctagatcgccgagaagagctgggggcgagagggtcgtcatatgaacggcatacgcgctccaaggctgacggctataagctgttagcgactgttcacttagatataatgaaaatgttacttactgccaaatatgcccctcatcgaacatgctagtgagattgctcctccaattactccgagaccatctggtgcattgcttcaagaaagtaggattatcttccaaagtggtttgaacctccgcttcaggatggtattgcatgaaagtttcccagccgtgtgagaccatccatcgagtgataaagttgtcatcgtcagcattcaattggtatttgccaaaccaccatccttcgttagtgaaggcgtacgtgaacgcatcatcctgcagaatactggttttgtacgcgacagtgcgtccggacatacaggggagtccgccgtcaatgtgggtagtcgcggcgcaatcaaagtttctccgttccaggtagagagctccaagaaatccccagactcgctgtgacagggtaggcgaagtagcgcgtttgagcctctggcatgtcaccacgcctccatatcggtcgtctttctcgaagggcgccagcatccaggtgaggacctttggtggccagattacatcgtcatccgcgaacactgtgatcgtcgttgtaacctctgggatagctctagtcatttgccggcgtttgttagggtgggtgacagtaaacaggcggattctcgatttggcggcgggcatgcggcttagcatttcttcagccttcttcttgtttgcttcaattgtaacaagaagcagctcatggggcttattcgtcaggatggtttcgatcgtcctctccaattcttcaccacagccatccagcgtagggattatgaccgtcacatcacttgacgtcaatcttgaatcctcggggggagggataggcttgaatgtatagaatgaaatgagattcacaacaagacgtaaataccggtagacactgaaaaaatgttagcaagagacctcataatggatccgaagcacttacaaaagagcgatgaacgctcgcatatacgttatgtgcattattcttgccaaactctagaacgatgccgtttatcgacttcactgcaaaccttgtcctcagctgtcaatcgcgtacattgaatgcggtgcccaatgtgccaaacgatccctgttcttccaaatttttgtcaaccaggcagacagctaccaaccaagttgagaaaaggaaggaaaggaaaagagaaaagagcgggatatgagtcgcgatgaaacgaatgtcttgaaggcttgaggaaattgcctcccaagtcacataagaaaaaatatttagcaagaggcaaagatcgagcctctctgacagcagcattggagacttttatttgccggcgaaagaggttgagggtagctagggctggcacgttcaaccggtatccagcgcgtccatgagccaatggtcggagcagaaataagggctccagttcacgattgtcgttttcagaaggctgcatgtgtaatatgcctcgtgcgtcagacgggaccctgatctagaatcctagatgagttgatggaggatgctttgcgggtggagaaaggattggcggcgcacgagcttcaactactgcagtagcgagtggggatggtggatgacgattgacccagcccgcgcctgccatgagtccctcgatgccataatgatagtaatatggccgggaagcctccac

SEQ ID NO: 5245 - DNA, 7852 bp, Emericella nidulans
ctacagtgtgctgtacctgactctaccggagatttgtatatcaagatatatatacccgtatatcgtggtttttaccgcgagataaaccgtccaagtaaatcttaatgcacgagagcattagttatcacagagtactaatcagtccatacgtactaacaccacttactctctgctattgctcaatatgtgacctcgggattgtacaacacctagccaggtaaaggtgcatagacaagaccagaccactgctgcctcgataggcaagggaccagaattcgacgttttcgatgtcttcgagctagagtcgggatttccgcctcggcttgggttctgtgtctgcatctgcatccgcgcctgtgttaggttcttggagctataagttcataggccgtacttccatactttgcattcgcctttgctctgggattcattcaatatggtctggataccccgaaaagtgaacaatactgtttgcccctcaccaagaacaggagacagtatcacttgcacagcacgtaaaattcgtagcgtctgttttctacaacgccaaagacactcaccattcgcctcctagcacagggcaagtggtgcatattgtcagttcgtttgcttcatagaatcagtaattcccgctctttccttgactagcagaagctacagggaaggcgaggctttagatagaaatagagcgcagcatttttcaagttagcaaactctgcagtgaactgggggttggagatttattgggtctctgttatcgcattgttgtattgctgtgtcctcacgctgcttcatgaggatgagagaagaagagtactgaaaccgccaactgaatccactacattcatcatcaatctcaggtcttccaacggctaacctaaccctagatgctgctatgctcagtctggcttgctcaatgctgatgccaatacaatgtcttcacgcagagcatattgcttcccttccgtccaggactgtccagaattaagtcatatcttctgtcccgcgctcagtcaagccatttgcttgcctcgctcgtgcccgtgcccgtgccctcgctattcctgaaaccatcacatagcctagcataataccacaccttagctcaaatagagttgtaccacctctatccgccaattgctcttatctccctcggggctctcggcctgtccccacgaaaacccagaaatggattgagtcctgtagggagaaccggggaggctggtagtgtgcatagcctcacctcatttgtacctggctcgtatggacgacaggcggaatcagaatctcccacggcgttcttttatcatatagagggactctgaccgaatgggtgtattattgagataatccagcttcaggctcagaccgtttgcgggttgggttgagggttctagggctgttgtcgccgctgactgttgcttctagaagtatgcctactctatttcaatcatgagcagtaatttaagagttaaaagagtatgttgcatgtgtcgtggatatggctatgaaaccatgtttcaagcctgagttgatatcggaacaaattcatctccctttgcttttagaagtgagaaagaaaagagaaaagaggaagaaatctacttgaagcgtggctgctaggctacatgactctcctactaacaactactacggtagtttgagttggccaaactgattagggtgacgatcgcttgcgaacttaagaacaacggggacagtgttggcttgattgtggacgcgccggtagtagattgctcggatatatacactctgaccagcagagatgataacccactatcctagatctaacggcttagagtcagtaccgcgggagcatactatactacgctataagaacgcggccaaggtcccagggcctagtcgtcctatgcgtccgattgccccaacgaacttccgagctctcttcccagagtatcgagcccattcaagcaaagctgctcatgaattctgcgtttctgacattgagactgctctgcaattgactttgtgctcgttcttggtcttgttcttgtgcgtggccattagttctaccaccatcgccatcgccgtcaccgtcaccaaccccatatccattcccatatctattcaactcatgcccgccagcgtaaaagagtccagccctacagcagccgtgatcatcatcgggtcgacgtcagcgcccagccgcaacgagcgcgatgacggtgacgacgacaatgccggccaggaagtcagcagctgcagagggccggttccttgtaccgaggcacttatattgacatcgccagcgaaaaagaaacgccggctcagtcccacaaactcctgcagtagactctgcattgctacaataggcggactcaggggtcccgcctgggctagacagtgcgagaccgttttgaggatggcacagtcaccactgtgtaaggtggcgattgtgttgcagaggagggctatgcaggctgtaattgggtagaagaggagggtcctgatatgatcaggttgttagtgggcgaaaagcattctgaagggagtaggtggtgagggaaaaaaagggaggtgtcataccaatgcagataagcgaatgtattttgttgatcgctagatgtgcataagctgacgagtgcttgcagactccggcgagcggaatcgaggtagccggacgtgtctggggattcggctgtaggtgtttggtgaacgctgacggcgatctgtcggaggtgcagaaggttggtgaggatgcagtggtaggcgaaattgagagttgcgatttcgctgacagggtcgaggcctctccaattttgagagggctccttaatctaggagcgcttcagtgatgtgagggggtaatgaatggaagggggagtacctggttgatcgcgcggcggataacttccatcttctgtaggaggagtgttccaacaccggcgggcggttgaaaggcattatccctcgctgcatttgaaggatcgttgaggaaggggatcattgcgtcttgagctttggcgaggtcgaggtagatgcggaacaggtgagagatgccacgggaatggatggtgccatgatagagctgatatcgaagtcttgtttgagggttaagaagcgaggcccgccaaacttccgcgggtagttccgatctagcatgtagcaccttatgaagcagtagtgctctgcctcggtgagagcgtgcaagttggctgccccggggtgcaggcctatgtccatgcagacgcgacaagccgtcttggccagctcccgacagacatcgtatcaccggacccttgtgcagaaagatcccgcagagcaaagcttgaagcaggcggaatgagggctttgctaatagcgggatcttctgtaagccggcctttgcggcctcgcggtagagcagggcgctgtgacggagtcgccgagccagttcgccgtcgtcgtcgcaattactgtctggtccatcgctgatggtagaattgaagaatttgaaagctatcgagttgacgcagacggtgaagagtgctgactcggtagacgaggcagtgttgtacaatagcgccagccgccgctcggggtctggctctggccctgacccggcgcaaatggatgaagggaaggcttaacatggtggcgagccctgcctaggatttgcgatagatttttttttgggagacgctgcatgcgccggctgcgagtgcactcagtgttctgatccagacagtctccacaaggatcgttcctgtcacatcggacctgggaatgcatttaaaaactgacaggagcatgcaatagaaatagaaattacctttcgagaatgacacgagtcgcactccatcaggtcagaagaccgttgggctggacgtagcttgtaggcaaggagcataccacgcggcgctctgccatggcggcaggataacacaggctagtcagccctacgagtctggtattgggcgacggcgaacaattctagctcgcccaccggtgactgtcctgtcgaatcagatatgacaagagagagagatttgaacaaaatgacagtaggcaagtgtttgataaaaaggatttggggacactcgattcaccgctaaagagcagaagatttatggaagagaaatagaagcaagagagagtgcgtgtggatgccaagcctttgactgagactgcgccatctcctaattctcctctggccaatcaaaagccgtgttttctctgtagcatttctccaacttccagcttcgatcttatgttctactatatttggctcgttcccgtcggattccgaggacccggtcttttgatcatcagttatatgtctggcgtaatctcagatgctgatttcttggcgaggacatcggcgtctccgaagcggctctagtaggtacatcgacggacagagaaccaggtagtagtggtgaaaagttctgtcctaatataggacaatgattctaagtactccaatgagtacggctactgtatctacaggtccaccatcgaatgataaggccgttcgtatagattgctaatctggtctcgatccgaggacatgcaagtaataaaaaaccacgagaagggaaaaataaagagaagaaaacggcatgctgagataactggggaggtatcattgcaatatgcagcattacaagcattataagcatcatcttctcacaaagcaacacagcacccccgtcttcgccaggaaatacagcgccccagcgaacctgaagatcgacagtcctgacgttgcccagagcagacacttaaagtaccacgccgtccggaccgttgatgtcgtctgcaagaaaaacacagtcagccagactccaccacataccaaaaccatgctcaaccgtaaaccgtagtgaaggagctaatcccggaaaggaccgggtgaggtttgaagaagggaggcgggactcaccgtcaaacacaacgtactaaccccggcgttattaatcaacagcgccagcaacgagttactcaacgcccaagtaagcaccaggttcgtgcggaacgtcttgtagctgtcgtccagggagaccgttttatcaggctcaggttccttgtactcggcaagcgcgcggcggaccgtgaattcgaactcggtatcgatgtcagcttgcggcttgtcgagctcttcgacgaaggtcccctttgcgtcaccatctccaccaccgggagctttctttgtttgcgcggatgggagcgatgcagctgcgttgtcggatcctttcgttccccaagaaacatcgtgccagttacagaacgcgtagacgttgaggatgttgattgtgctcggcatgccaatgaaatatgcccaggaagaggtgatcagatgccacggatcgcagtagaggatactgccgataaaataggtaccgtaggttgaggcaagggcgactaggaccaggccggtggtggaggtgaaaaatgaggcgaagaagccgccgacgccatggtcgaagtcgaggtcgatgttgccaccggaaaaggcttgggcgacaaggtagaaagagaggatgaggatatatatttgcacgagagagaagtataggaaggacaggatgtaggcgaattgcgagctatatttgttaacccaatcttacaggtaaacgatgttagaaaacatacccctttggacgattgcccaaggcaaggaagaactggtgcatgagaaagacgagatacaggactttgacaacattgttgaaaataggcgagacttcatttccaaacggccaacctttgtatttgttcgttgcgctgggtgtcccgacaatatccatgatgaccgaggtagtgagccagtacgacgctagcagttgtcaatatacagataccaacgaagagaggagcggcataccgagtgagaaccacgtcatgatgagctgacaaacattgtataacaattgaacgtgcaaaaagaagagtctgaccatgttatgcccgctcttgtagatacgtgcaaagtgcatcaccgagtacaagctcgctgcaaacgatccattgagccatctgcgtcgttgacttaggaactcgggtggtgctgtgcacaacataattagtattttattagctctgaaaggacggtacgtaccctctggaacatctgtctctcctttcgacgccttcacataactcaatgtccatttctgccctgcctcggcgacaagctcaaagcacaagatgcgatcctcggccagaaacatattcttcttaaaaatattcatcccttcaatggcggtctttcccaatctctttggtggcgtatggtctccatgaaagtactgttccagcggccttcccataatagccctgtaacgataggcggaaaacgcgccgggcaagacgctcacatacccaaacatactttcaagcggtttatcgaggatgtttgagattttatactcgaaattttgagctgcaaccagtggattcgcgagcttctcccagcgaggcccgagtagggcatggatttcgccgcaggcgccgccaaggttcttgttgttataaaaggcttcccagagagccaggagggatttatgacctggttttgtgccggcatcaataaggacacagacctccgggttcaggatacggccgaaagcgttgaagagccagcggtgagaattgatcttcttgctgttcttctgtttcagacaaaagatcatctgcactggaggcaggttcgttgggtcatcacgctgggggcgcacgagttggagtgaaggcgtgattgatagctgcgtggtgtattcgaactgggcaagttagctggaggcgcttcatcaagggtttcggtgccgtctcacaatatgcgccgttgtctctttcccatcgatatcatgtttcataattccgtcttggtagatccccaccgtcgccagcacgtccagggtctccttatcgcacggactgattccatcgaacaccaggcagaccacgatcttctgccatgccggccctcccttattccagaactgtgttttcttcaagttgacaatatcccggatattttgcatgactccgtgaagcgtccgtgccgtgaggaccttgtcttcattatagtatgtgatggcaataagcaactccgtataccgattgtacatggaggcgcggagattgtacccattgcggagcgtgaagtcgtccgggtcgcaggtagcagccgtatctaaacatttccatcatcagtcagaccctgtcaattccccatcttgttgatcaaagacatcacatacatcgcagatgggtaaattcctccgaactgctcgccgagtcacgatactgcggctcgactgagttcaagatcgcactcggaaccggatagtcgacgctcaagaccctccccttgatcaaatcaactctgcgagtgggccaccgacgcaatccccctgcctgacgtttctgccaggaagttatactgccgccgccactaccggcttccgagttggggttgggataggacattcctgggaaaagctgacgctgactctgagctctagagtgcgtgtgcgagtgcgagagcctgtggccgggcggggtgaaagaagtggccaggacgtcggagtcagggccaggagcagaagcagggagcggcgagagtggtcgtggagagtagcaaacaggttcatcgctgctgtggaacaacggctaaaaatacatcagtgaaatgctgcttctttcttcagctggcaagaaagaaggcgctcacgtctctctgactgggaactcgatcttcagtgtctagcggttcctcagagtgaagaggaaactcctcctcgtaccaggtgcgggatcggtccattgtggtggtgtggtgttatgggcggaagtagtgagtgatgtgaagatgggaatcatgggg

SEQ ID NO: 5246 - DNA, 1354 bp, Emericella nidulans
ctactcaggcggcggttagagttcgcgaggcgcgtgctgatgggcgagtgtgaatgatcgacggaactcccttatctataatgaatgggggtgatttatgtgatacccatatatatagtctatttatttgaggaagagagatatgagagtatttattaggttttttacagtatctgcaagagattagggattagcacagcacgtgttgccgcgtgggtggtacgcgatttgtcttttcgagtaaacccaatcatatcatcgcctcgatgtacagcgtcttatcactccacttagataactacctttattccaaaccccatttctccacggacagatttgtatctacccaaggaagagagcgaacacagaagcaggcagaataatgaccaaccgccgcctcctcatctttcaagaaacccccatccaacacccgcaatcccccaccaaccccctcactccgagcccacagggcctcccctaccaagtccaacaaagcgcacaacaatttcaatacatccccatcaataagctcggactgcctgttcaaggcccgggctcgttacctgagggtttgggggttgggtccttgctcaatttgccgcttagggtcatcagcgcttttacggagatattcaatgggcccaagtataaggggtggtatgcactcatatcctttttttttcttagttctttctggttattcgtttctgagctggtggctgatgccatatcatagggcgattgtagcggcaggaccgtataatgatccgacgctaggggtgacgggcaagttctatgctgttgtcttggagcagacttccccgcctgatggaggatccagttcaggtccgggaggtctctgactctgatcggggttctttttttttgcagtttttatcctcatttctcgagctcctatgaatgtggacgagtgtatgttatgatgcttacgtatagtatggcacggcatggcatggaacgactgtggtatgagaggaactggaaacttgactggatggctactgatgtttgtatagtttctttctgcgactggccggatttgaaatgggttggctgtggataggttcgttgactaatataccccgtttggtctgttgaatctctgatagacttcctaaatttttgtcacatatatatagtttcatgtctaaaaagggagaaaactgtcagcatgtatagctaggccgtaaaaacgacttggcgaaatgatggccctaatattcacataagatattccgtatctagacagtatggataaaaggtatgcttttctgtactacaataaggggaaataatagatgatcctaagcttgggtctccctatagtgagtgg

SEQ ID NO: 5247 - DNA, 2855 bp, Emericella nidulans
cgtaaatctgcccgtacacatcagtcacgtcgcaaaacatctgcaccttctccagcatcctcatcttggccctatcctgcgccgccatctctgtcaagacctccaagccccgcttcatgttggaccgctcaaactcagcgagagagaacagctgcttctgccgaaccgcatctgattttggcccggcctgggcaaactcgggaaagttgacgcagttgagattcttctcgtcgcggtcacgggcaagcgatccgtaatcgttgtacatgcggcacatcacggcgagatggcggcacattgcttcagccacatacttctcttcgcaggtctgaaagcacgcggcgttgtgggacgcctgctcgaaccccagcaggcactggtagaaggcaaacgagtaggggcaggaggtgtggtcggacgaggtggaagacacccagcggtagaagctggagcgggcggtctcgaagtcgtcgcgggtggactccagttgggcggcgaagcggccgttgtcgtcggcctgctctatgtgcgacagcaggaagacctgaagctcgttcttgacgcgctcgtactcgaggggcgcggcggccttcacgctgggatggtccatgacgtggtggacgaaggcgctaaggacgcggctcacgtcgcttgggagttgtgaccccatcttgatgcgtttggcttgcggtaggatcctgtgaccgtttgcgtctgcgtttcttggaccagactgggcctggattgcgtcattcagctccggtttgtccttgaggtcgcggaagatctcgtcgatgcaggaccgggtcatggatctctggctgctgttcagtctgccgactaccgcttccataaattcatcggcttggtagttgaggaacgaaatcaccatcatctcgacaagggttttcgtggagaggaaggtgttcctgcggttattgcacagggtccaggtgaacggaatgtactcaaaatacttgtcttcttccatgcccgtgcgagagaagacggcaagacgtcggtcgcgcagctgtggcaggagcaggtatccttcgacgatggcagcgcggaccttccagagttccatgctcgaaaacaggggaagcatggagtggaagcgtgagaactcgatgacacgcttcttgctgacgatgaacagattcgccagacaggctggataagaacgttcgaaggacaccttcagcgcggcgaggacatagctcttactgaggagaattgatctgtatgtcaccttctctacccacagatactccgctttgtcgcctgcgctgttttgcaggaacttgcggcctcgagacacagccagctgcacattcgtccacagctgattcaccacgggcaactggcatgcgtgagcgatggtcagaatagcatatgccgtctcttcgtgggagtgcgatccccaggatccgttctcgttctgagtctgtagagtgcgaaccaatgcctgattcaggcagaccgatacttgatctttgataaactgactggaaatcgactatggtctcgcatttgcccataccttgcagagcttcccaaacgcctcagccatgagcatggatggatagtacggggagaggttctgagagagtcagcgctctgctatttccatttctgttgcgaaaagaagtgatacccatttatccccaatctcactgtcggccgtccaccagacatcacacagaaaggccgctgctttttcgatctggggcgacacagtggccgcatcgggcgtattcaacagcgcaagcaatacattgctgtttgcagtgaagctgggatctctctcgccgtgataggtgcggaagtgcatcgggccctcgaatgcatctattagtccctgggccgagactggtttgtccaacaaggagaccgcaataagcgatttggcggtatcgtcggcgtctgcctggatcgacggagctatacaacagaatggttagctacgtgagggagagtgatagagccatgttgtgggatcgtaccaaatcctacaatacctcctcctttgaccaacgcatcgcgaagcatctcgccgaggctgtcggtgtcttcgataccgagatcgcctgtagaatatccattgtccaagagcgtggtaagggcctgaagttcagtcagctttgattctagtcgagcaagctgtccccttacccacgagacctcgaaatactttgaaggatacgcgctcggcattcctccagtgccccctccggcgccattctgtagcaccaaccgcaagtactgttcgcactcgtcgtcccaggaggaggaaaacatgagaaaggcggccgtggacgatggcgagaacatgaaagagccattgaccttctggtgcgccactttatcaaagtcgatcatgcccacaaacgcctcaagcgagtgcagcgcggtggttctggcggagtacaggtactccggcctgaacttggagagcttgatgcgattcagccggtcgagctcggcgcgcccgtcaaattcaaactcgtgccctttctcgcgcaggagccgcagaagcgcgggcaaaatgatttcaaagccaacgtgaacagtgtcttttacactccacgcttgcagttgtcgtgagagggccgcgcgtgcccgtccgattcgctccttcatttcttccacgggagggtcggtgctggcaatccggctttctgcatgggtctcgagggccagtaaggaggctgcggtgttgaggataccgtcgacgtcggaggcgtaggtctcccaactgccatcctctagctgggtccgcacgatgtattcgaagcattttggcaggagccgattgacgccttctggtgtcgcttctggacatggacaccagg

SEQ ID NO: 5248 - DNA, 5571 bp, Emericella nidulans
tttggtacgcaaggctcgtttcgatgttgactatggtctcacgggtgcgcgacaaagcggccctgaaactccgcattgattgccagccattgatgagtattctgcagacggaccaccgggacgcgaacatttcacaggcggattttggatttgcgcggccgatcacttataggcatttgctagactttgtaacccccgggttgattatcatctacccgccgagagtgggcagtggtccgcacggggacgatgaggggtgcgagttctcaattgtttatgaacaggaactcgcccaaactcttattgacgaccctgagtggaatgcatactttgagttccgcggtattgacgcggttgatatttcttcgacactggaggtgccggagtatagatacccgtcccagcatctctatgttgatgggagtgatggctatatgtagttaagctattgagtagaacattgacaaactccccttacaaagcgtgaaccctctaaattcctcagaaaccccaacatcaatcacagtctcccttcttcacccacttctcaccaaccccttagccagcaatataataccccaccaatcaaacagcaccaacttcttcccccctcatagctttcttaaacagcatcttaagcaccagttcgccaaccccaacggtagagttcgtctggtgtgcctcacgcgctctgctgcagaacatgatcagctcgtcgcggttgcacttcgtggatcaaggcttcgatctgtccaaaggcgggcacttcacgcatattcaagtctaagggcattgcaaagtgaccaggttgtccttctgcaaataaggggctttggcaagcagggcatacagcgagcgggcgccgtactcgatttgggccgtgccttgggtcgcatgacgaagggatggcttcgttcctcgcagcagtgaccatggcgcggtaaatgccgagtgagctactgatgatggaaattaacatctttggtaatagatttcgcaatgttgtgtcggtggagcatgtcgcttacccggaggccatgaaagacattgcaagatagttggttgtaagtacaattaaagctagagctacccccaaaggttacatgcccagctacatgggccaacaatccacaaggaggacgccccgttcccccgcccctggatatcgctacggggcgcctgttcactggggtcggtttgaacaatacgctaactcaggctactcagttcttagtacgcaatagctaccagtacgttccaaagtcagtatttgaagcacctggagaatgtaattgggggctctgggagcaggaggatcaagggccaaggacagcatgcaaatactccgtctatgaactgattggggtcaagggcgtggataatatttgtgtccattggaggcctccccaagatataaaatcaattgggtatattgcgcagggtggaatatatgaaggcaataccttaaaccgtcgatagtcagtagaatgatatgcataattagactctgaaaaagccctcgggttacccgtaacgggtccacccaaagcgacgggttgggtatggatacactctgaacccgtgcgggttttgggtagccctttgtcaaacagaacaaactattgcataacgataggaattcgacaagtaagcaatcttatgcagtgaatatagtctagcataggagtttatggaaattgcgctcggcgggcgacctgcgggttggcgggttctggatacgggtcctgactgtcgacccaacgcatgggttcgggttctgaccttggacccgtcacaggatttgttatggtctatacttatgttgctcttttcgtcttcgtaccttccgctattgctgcctgctggcttgcatgacgcctactgcactataccagctatagcgtagtccggggttcagttagggttcttttgcagtacccgccgctatttactgcatccaatcatacgaggtaggctgccaggaagggggcgttggtcggctataccggggtagacctctcacccatacttgcgacatttctggaacgccatatggatatagactgcaacgaacatagaagctgtattcaagtccaaagggaggttaggaagtaattcagttgtgtcatagctagaatccagtcgtgcttgagtggcgcagatcaccagaccggatggcgcgaggctgaatctgaacacgtatttttattgcaacagatttggaattgcttgtggctgggaggccggggtcggttcgcccatgcactttttgcaagtatgcccagtgatgcaacgtcacagtggtcacggacgcgtcgcgcgagcagcggctatcgttgatttccacccagggattgcacccaaagtgcctactatctgctttcccctctcaagtctccgaatctgaattggaatgacgcacactcgacatctccatcctttttctctatctgcaacaagccatgccataatgtttgatagagatcgaggagacgatatttcccatacatccagcacagataccataaacacagaatatagcaccgagccagccggacgcacggaatgttggcgcgccagagatctagaccgtgtgattgacctcgtgagcagcgcgccaacagctcgttcagccccagcccccacatactaccatagtagatgacttcatcgaggtcctagtactgtttgcgacaggggttatggtcctccaataaatgcagctccgagttgccggtaatgcaagcggctcacggggaagcactatccacttcgtcttcaggcgggttttccaatggaggcaggtcgatgagaaacgcggggtgcttaaagcatttagcacaaagctctcgttagttcatcgccttattacttttcttcgtagagcttaagcactatggcgtggtaatttataactaagagtcttcaagtttttcacggaggcactcttatcaatcttgcataaccatccagagtcagcttaggagccctttctggcaagcacctgtaggtggctccggaaatcaagagcgagtacgaaaacattgtatttgaagctggcaacagccctgtataggagcgcgaaaaaaagaaaaagacagcaggaatcccgaacaagcatgccttccgaaaggcccttgtcaattcagtgtatcagtttgacagtcgaaaaaagcaatataaggaattcgtaaaaccaagtacccatttcagtgccagtgcatgcaatggttggtctacaccgccagacgttgcaggggttctgatcctctgagcggcgcagcttcaggggggtgccaatgagcggtttctctgactgcggcgcagaagcattatctgtgcgcccgggaataccgctctggcaggactagcgaggttcctggattagatacataactgtggtcgtgtccgttttgtttgtccagtagttgcgcatccccgtcccaggtaagtaagcttttagcactggccatcactcagcttcagccattgaaatcaagggtccgccaaaggcagaaggtaaattgccggctttcttctgcttagaccagggtgcggtcactaggatatccgctagagtatgtggtgagaactcgatcaagaactgcacaagagcgctaataatcaatctgcgaaattctgtgaagaccagcacagtcaacacaagaaacctacttacgagctctattttccgggacctatcgcgagaacaacactatggctggtctggaccagcagccggaggacaggattcagtctcgagtccactccactggaccccgagcccagcggtcgaagcatcttgagcattcccagttgatattctctgaatacataaaccccgggatcatgagcaccgacgaaaagttaaagatggtcgacgatgaagtaaggacaaaacttactgccaaagggagcatggactggaacaatgaaaagagctatctgtatgtcttcacctcccccgagacagaaggctattacaaagttggatgcacgaagtcgatcgaggagcgaatgagggtccacaagaaatgctactcggaaattcgccattttaagcattttgagtgccgtaatgccaaacattttgagaaggttgtgcttgcggaatttctcttctctcgtcgcaagcattggtgcagcaggtgcaaaaggcgggtgacggaacaccaagaatggatagaagctccgctgcaggatatcatcgacagtcttaatgcttggtgtgagtacgctaagttcttatatgattgtggcaaggatatcgataaagggcagctcatccagttgcccctcttctcgaaggatgcggacagatggagaaagtgggctgtggacgaaaccaagagatggaaggagatccatcaaagtcgtatggctcccacttctgggcaatacgtgcaggaacgaacttctgagaccaaacccgattctcaatacggctgcaagttgagagtcgaagacgaatacttcttagactcggttccagacctctccgattctccagggtcaactcctggatcaggaggaattcaggatccgcctgcgccgcctacgccaggcaccccaacaccaactggccgtggactaggaatggatgagtatatgcggaagcaaagagatgcattagggatttctgaggaggaggaggaggaggaggaggaggattacgccactgcaaagcctattgcccggcctgtgttcactgatcgcccgcaacgccagtctgacaaaggacaacgatcagattgcgccgaagatccagctttccatgcccccttgactgaagcgtgcagcaagaatgacgcagaccgaagtacccagtccagtctcgggagaaagggttatatgcatggcatttccgatgctgacatcaatgaagagaggtggtcattcgtggagacagtggtggctggagtccaagatagcaaagctcctcagccacacgttttcggcactttatacctcctgagtctggaatccgcagagggtctctacagagtatgctacaggacgggtaacagaaaattctcgccagggaaagaatgctgtgacagagctacgcgattttacaacattcccaattgtgttagcgttaaacaagagcttcttgcgaagtttaaagtgctgcctcccgatctagaatgccgatggtgcggcggacaacataaagattggattaaaatccccgagagggaagttacgaccagtactgaggcccccaaagaccctgtggacagaggacgcctgaatgtgcccggtcatgcctgcgagctttcgaacagggttgacgagaagagtggaataaatgatgtggcagagacgcagaagatcaaggcagctgtcgatgatctgcctatcaagatcccaccggcacaggagccagttgttgattatcaatcgcatagtatccccggcgccaaggctaacaacattatcgggagattggctgaaatgataggaaaacctacagtctcgacagagctgcaagcgcccccattgctggattgggccattgccgtgcgcgcattttgagtatacccttatagtattcccgttcagcccggt

SEQ ID NO: 5249 - DNA, 7962 bp, Emericella nidulans
gacgcgactattttcgactggctcaccactcttgtcgatcggcagtttctgcgagccttgcctcatattatcgactcaccgtatgcgcaaatctctccagtaatgcgggtggtttactactgcgccatttatcttggtcaaagcattggaagcgacgagcagcaaaggttggcgacaaagacgtactatgcttgtcttcagtcagttccgaaatggcttgaatcagcggaagggacacttctggatatacttgccggcgcatttactgtaagattgctccatgtaaatatgcagaggtaagcactaatcttggtcaagacgtggctcgcaatcaacaattttgactatcacctggcatggcaattccaccgcgaggcatgtcggcgtgcaagtcttctgggcattcatgacgtggaatccactccgcctggtacagcgcaggaggaagccgaaagggatgtgaagcgccggttgcattggtatctggtcgaaatggacttcttattccggctctggtacgacaaaccgaaggctctccaatgctccccaactcaggtcggacttccagctgtcatctcgccggccaccaaacagcctaagcctcaagaatgcattctcttcatcgtctggtcacgggcgatgcatattctcatggatttcttcaatgaccaagagaacttgcctgaagcggcgcttggtagcaaggtagacgtttattgcaaccagttaactgaactgcttgacgactgggacctgcttcccaaagcaagagtgccgaagactggtgccgtccaatcctggctattcgcagagtctgccattgcattccatagcttcatcgtatacatgcggcgaaggacatctgctactttcatgggcacgcacccacaggccgtccgtgctgcgagagccattatcagcattatccacgagtggtcagagagaaacatggggccagtcactggtcatcagtgctcgtatatacagtaagtcgtcttcctactgcgaggccgctcgtctgttatctccaaactaatccgttttgggtgaagtctcatcaccttctacccgttctgcgccttctttacactctactatcatatcctctcatcaaccgatcctagcgagcgcgaagaggacatctgcagtttggaaaaggtcgttgcgcttatgacccaagccgcgactgtgcggccagactttgttcccatcgcaagtgccatgagcgcactgaacgacgtctcaagagctgtacactcaggtcgggaccatctcggcgctttggcttttgttggctacgcggtgcctccccgacctctcatgggatcgaaggcgtctccaagccaaactgcaacacagctgcccggtagtagtaccatcgccgctgctccattcgactcacttcagaacctctcggtggagctgcctcttcagacagcagacgagctcaacaacaccttcggtgtcccgtttcagctcgaaagtcagatttcgttcgactgggtccccgcttcgagtgaccgaccaagtacggctcggacggtgtcgcaaccggtagatatagtgcgcgcgatcgagggcgagctcacttggcgagactggcacgaaagttggtggaatataccagatacctcgcaggctaatcaagcaggtaaacagcttggatgatcttcttacttttcgtcatgctgaggatgcacgatcaatcgtggacatactgtaacaggagcttcagatctcggccaaagcgaaacaatctaagcctgaagtggtaatgaatgtatattatgtaataatgcacactggatccggtaactatccaaaagtagcctggcgacgaatggaatctccaatttttgttctcagcgccgataccaacgtctagactacgcgcaccatggatacaggcttgactccgtttgcttctcttctcgtatcccccgcagagcttcagtctgctctcgcggggcctccatatccacgacgcatcatccctttggcagttggccaaccgtcgcatcttgcctcgtttgaaatacagcacattccgggttcggtgtaaatatatatttccaaccgttaaccacgacaagacgttaaccatggaaacagattcttcaacatggacgagatcagggaccggtcatccccctatcctcagatgctgccttctgcgacacaatttgccgaaagtatgaccaagatgggtcttcatccggacgatattctggtagtctacgatgcgctggaggtcggactctattcgtcacctcgtgtggcctgggcatgtcgccactttggccaacgagacgtccatgttttgaataacttccctcgttatgttgcagaagggttacctctttccactggacccttatcgaccctgcctcctgccgccctggagtatccaataaaaaacccagattccaaggaagtgatatcatacgacgagctacgcggtcttctcctatctgataagaaatcagatattcagatcatcgacgccagaatccccggtcgattctcaggcgccgaaccagagatgaacccggccctgcggtctggacatatgccgtcggcactgaatgtgccgcttgcatctatcatggacaaggacaaggtcatattgccggctgaagagctcaaggcacgtttccaggcggccggggtagatgggcaattgcctgtggtgttgacgtgcaactctggagtaactgcggctgcgctcgacctcgctttgcagctaagtggatacaggatggagcgacgactgtacgatggcagctggatggagtggacgagaagaacgcaggatgagggtctggtagtgtctaccagtagcagctgaagagtggcctgttttatgctggaaccggcggacgaagggtgtttcctgattttggaaggcgcggccgccgagatcggagcctggttaagcatcatacgagcggaaaccgatgactaatcagtatgttccctccgccaccgcaagcaactatttttcccagaccccgcaagaccctggtgattctagactgtagactcgattaaaggaattatacaaaatgttccgcagtcaagtagcgtctgcagcccgagctgttgcgacacaccgtggctttgcgacggcctgcccggtcgctgccactgcgcgcaaccacaaagtcgtcgttatcggtggaggcactgccgggttggccatcagccaccagctgttgcgctcagggcgctttgtgaaagatgacattgccattgtcgaccctgctatctggcacaactaccagccgggctggacgctggtcggtggcggtctgaagacgcgcgagcagttgcgccagccgctcgctgggctgatggaccccaagctgaagttctacaacgagagcgttggcagcttcgccccagaggaaaactacatcacccttggcaacagcgacaagcttaactacgatcatcttgttgttgcccccggtattgcgctcaactttggcagcgtccagggcttgtctgaggcgctggccgccccggactcgaaagtctccaccatctactcttacgacacctgctccaaggtcttccccacgatcgagaagctcaagaagggtcaggccatcttcacccagcctgccggcgtgatcaagtgcgctggtgcgccgcagaagatcatgtggctcgctctcgactactggaagaaagctggcctctacgaccccagcaaccctgccggttcggccatcaagatcgccttcgccactggaacgccctccatgtttggtgttcccaagtataacgcgaagctcgaagagctgcgcaaggagcgcggcgttgaggggctcttccagcacgatctggtcgccatcgacggcaagaaggccactttcgcccgtcccaacggggaatcaagcgtcacccgggagtttgatctgctgcacgtcgtcccaaagatgggtccccacgcgttcgtcaagaacagcgctctcgccaacgaagccggctacgtggatgtcgacgacggcaccacccgccacaagaagttcgccaatgtctggtctgccggtgacgcgtccagtctgccgacgtccaagaccgccgcggcaatcaccgccgaggcgcccgtccttgtccagaacctgctccgttcaatggacggcaaagaaatcgacgccacgtacgacggctacacttcttgcccgctaacgaccgaatacggcaaagttcttcttgccgagttcaagtacggcggggtcccgaagagaccttcggcaagtggttcggtatcgaccagggaactcccaggaaggagttctacttcctcaagaagcacttcttcccatgggtctactacgaatctatggtcagtgggaagtggggtggacccaagggatggttgtaatgatagacgagagcatgtatattattgaatagtatagtaaaatagagcagcaatgatctattaccgcttggagtaggtgggcatcgtccttgataatcgctatggggctcgggccgcgctgcccaggtggaccaacaacccaggcgacaacgctgatcgtcaggagtacgggcattggtaaggacccttgttgccggtagtagatgcatacgtgcccagccaatcattgctatgtgtctttttcgcaccaaattattcagagtcgtacgtggccttcgatcctccaattcactctccgacagtccaaatgggaacgggccgccaagggcacctaagaaacatctttagccggattgtttctaggcaagccttagtctagcccccaatgctcgattatgggggctcaacctatgtctactgtcatcccagcagatatcagcctgttcggctcgatcccagagcgctggctgaccactccggcgtgggacatggctggcctcttctgccgcgggctgaacaccctccattctgttccattccgaaatagtgtccaagccataccacgatgcttaatgcgatgcttaaggttgcagatgatccttgccgctttgtgctagggcgcctggttgggcttttagaccgcgtctggcttggtcttgctcgtggcgtctcgtttccaccaatagcccccgatcgcgatattaaatgaccaccccatgggcccgtctaggcacgggcaaggtttgggatatgaggagtcgtctcaaaacatcacggactctggggtaacatcccgctctccggataaatggatgaatgaacggcatagcagcgagaccttccccagaatcgagaggatccgggacttgtggcctacccccctgtgaccaatattaggcctccctccaatcaatcccaacaacacccaacctaatgctcggctagagtagctgaggacgtcgcgagcatggaagtgaagcttagaccctgcaccgtcaaagtcttggtcttggatttagccggcttgtcatgatcgtgtgagggcaggtctggctttaaatcttcgtctctgcacctcgcgaagccaagctcgagcaaacccaccgcaaccatcccccgtgaggcttctggacctgtcttgttgaaccaaggcaagcgtatccgtctatagcgccatgggcaaagatacattcacactcgccggccgcgagtggcccaaagtgaactggtggaagatgaagggcatgcgttccgtctatctcaccttgggagccgcgatggtcacctctgcaacgaatggtttgtacctgcggacgttttgggcaaaaatttggcgttgaccgctgctgcaggttatgacggttctctgatgaacggcctcgaggccctggacgactggaaaaggtgtaagtgaaccacgcgtaattgttcagctacgctttaaagcttacggaccgttaacagcatataatcatcccgagggagcgacgcttggtttactggcagcgtccatgtccattggctcgatacttgccatccctgtggttccctacgtcgctgacctgttcggccgtcggtttggagtcgtgcttggctgtatgattatgatcggtggcgtggctatggtttcgattggatacaagatcgcgctatttgtcgttgggcgcatcatcctgggatttgggctgggaattgcccaggtcagtgcactggagattgatggcgagcgcggtgactgactgggatttaggaatgctcgcctctacttgtcactgaacttgtccacccgcagcatcgagccatctacagtaccatctacaactcgctgtggtacgtgggtagcttgattggtgcctgcgttgcccttggtatgttgccgcgttgtctgtagcccggatgcctattaacagtgctaggaacgaacaacatcaaaggaaacgactggtcgtggcgtgtgccctgtcttcttcagggtgtgccctcagtatgccaactgattttcatctggtatgtggcttcactcgttgcttggagatcaaactgacctggcccaggtttgtgccagaatcacctcgctggcttatctccaaaggcaaatcagagaaggcaaagaagatattggcctacgtccatgcacaaggcgacgaggacgacgaactggtcaacgtggaattcgacgagatccagcaaaccatcgcgctcgagaagcaactcgaaggcagcggctggtctgagctgtggtcgactcctggcaacagacaccgatctatcattcttatctccatcggcttcttttcccagtggtccggaaacggcatcgtatcctacttcttgccaaaggtctgtcatcgtatctcagccagaacccaagaccagcagagaactaacgccaacaggtcctcgagcttatcggcatcaccgacagtcacaaggtcctcacgatcaacagcgtcctcaacgccgtgaacgtcgtctccgcaacgggtatctgtttcttcgttgacaagctaggacgccgcaagctcttcctcacatctgtcacttgcatgctcctctgcttcatctcaaccaccatcgcccttgcccgcttcccccatggtcccggcggcgcagatgaccacgccggcaacgcggtgattgtattcatcttcctgtattacatctcatacaacatcggtttcagcggtcttctggtctcatactcgtccgagatcctgccgtaccgtctccgcgcaaagggtctgacactgatgttcttctgtgtggctctcagtcttctgttcaaccagtacgtcaacccgattgcgctgctggatatcggctggaagtactacattgtatactgtgtctggctgctctttgagctgtttgttgtgtggaagtactatgttgagacgaagaacaccccgctcgaggagattgtcaagttcttcgacggtgaccaggcggtccttggtggcgcagcggccaccgagaaaattcatgagttggtcaccgtgcaggcgagaagtgctgaggagactctaggtgagaagggaccggctgtgagtgcggaagctcgttagggcccaccctcaacaggtgttggcggccatcttcatcattaagagtgttatgcctagcattggaggaaggactttgaattccgagtaatagcgtaggacccatgcaagaaacggtctactgatcatctatctattgaattgacatgtaatggcacaatttcaggcagaagcccaccaacgccaggccgaatatatcccaaaccacagataatctattcataaaatatctgcacactgccaatatcaactcctacccttggagcgcatcgtaacaaagataattccattccagaatcctctcaatgatcccagcgccgcaacacccaccataagcccgtacggttcctgcccgggatgccgaaatgcatagatacggttgattgttggcgtgacccacgtcgttagaagggcgaggaagaacagaatcggcatgaggaggaactttcgcagagagacggcggaatgttggcggacaacggggactggttctggcaatgttagtgg

SEQ ID NO: 5250 - DNA, 5390 bp, Emericella nidulans
cgccgaagaatacaagagtcggttcagagaagctatggctcgttatgtgctgcaagcaccaaggtcagtaactctataaatacagtctttggaccctagctgactttgcccagttgctggcatcagttccaatcctcacgatatgccgtcatggatacccatgtgcatatgaaccagcaccattccctgaccgacggagacgccgaaggagctgccggacagagcttctaaaattatcgtacttttatcagatcaccaaattaacgagaatacgagtatgagttatgatgagatgcatagagggacaggattacgatcaacgatcatcaacgacagcggacagacgggaatctcactttcgtttttcccgcagttatgtacaaccaacattccttatgttcatagtcttcggaaactgtctatacctacaagcatacatacgaacatattagacagcatcatctctctctacatctccacagacatactctttgcataataactgtacctttgttataagcacatggtgccccattctccgctacgccgagtggatgccgaaccatcggcggaagtcgggacgcagcgcagcccggtctgatgatttgccgaaatcacttcaagacctaccgcgcggggtttataattttcgtagtctgtttcattattattttttttttctgttgtctgttcttcggttctcgtgagacgcgccttcgtgcaagaatgcagctgaagggatggaaggggatcaagccttccggaatgaactcgcgggagctgcttctcgatttgacgtcgagctgccgcggctcggccgttttcgattaaatgctgcagcatttccccgcaatgtgcgcctcttcaattttcgttcgttctcttctctttgaccttccaagagaatcgctctcacgttggcgacggccccggctagccctcgcaagtaacgaacttgggacctcttattgtgcgttctatgttctgtgcaagctgtttcttcgcctactaaggtagcggtgggagatcagctctatcttggactcagctgctgctgttataaggaaactgtgtgatgaatattattctagcttttataccatgcatcatgagaaccactaacaatggtttgctaactaacgccaagtcaggaattcgaaattacaggctatgttcgtccgccctctctaatcagggggtgttatacccaacgagaatgaaaaagcccctttcggctcgccgccgacatactgccagacgcagggatacgggccaacacggatcatgacgttgtggcagttgcagagcagacctcaggttgctcaaatctaagcggaccggaccgggcccctacagcgacgcctactgtttgatcgccgtcggtaccgctgtgccttccgtcgaggaaggccattcttttgaatggatttactcagaaagtccgaggttctcctcagcagggaccacacggacagtgttagtgtggcccataccgccgcgccaccctgaacacagacgatgttgtcgcccttgttgatgataccgagcttgagaccgtggttgataccccacttgaggcgacggtcgacatcctcctgccagatcttgacgttgaagtcgggcttcttctcggggaagtagaagggccagacaccacggtacaggtgggagtactatgaaagtcagccaacgcgtccgaatattcagcagcacaggacttacccttgtagcagcagggttgcgagaaaccatgatgatggggcaaacggggcggtacttggagatcatacgggcagtgtttccactatggcgttgtcagcgatgttggatcaaaagtcccggaagagaacgtacctagtggtgaggaccacaatggcgccggcgttcagttcaagactggcactcacagcagccatggcgatggattcaacagtgtcggtgggacgaggggccaggtttcgcagctcgtcgaagacgttgaagtgaggaatggcaacctcggcgaggaggcaggtctcagacatcatcgtgacagcctcgcaagggtagttacccttggcagtctctccagaaagcatgacacagtcggcaccgtcgagaacagcgttggccacatcggacacctcagcacgagtgggacgagggttatatgtcatggactcaagcatctgagtggcacaaatgacgggcttgcccttgatgttacacttggcgatcatcatcttctgggcgatgaacaccttgggagcggggatctcgataccaaggtcaccacgggcgaccatgacaccgtcggtctcttccagaatctcgtcgaaattgttgacaccttgttggttctcaatcttggcgatgatctgaatctctcggccctcttcacccaacacctcacggatgtggcggatgtcgctgccacgacggatgaaggaagcgaaaaccatgtcgaccttgttcttgacaccaaacttcagatcgctgatgtccttctctgaaagagcgggcaagtctacgtcggtaccgggaaggttgacacccttgcgggaagagatgttgccgttgttaaggcatcggacgcgcagggtcttgtcatctacaacttcaagaacctcaaatgaaaggataccgtcatcgacatagatgagcttgccggcagaaatcaccttggtgatgttcttgtaatcgacatacctacagacgccaagttagtcgccttgacacatactcaaaagatcacgaaacctacatgttctggtcgtcggatgcggtggcatattgctcatcggtgctgatgttcatctcatggccagccttgattgggatgtccttgtcacctacggtgtttccggtacggatctcgggtcctttctaaacttgagtcagatctgcaacgcgacggttccaaacgggccgaactcacggtgtccagagcaatggcaacggggcggccagctgctgcttttcggcttcccgagcgtggtcgataactgattggtggtactaatatgtgtcagactgcatcagacgaagtccaagtgcaaatgcgagaaagaattacctcgtatgaaccgtgagaaaagttcatgcgaacgacattgagaccggctaccgatggtgtcagcttcaagcacgattgtgatcattaagtcgccgtacctctgcggagggcattgattttctcaacggagtttgtcttgggacctagtgagcgcgacgtcagtcagaaccgcaatattcaaaattggcgattcgcagatcaggcgctgaacataccgatggtacagatgatggatgtacggcgcaagttcttcgccggcaccatctcagtattcagcttggagtgccactccagcttcatacggttggacaagtggtcgagggaagagcttgcggccattttgaaaacttcccttgtgcgaatttgcgacggtgagtgtagagatgagttgtggaaaggtgagtgagaggagaacgtttggtggagagaagaaggagataagggaaaaaaagcgttgacttcccggtgagagcgagcgcgggagagaggggctcggtcggggtgtgtggccgggagggaaaatactgttggccgcccaccttgttgcggctttccctgtctcgtcgctatcggccggttccccgtggccagtctattccattattcactcctcgctaacagactacgtagtggatatcaaccaaagcctattcatgtagtcactctatttgcaaatccattattaactgcccgctgtctttgcggtctcggttgttgcttatctgttgttgctttttcctgatgtcagagacagcatcagaagaccatcccaagcattggcacaagtattggcatgaatttatatggacgatctgtactagttctttggtctcctgataaatcgtccagcaatgcgctactagcattgcacccaaggggcagatcacaccacaacataaatggcaagacccctggcttgatcagaccgttaccctgccgatatctgccgaagtcttgtaaaatctggattgctggagcctgttgcgaccctggtgactgacactgccaccgtccctgtcgttaaattgacttgcagacaatgtcgttcattcactgttaactttttcccatgtcggagtaactgttttaccggatccgcgctaggacaactgtttccgggtctagcttctataggcttaacgtgtagtgtcagcctcacttggtggctggcgagccactagcacctgccgcagtcatgtgaaacggtcaccgcatctgccgcggagcaggtacatacaagctacactaaacagtcgatagagtagagctcccgcactccatattcggctcacggaacagagcaaactcttcctctatactattgaatagtctatattgcttcttcccgcgtgaatatctttttgtcctaaccccgcaagcttgtcaagatggtggtgcgtattgggttctccgactgactccgatagcccagcccaacgactgattgactgatcgatttaaccattccaggtcggccgccttactcattatgcctttgtcgccgtgctttgtaagtctatcctcctgaccctatcaagttcagaacgtttggaaatgtcaggcaacggctaaccgtcaccgtcggcagtctccgctttcctagcaggcgtcaaacgctcaacaggcctcacgtaaatcccccctccttcccttctcatccgcgcaaaaaagcaccaaaaccgtcccctctcgctttccgatgtttgttctatacaatttatagaagaaagaaaagctaacacctgcaccccgcgcgcaccccggccttctggcagggagcaatgcgtggggagtccaatcagccccagtctggactccgacaagatcaccgataacaaggacttcaagaagtggattgacaactacctgggtgtcggcgaatgggtgatggaccagtcaatcgcggtttttgggagcacgagctattttgagaggaagcggtgatacaacttccaactgttttcttggtcatctttgtggatgggaggatcatgtgtactgaagagacggcatgtcggtgaccacttgttggacccaggacggttccatccccgctacgctgatcatgttgatgttcctgtgctgcgacatgcaaattggcgttagggaatgctgttattcttatctttaccttataccatacattgagtgaacttggtgagatgaaacattcaaggatatagcttgcatatgagtcaccgtcacgggctgttagacgtatacagtgggagtgtttccagattagcttgagaagacaaggtcaaaagatgctttgtaccgaaagacagggtggataccaaggactctatagatcagactatatctgcagtcctta

SEQ ID NO: 5251 - DNA, 4502 bp, Emericella nidulans
ctgaggattatctatttgttgagcagtcaggcctcagaacctgtgtgtttttgccccgcgcatatagtgctcggcatcttggtgccactgaacttactgctgtggtttgacgcaacatgagcattgttctcgccgatcggcctccataatcgtttctcctcaagattctgctgccgtttgccttccgggtaatacggcccaccgggatgtaaagactgcgcagtctgaatgctgattagcagagacaaaggccagcttgaaagtttcaattataccagcgcgcgggtcacgccagccgaaatctacgacaatcacggaccactgacttcgcgaaattcatcaccctcgagttggacctcatggtctcgaatgcgccgcattaatgccaggaaattgctttctcggaacttttgattcgtctcatggctgacgctgttcaacaaatggcccgcggtgcgagcaagttcgtctgcatcgttcgccgccgcttgaggatcgtccttgtcaacttgtgagatggtgtccgacccaattcttatcgtttcatggccaatttgttgagcaggggcctcttctttctgatcttcattattggcgttcgattcagtaacgtttgtctcaacgagtgactcctcgaactgagatgccatgtccgccttggcctgttcaaacgcagcgtcaaaggcagattcatcaaattcttcggtcctcgagacatgcactgtttctggtccaggtgcataaacagccattgagttattcatggtgtagttcggggtaaatgattgttgaaacctttgaccgagtgcctgattctcctgtaatgcaggcctgtgctgttgttgttggttgccttaagaattcaccgtgccaaccttgctgtgacgcattcgacatcggagctgctgatggccctggttggtaattaatggctcgcgacggccccgagatatgaaggttttggaaatcggctgcccagttcggcgcctccgcggcatggggcataggcatgtggggggccggagccacgaagtgaccttcgtgttgaaggttgggtagaggcgctcccacaggactgtttgattcgaaggcagcaaattcggaatccagtataccttcattcgaattctttgagcgaaagccctgagacggaatatgtcagcgattcatagagaccggctgcattgaccaagttctcacctgtgaaggagactgccgtgaaatcagcctatcttgctgcagtgtccggtcaacagaggcatgcttctggaagttttgcagtgcgttcgacggtccacacagggcgtcactcatgatggccgattactgggggggtgatgccgtagtactttgtgtgctatacaatgtatcctgcaaaatcgaaaatcttgaagagtatcgaataatcaaataggagtaacgtatgtacgtaagctttaatatgcacaaggggcaagaaaacgggaaatgaagcagaatatgacaaaggccatgtctgaaatcccgaggcgaggagtacaagccgtggggcaagtgagtaagggaaaggagccgaggcctgactctcacgtgctgatatcgctgagtcagcgctcgataagataagatcccacacgaattggacccgaaacggaccagctggtgttttgctgctgtttgggctattatactgccttttaactgcctttgactgcttcactgtcgcaaccacattccaccactttcgtaatatacgtcacatcggcctagagctgcaaatagctcaaaatggtacgtcttcgccgtcaattccactcgttatttcgagcagctgtagcgggagttggactgacttccctccttgtccgggggtctaggcggctgctcaagttatttcgaattctggtcatgatgacatgatcgtaagttgaccatctacgttgtataaccgatgctgtctctggtctgactcagcttgcggtagcacgatgcgggcctcgattactacggacgccgattggcgacatgctcatccgacaagacgataaagatattcgagattgagggtgacacgcacaaacttgtcgagactttgaaagggtgagcgtacccaacccatatagtcgaaaccagtcaattgctgatgctattccagccacgaaggtcctgtatggtgtgtcgaatgggtacgtacaacggggcaaccgtcgcaatggagcatcaaacatacctacaaacaatggtggactaactcgtgcctttcgacatgacaggcacatcccaaatttggtacaattctcgcgtcctcatcatatgacggcaaagtgctcatctggcgcgaacaacatcaaagctccactgcccctattggcagcggtgcctggacgaaagtctttgatttctcccttcacaccgcctctgtgaacatgatttcctgggcccctcatgaaactggatgtcttctcgcctgtgcttcatctgatggtcatgtctccgtcctcgaattccgcgataatagctggacccaccagattttccacgctcacggtatgggcgtcaactccatcagctgggcccctgctgcctctcccggtagtctggtcagctcaaaccctggtattggacagcagcggagatttgtaaccggcggtagtgacaatctacttaagatttgggattacaagtgcgcactatgcctcctacataggaaagtcgaagttgctaatatatattctcattagccccgagacaaaaacctacaatgccacgcagacgctggaaggtcattctgattgggttcgagatgttgcttggtcgcctagcattctctccaagtcatacattgcgtctgcgtcgcaagataagaccgttcgggtttggactgctgatgcatcaaaccctggccaatggacgagccaagtacttgaatttgataatgttctgtggcgtgttagctggagccctagcgggaacattcttgctgtaagtggaggggacaacaaggtcagcctgtggaaggaaaacctacgggggcaatgggaaaaagtgaaggacatcgaagaatgatcttgttcccgggtttgttatcttatctacatctgtttctttctttcttcgtacctatccaacttcagcagaacctagaattatgagctcatcggtaatacagtgttcttctatgagcgaaccagatttcccagtttgttctcagcttatggtcttaccctgcagctgttcagtgtgcccagataacttcccattatccacaagcttcaactgcgaatttcagctaccgggcacttgcttgaccaagcacctatgccattaggtgcccctcgtaagggttcagacctagttttttcttccgttctctggatgaaaagatcgaatgcacgtcgtctcacattttcactctgcttgctatgcatgactttcaggtctttttttgaacgaagcttcctcatgacttcaaaggctaggaccttgaagcagggtcagaaggcacaacgcgatacggcgcaaagttgttatccagttgcacattactcccgggcttgctcttgtcttgcgaatccggcaagtagtaccttcttttcgaagtttttatccccacgatctcttgtcctaagagaaatccatctttagactactcacttcaatgggcgcgttccccaatgcgaacacattggcgacaaataatcaaatcacgatatttgcaatgaatcagggaatcttttcttccatatgtccacagaggtacgtgaaaagcatccatgtctcatgacgcctcttagcgcactcattcatagttaatccagaatgtcgcatatatcttgctcacatggatggacagaattaactctgttctgtgttcatctggcttgggcagagatcctattagttgagtctcacgtttggcagaggatctttcggatacttatgatgagtgggtttcctgtactttggttctttacgagattgagtacggaatccgctttatagcttttcgcaaggcgtatggaatatgggtgtggccaggataaaaactggcatactggctgactcataggtaacgagatcccggaaggactttatcgagaggtgatcaggttgaccaaggtccaatagtctcgaacgcgtacaaaaagcgctcactgcaactgagttcctcagccgtcctgtgtgcgggcatggcaagagcccttgatccgccttcagatctgttctgtgccgtttcaactaataagactctcgaatggaatatgagagacatatggagattactaaagcgcactactttagagttcgtcatatacatagtctctggttgcttaatgtccattcgatgcttgtaacccgacgacaattttaaaatattttacgcatgttcaggaacagaaccagggccccatcaacgaggactttcatgtaccacccgagatgacgctctatattcgaaactcttggatacgccatttgcttgacccggacgagagtacatttatacgtcgtacatatgagcc

SEQ ID NO: 5252 - DNA, 3729 bp, Emericella nidulans
aaaacagcctcgtcgatcaacaccggaatggggtgattactggcagaaaccttggacgctatgttgaagagtgtacgctgacccttatcccaagagtaggctggtttatcgtataagcgtcgttgagcaatgtcagtatcactcgtcaggtacacacttgccacagcgacaccctccgaatgtagctcagttgcgatctcgccaggatcaccgtctgttgcatggccatctgacatcagcacgagaactcgctggtcacaatcggaattcgcttggaatacggataatgaccggctcagagcctcacgcattggggtgtcaccgtatacgaactcttcaacagatagccactgtcgagcccttgtggaacgctgctgaagcagttgcaacaatcgtaccacatcactcactggccgagggatgaagtccgcaaagtctcggaaccactctctgcaaatgcgacgcgcgagcatcagaccttctgaggagtcgactacctcgtctgcatatgcatcggcactcattgctccccccgctgtcagagcagcgccaagtaagccccctaatggaccacatactagagacccaacaccaatcgccacggcgccgccaccaaacgttgctccattcttcatcgtctgggacttccgaatctcagccgcacttggtattgcgtctttgaactcgtgaattcgctccggacatcgacgaaggcacgcgtggacaatgcgcgctacactgtctgtaagcttgttccggatgtactctgttatatgagctaggttgttctgattcgcgatctcgatgagcgaatcatggccgctgcgatcatcttgatcattctcttctagaagagcttcaacaatgccgcagaggtccacagttggaggataaccgtcctggcgatcaagtccaaatgcgcctacaaacattttagccctgggatcactttgttgctccttgcgggcaatgtcaagggtgcgcccagcacagcatggaagcgatcaaccgcgcgcccgtccggctgccctgtcttgagcagttccgcatcgatcccgacacatcgaatagacaaccgaccagcgtggatgattcttggtttgccatcgaaacagagttggctcgctcgagtttggcgtacacgtactcacttctagaataaatattgatgtgagattgatgtgccccgcatcgaaaacttgctcggacccagccgcaagaatccggcgcttactggagatgatctactgtccactacggcctggctgcaagtagcaattccagccagtcataaggctggtatgttgccaaggcgcgcagcatctgatacgccataaaagtgggatcagacggattatctcggcggtattggcggttggggtgcgtttgctgcgacctctaccctgaatccgggctcattcaaagagattgtaaacacctggtcgtcaataatccccactccacacacgagctggaaggcgtgtagtttacttggagacgtacccgtgctggctgcacccattagccgcctgctgactcgcacatgaaatccgatatatgtttaataggaggcagtggctagggcaatcttctcagcataatatgaaatataaagactccgttacagttccaggttcgataaaaacccatttcttttagcaaaatcccccttctccagtcactagccaaatcaggcttagcggttagggtatggaccaagttgtcaatgtcagaagacgaaagaacattttgggtgtatctgtacatccagacatgcagacttctttgacttgctgctatggcttgccacgagatcgtataaccattgttagcatcacggctccctgaaaaagttcgatacataactgctaataataggaagatagctctatcacggtgtggactgctctagacattctatcttgagccttgtgctcaccgaaaacagagggaagtcttatttctatcggtgttctgccttccccagtcactatgacttcctctgctaaatcttgcaatcatccaagatcttccccttcttctttctttcttcgcctggcaatttattgttgcctttctccgctcggggagcgtttctcttccgaggatgccttgcatagctaggttcttgacggtgtgctctaaagaagaaaagctgcttaaggcatcctttggctctagttccgagggttcaaacaatgtttaattgttgaagatgctttatatcataccttgggcgtcaatagtatcgtaactcagagatagtggctgaaggtaaggtcgcagtttgctggttggacgaggaaaaccgcgcgccgcaagcgtggaagctcctggagcctgctaaagcacgaggcattttcccaactactagcagcaagcgcatcctttttaaaccaactgccgtcttcctcctggattaaacgaccgtcagcatgtactcatatagtgtcggagactaaggcgatcaagacagagcttcacgcggcattcagcatgcaagggaagctgaatgtttcttcttcctataaaagtctgaggttacacgcggaaaaagaaaaaaaaaaaaaaaaaagaaaagaaataataacttcccaactcgtctttcaatcttaatccatctgaaaggcttttaactcgtgccattgtctaaaatggagcacgatgatcgcaaaacccggatccgaatcgaggaagagggcatccatcgtaatgaaatgcgacccctccctcgtcgagacttgagcttgtctgtcacagcgggcgtggacgagtagtcgtgccggagaatgtgcttcctattacgtacaagacgctgtaggtattctcaagccagatgaaacagggtttcatgctaatgatcggacgttcaccctagttccatgaaagctgaagatgcagtcgggaagcactccaaggagtccaacaggcggggacaggaacaggacaaaagtcggatttgttgttctgttgttgccttattctcactgtgaatacaggcctcgctgaactcgattaccatttactttcggttgacgacttgcaacatcgattctcaacgtccgcaaaaggtcttcaaaacgaacaaattccccaactcatctcaaaatacggtaaaaccagccatctcctccaccatcaagactattcaaagcaattatgggttacgttctcggaggattcggcagtatccttcttggaggtggtgtgctggtctttgtcgcgtgaaagcctcttggaaagcctcctgcaagagccaatcttgctttggctatagttctcattgctgtgtgggttatccaggctgctttcaatggctggcaagattggtcgtcttctcaggttagggtgtctaatacaaccacgctaccagaccaatgtatcgcaattggcaacgggaatcggaattcactgagtgcggccgatcttgttccgggagacattatccaagttaaaaagggaaacaaactacctgctgacgtgcgttttattcaagtctctgctgatgctaagtttgatcgatctattctgtctggtaataaaccttgctccctgtaatactctttgctaaacgttcacaggcgagtctgaaccagtgcctggaaccgtagactctacgaacaacaacttcctcgagacaaataacattggtctacaaggtacctactgtgtctctggtgctgctctgggccttgttgtggggactggggatcagacggtttttggaag

SEQ ID NO: 5253 - DNA, 3675 bp, Emericella nidulans
cagtagaccatgcatccctcaaccacgcacagatctggacggaagcatttgatacagaccctgggtttatttgggctgtcatcctaataacgctcgcccataactctaaagacgcatctgacactgttgacggcccattcaatctgacaaatgagagcattgaattaatagtctcagccacggcagcgtagtcaaggagactatattggagaatactgttctgtaaataacaagcagccctggaagtgagctgtgacgtagatgcacgagacgtcaagtcccaagcttgttgccaatatcgtttgagtggcggcttgtctgcctgaggactagctgcaatactatgcacacaaggtcaacaactcatccccggtcacttggttcatagaatctcaccatgcaatagcaatcattgtccaagatgagatcgtagcattgtcatcatttatgttgggtatcaatcgttccagcaaagacaccttcgaatcgatgcaggcatagtggttcaggaggaagggaatcagctgcaaagcacaaactcttctgatgccgaaagaggctgtagaatcacggaaaacatcgtcaatcttcgaggatatacgttgccttttactcggtgtctcggcctcgggggggcaatgcgtcgacaaccgtgtggttaactcttcagacaactccagcaaccttgccataatccatactaccgtccagttatgctcggacctaggactctccaaccttggccaaagacgaaacttttcgtgttgacctatgctgttagtatcgaaaaccaattcgtcaacctgaagaatatccttctcggaacgtctaaagtactcgcgttgtagagtatgtatgagcccatcaatcacagctatcagagcctcgtccggttttctccgaatctcatctataagaaaagtgacaatcaacattgtgtgacaagcaactcgtcctttagacccatgagtttggtggtccagtgctgccggattactggaactagatctagcaaggtgactcgaacgagttccgagttatcgaatattatccccattgccacagcgttgatagcgctgaaggccgtctggtgaccacttccggaaagagagggtgaacctacgtaacttgccagccccagaagtatgctctcagcattgtcctgaagaggagcatttggaacccctgagagtattttaatgcatgaaagagcttcttcaaccacacccgtcgcgcctttgagagactctctgacggccagtgaaggtgtcattctagatggtgtcgaccggccaccgctggctccaatgtagtcgtccatgacagacgaatgcggactccacgtgctttgttggctgttgtgatcattccgtacgttgacgaccttcaggcaaaatttcaggacagattcccactcctcaacccccaagtgctcaacgtgtggcggataatgcaagattgtgctcaaacatttcgtgtagtccacactaagaagctcgaacagagaactgtccgggctgaccaagacattggtgatatggtcaagaatggcgcgaactgacttgatccgtaagttacgcaggaaagtctcaacagctgtacgaacaacgggatgcacaagcggaaagacgagtggcggctgctttactggaactggctcctttagaattcgcgcggttatagaacgttttttctgtggagacgagccgaaacaaagactcgaagatcttatggcaggccttgtcgctcatagattgactataaaaaacatatattaatatatgcctggacaatccagttggaagctccgtacagattcgagttccgtttattcttctggagaatgtgttttagatctggtgggcgttaggcagtgtgacaaagacaacaatcaaaagtcaacgaaccagctaagccatctgtgcgatctttggttttgtccgacgacaaaagcgcgattgctccgtctaaggtaatttcgcccttcattgtagcagcgtgttgactactttacctttgtgctggggaaattgtgggagcagctccgtacagtatctatcagctcatctgggagcgctctgctgccccatcgtccagggaaaagcctgcgatatacggacagcgactggatatactctgaaagccctcacaaccaaattaagaataaaagcaacaagaagatactaagcctgggagctgtttcgagaccaagctgtggtttgctggtgggtccctcaagctctcgccgccttttcagaccgccggcaatttgtcgcgttctccaaccttttttggtgctagagaaacacctcacgcatcaagcttgagtattcgaactcctgcgccgagagtatggagagtgcagagcccctggaaggccttcgcggcctgtatcaggatctttctgctctttctgactcgtcccttcttaacatagaccgactccgtgtcgagctagagactcacatccatgattttaggaccctgctcgacaaacccacaaagagcaatgaaagtcgaatgagcgttttgagtggtacagtcacaattcatcgcactgcctttggggcttagatgtcaaaaatttgttacgctgacttgttctgcacccaacgcagggaaaatcacgatcgacgatgtggaatactctgtcaacgatgagttccagcagggtacgcttcaagtcgccgatgcgctcgatctcgatgaattgctggcggctctgctgttttttaaagcacaggagacatctcaggagtatgatagaccacctgtgattacggccattataaatttccaccaacgccggcacttcctgctggaatcgttgcgcctcattttccaggaatccttcgaggtggagcgcgaagcgacacaagaaatgatgcaggaaatgctggcacatgttgtagaaatcaaggatggtcagctacggaatgcatcgctctatacacgaaaatgcctgaaatctatggaggatatcgaaaagtggctgtcgcttctgggtgaacaaatccagaaagcctcaattgtcggacaatcggaagaccagcttgtcatggaggctattgagcaccagcgcttcaccttgctccaacagcatgaatcactcggcgcaattttatgctacctgttcaaaggcccttacacgagtccggaagatctaagggttctactgaaacatctcaggaagctcgatcggtttgacggagtccttgtccactatgttccagctatcatcgcttcatttgttcaacatgggtcccccgaacgttctggcaattaccaggaagctcgaagtcttaacaccgccgttatctccaccaaagacggccagaactgggcgcatcaacctttccactcggcagtaattgcgctttggctctcggtctacagtgcatgggactatgacggcccgtcatctgccccgccaggcgttgatctcgaaaaggaagccgaagaacgtaccaagacgttcatgacggccctagacgacgaaggtctggatctcttagtttctatttgctccggcgtgagtggtgaagaatggagtgacccggctcgcagcgactggtaacaatgctattgagggagagcgcatcttggtttgaagaaagcggatcggcgacacttgaacgaattcgtgctcccccggttttcttgaaaaaaaaaaaa

SEQ ID NO: 5254 - DNA, 4238 bp, Emericella nidulans
cttcaccgtcaggtcccatgacaccagtgtctcgctcgtccgccgcacgacaaagccccgttcataccatagccacctctccgttcgatggtcaagatgacggcacgagtctgttaacagcgatcgcgtctcaggagcggagggtgctggagttgcgcgaggaactacaccgcgcagaagcggagctggactcgttaaagaagcagtggacaacgtccgaaaaaacaaggaaacgcacagaagtcaactatcgtgcggaagccatgttgcctcttcggtctccggacaggctccctgatggaagcgcggcaagtgcgcatagtagggaaaccagtgtcagcggcagtgcaacctctgcggttcccccacaagttcgactcagccgggagctggaacgacgccagagcgtgcttgcagccgcagctaatggctcagctgtctcggctaatggacgacgagtgtttcagggctctcatacgcgagctctgtctctgctctctccaactacgggctctatgagcggcaagtcctctgagtctagctctgcccagggggataatgatcgtgtaggctcggtcttcacgatcagccaccatgccatccgttgaccgagtccttgtccgaactccgacggctccaaccgaagacatggtcacccagtggcgcaaagccatgccaggatctcctgcctgccgggatattctcatgcgcaccggcaagcagatggcctcggatctgcgcgagggactctggacgttcttggaggacatcaggcaagcaaccgtcggtgacgaaggaattaacgcaacagaatcgcgaacaatgcagcctcgcaaccgcgattccagctccacttcgcgcagccgagaccgactctccgtgcaaactggcagtggcagtgacaaggcatcgtcgcgctcatccttaggaaggaagagccccggctcaacaaaggcaactactggtactggtaaaggctccaagtcggcggacatagacgcgtcgttctggagtgaattcggcattgattattattctgggcagcagcccgccaacgctcgcagaactccctcaacccccagcggggcgaacagtcacggtcagcacaagtccagcgttcccaccacgctcgacgtggacgaaacatgggatgattgggatagcacaccgcagccgactaaaaaatcgcatactccctcttcgagccgctccactatcgagtcgaggcaggaccagtcgcctgtcactcaagcgagtagtccacgaacaagcaccaggtaggttggctgtagatttaagctgtgagagtgaagtaatcattctctcgatgcttaccttttcatgtgcatttctaacttacaatcccagcttcggcgactggcaccacgacatccccgaccccagcgtctcagacggcattccctggcctgctctaacacaagccgcgccttccaaactcaaccgaacagcctcgaatctcatggcagaatgggagcgcagcctgtccccttcgccgcacaggagtcctcttgcttctccgggtctcggcaaagagagtaaaaacgactgatatgccttgtcaacgaagaaacgccgcgccatacatctttcgttctctctcccatatcgccctggtcgccggtatcgtgccgcaaaacctaactcaactgctgtatatatggacacgaatatgcacgacctacctactgctctatatacctgacttaacctaacctgctcgtggaccgacgtgaagaaatttttcgagtatgacaagcacaaaaactgattatgtatggcttaacgcgggttacgatttgggtcgtgagacccttacgagttttttatctttctccttctctactctctttttgaccctttggcttatcctggatcttacttgacatcctttatggggtcattatgcttcatgtacttcctgcatctaggatgaatgtactactaacattgatcaatttaaccaattactattagcacacaagcctcggaactaccatccgcgatgacagcctgtaaagagataactatgctataggcgcttttacccatcgatatctactaagtaatgtgctgctgcgcatttataaaaagcctctgaaagtctagatggggcatcattcattataaagagcaaaggcgagattgtgttgggaaagaacactgattgaccagtaaggttgacctgggttcacgtcaataccgtaggacaggaatattatttaaattggaaggtagcttatgcaggtaagtacttctaatatcgattctcaggcgcccctgtatacttggccccattagggtatgtataagcatttatctaaacaaagcaatcttgttcgtgcttcgtagagatactttcaagctctgcttgcaaggctcattgacatgacataagagagtatatactgattaaagacagaaaagcatcaagctttccttcgtcgctttgagcctccaccgctactactcttgcctccttgagatccgtccccagcgtcaaacacgtccgcactgtaatgggtcggatcatcaaccgtattgcttgggctggtggattcgctatcagtgagggtttccacgacccttccggaaccgctaacgcctgtacttgcaccagttgtgttagctgcggaatggccgtagccgctgtcgaattgtgggaagtacccggggctcgattgattgtttgttccagcaaagagttcgccctcgccagctagatggtcgaaatcaaacaaatcgtttccgtcgtgtttgatggctatgtcatctggtggtgcaggaggttcggtcgaggggggtgcttggccagcacccgttgagtcgccgaggtctacgtttgccctgttttgttgatcatagtccccaaagtcggtaaagtaatcattgttgaagatctggtctaattcaaggggtggaggagggatagttccatcggagccgataccaggaattgtaccgcttggactaagtggctgtagcaggttggtcaagttttgaacagaacggtcctgctcggcttgcattttcatcaggttatcaatttcagaccgagtgtcggcaagacgcgctgagtaattgttcggcattgggggcggtactggacttatcagagcgttgttctgggacaccgtgacgccagagtcatttgtgccggactcgttggccatgagacgaagcatatctgcacgttgattggaagtaagtgggacattaccattagaggtttcgagcgacgatagcacgttaggaaaatcactgtaagaggttggaatcccatttcgcgcattggcgttctgaatgacggacatgatgtcgcgctgcggatattgctgagcttgggaagatgaagtctcttttgatcgcgggctattgttgtcgaaaacctcctcaacttgcccggactgggaagtggaagtctgccgcgaattgttgcgagattgtgagcggtcgtaagcagttgcagcaggcgagagcgtcgctgcacggccatggcgctctgaccccggaggagccttgagcagcaacggttgctttttcatcgaacgcgggccgccaggactattcatcgagggagcgcctagtgggccgaaggaatagccatcccccatatcgacaacattaccctgatcctgtgaaatcgcaccggcgaaggaattcgctaggttctggccctcttggccttggaggctacggttgtatacggtggcgagaaaagtaagtatggcgttgatcgagttctcgtgacgagtgtgttgttcttggaaatttgcagcctgtgcatagagttgttcatgctccctgcgcagtttgtttattgtgctggagataatttgctgctgttgacggattgcttgcagttctcggtagacagtcgcgaactgatcctttggcaatgatggttgctgtgcaaccaaagataactgtcggttacgggcaccatcgtcgcgtgatgccccagcattctcatcaccgaaatcttcattttcgttttcagcatcctccgtcttcacgcgcacataacctttgccggacttcgttccttgtccagctgtgttcttgggcttctggatgagccaaagcaggtcagggtgcccacgtttgaaataagggttggcatattcactagggcttttgtttttcctcacgctggcacgcatcgaattatcagacagaccaactttcttgtaaaaccatacatgtacaactgtcgaacg

SEQ ID NO: 5255 - DNA, 4843 bp, Emericella nidulans
gacaatgacgccaaagttgacactgatatcacacccggccgcccgaatctgggaaaaatcatcacagcttttgcagaggaagcgcatgtcagtgactgctctgctgcggtgctggtttgtgggccccagaaaatggcggatgaggcgaggggggcggtacgtgaggcactgaagagaggataccatcttgcgtatgtagaggagagtttttaatggtaggacgaggctttgggatggcaatggatgggcttgattgtccggctgttttggtaatagattatcgaggactagagtatactctattttcgtagacgtatatacggacatgactagagatttagaatggacacacttgaatacagcggatacatgatagagtttgtgcagatacataatcgtctaaatacagatggttatctcggctgtgaatgtgtgaccataaataatagcgataaagcctggccaggtcatcaaggggatattcataccacggtcccttgcttgcgtaccgacactcgccaaccatgacatatccagctcctgaaccagcaaggcactagtggtggctcaatatagggaatgtcgcgcgggtgaccgacatgtcacattgaccctggatatcacatatatactcaacgcggtagccaagccctgagctcaatcgtcaatgcaatgatcggcatcgtatggccagatatgtcccctataatcgaacaaccgcatatagagttatgaaattgatctgaggtttcttccgaatatgccaattgtctcgcagaggatcagctaggatactggattgccggctgtcataggtacactggcatgcttactcgtatagactagatgtcatatgcgcttgatgaacatcaatgcaagggattcactataatgacggcccgtgtgagatcgcccacagactttggctgctaattttctgcgctgctgacccagtcgactcaagctataaaacctgcctcaagtcctagaccttgtcatcatcatcatcacatcgcagcatcttaccagacacctcaaagtgtattttcaaagaattattcaccgaaccacgtcaatatgcaattcacaatcgcttcccttatcgccaccgccgtccttggactgcaaatggccagcgcagccccccatgcccccggctccagcaacgccgcgatcatctctcaggcccaggaacagaacacctgtggcaacgcgcacctctcctgctgcgagagcaccgacaacagcgtctccttgactcaggaggaagaggagggtcttcttcacctccttggtggaacgagcagtgtgctgagcgacggcttgcttgggaagtactctggctgctcttcgcgtatgtcccttgccatttttttccctgtcggatgaaactgactggatgatgcagtcgcttccgttgagggtattctcggcgccggcggtaaccagggccttgttagtggacagtgcaacaaccatgttgcttgctgtgatgctggtgataatgagctggtaggtttccttgaacctggtgttgctgtcctcaagccgaattctgatggtatacagaacggcctcgcaaacgtcgctgttccttgtgttcctgtccaggttctctaaatagataaatagagagtctcggtctcctggacacccataacaagcaggactaatctggcctgtcctggcctgtcctgggaatttatctcacgctttgcaatctgcggtcgctccagtaccttgacctgtgaccattacactcctttgtacactttttctttcactgagtatctttgtcaagggttctgcatctgtaacaataataaaagccgatctactttattctgcccaaacaaacccttgttctcttattgtcaatgccatgaaactaacggacggtcagcatagctcccagttggtcaacgtccctgctaagaacttgcttacatggtacctgatacctataataatgcacagattgaccgttcattgcaccatagaaaccattcgaacaaaatccaaacgcctgcgcgtcgaagctactcggggcaatataagtatcgccacagccggctatggctctctaggacttcttccccttcgacctgtctatgagaaattagactctgtcaatgaattgcttgatataacgcgttaaccgtgcctgttgagatgccagtgctcgtctccttaactattgccctcctctctttgaaacctcaataccaatcacaggatcaattggccgtgattactcctgattgtacagcaatacccaaatttctgtttcaacacctaattcagataacgtaacagccgtctagctgctccaccgttctatcctcctcacatcgttcgcgcctaccattgctgttaagctaccaataaccatgaacaattatgcatcggtaatcctcatcttctggatcgccgtctattagccaagcagggtgaatcttcattggtattttcctgaacaatgcaccctcggcgttgtcattcttgactctgttcctgtactgggatggatgagacggacatggctaaagcgtcactactggaaggccaggagagaatctgcctgccggagttggatgggtggcttgccgatcgttaaggaaatgatgaaattggcggcgtagtatgtaggaatagcgcaatagactgggcagttgatacctactgtctttggcagcagcagcatacaccagaattggggtgggcttgggcatcgttaattaaaacatatcctttctatgcccaaccctcttacttacgagtcatgtaactactgcaacagaatgcgtgaaatcaagattgcattctgtctagaatccaacctgtaatctgtgaggtctctgaataaggtacgttcaattcagtaaaggcatttctctagattgcaggccatctcaacattcgaacatcttcgtagtactaacattgatccgagaccatttgcggttcttgaaaatgcattcaacaaaccgcgcgggccagtagacatgatatagcgcaaaaaagggcaccggatcccataaggcccaggtgccgtccctccagtggaggagatgatgccagaaggtccggagggagtgcttggtctcttcagtacttctgattccacctatccatgtcacaaccgggataatgagcagagttactagatcgtgcccaatccagtagacgttataatctggcgttgcaggggccacgatgtcgctcgagcctttgtcctgcttcagtttcgagtccaggttgtgaccgaagacagatagatacgcatgtgccacttcaggtgtatgttggaataaaatgactgcagtgtgtgtgcgcgggttgcattcgattggggataaccttgcttcttcccctcgaccttgcaccaagaaatcaaaacttagatgccccgtgaagtcctccccgccacgctctgcgactcgggtcgtgaactcgagcatcttcatactcagggccgagcctggaggtgtggcgctgtaatgcataagcatgtcagacgacggacatgccacgaacgccttgacatccccacgcacaacgagcgaatgcgtgcaatactcctcaccggtaatgtattcttgtaagaggaagggggaagacttggagatatctaacgcagtaagataggaggatgtagcttcctcgctgtcgagggggagcaaagtcatcattttccctctcgccttgtcgttcactccgattggtttcataatgaacctcttcgctttttctctaccttggttgagtaaaattgtcacctcttcaactgatgtgcatcgatatgactcgggtacaggcagttccaggctcttgatgtagtcaataaatgtatccttctcgtggaatctcttcacggtttccgaatcaaactggacagccttgaaacgatcttttccgaactccttctccgccattaccataacctcgccgtcttcaacggcaccaataacactgctacaactgatccatagatgcacttcctcctttctcatcacggagaggagagagtcgaggtaaggctttggatcacctggacggggcgacgagagtctgtagaatttgacaattgattgagaataccggcctggcgaggtgaagagtagaggctccgtgtcggcgccgatgatgcggtgcggcgtctccctcgccaagagccgagcgatggcaaggcccttggccatagagactccggtcactaggatcgtcttcggtgcagaagattctttgaaccttccttgttccggcgtcttggatacatagttgatgacgaggctagtgatggctattatagcagttgtaggtaggaacattagactgagcaaaatgaggagaatgtttttcggtatatggctgtagaaaaacggctccgccatcttgcttgatggtatcctaaactcagccttgtgcaacaggaggatgaggtgctgggtaagactgtgaggccagggcataccggcggctccgggtgttccatggttctcatatgcacgcccacactgctacggcgcacattcctgtgggctttataaacgtcatgatgataactgaaggcacccttattatgttcaagtttatcagtattggcggctaatcctggaccatattgatgagactggatgggctcagttcacatagtattgctagtttaatgcttccaggtcttctatctattaccacgtcaagatgcaggatccactagacctcagcaatgagctttggttatatgactttgaggcaaatgctcaatggtcagtttgaaaatagccccaatttcaacgatgatgtctagatgtctacactggacgtaactatgtggcaataa

SEQ ID NO: 5256 - DNA, 7502 bp, Emericella nidulans
  unsure (1)..(7502): unsure at all n locations
cttgcaccaggaccctccttatactccattgaaatacgattgcgtagctcgtccgcagttccggtagttaacttaagcccagggtttgttgtgaacagtggccgggtctggttatcctcgacgagctcccgcagagcattatctgcatccttgttccaatcttccagttgcctgctgatgagcttgctaacctccaatcgcacgcggttagtcggtatcgccagttgaagcaggatactgtagcactccttcactcgcagcttgacatcctcaaccgcgtccctcgcatagcgttcccagtgctcagacatcttccggaagaccgtttcttcaacatccgggtgaacactaccgggcaagcttgttccacgactaagtatagcctcgttataaatgagtgagtatatgtcatccgctgtcctgatactttcttcccatgtgcgagggtcagaagcccggagttgcctccactcctcctcatacgcattgaatcgtacagaaacctccttggttggacatattgcttcgcctaactcctctaaacgctgctgtatcaggtagcggagtctgactttggggtctacggaggcaatagtctggtatcggccacgcaaagcagcatcagccatctcctgcattttggcgcagaattgccacacaaaagatcgctgggcccccgggctagtcctggcctcccccatctttccaagctcgtcttcacactccttgagtttccggcgaatctcatcgatgatctgaggcatgcctttttgcagctgcacacgacgttccctgtcgacgtagttcatcaaagcccttatcccgaaccgttcctttggcgcatcccgccaggaagctcgggagaactctcgttcctcagcctcatcccgttgagcatctgtgaagtgagattcgataggccttctgttccggatcccgaaccaaccgtgatttaggtaggggacattcgggatccgtttgttctgcaacaaagagaccatctgccgtcggcagtcagattgtgtgctatcagcagtcggggggagaggaaaatttaagtccgtacccattcgccagatccttcttccctcttgtcgcacttgcttagaaccccaatcgaccggctctggagtcctggaatgctctgggcgatctctagacttctctgacgacgaacatcgacatcgtcgacgacgagcctggatacagttagcctagagggtagtacatagactctgtcagttgtggctagctctactcacagaacaatatttctctcgttttgcatgtattcgcgcactaccgcctcagcaatagccccgtctgtatccgaaggcaccatatcatgagtggaagatgagccattggtcaatgtgccattcgtaagtcccttggtcaagcctccattccggatcagacctggaagatctactattgaccagtgcatctcgtccggacccgagcgctcgatgcggaggaccgcatcagacagacggtcactcttcaccgtatcctcttcgaagatacattcagtagcctagaatgcgttaaatttccctttcagagcttcaaaaaagaaattaatttagaggtaccttgtcaatcatgtccctcaaaacctcctgcgtcagcgtttcgctctccatgcaaaagtcctttgttcttgcacgaaaagcatcgtccttcgccgtgagtcggccaggagtaatagttgccttgacggctggaacagtcactgtggcagtttgacgaaaagatatctttacaggaaatcgagtacacgtatcttgcttcactgggaaggatatctcggtgatcgcttggaggacagagctctttccagtactttgatcgccaaccacgacgagctgagagcatccattaaactgtcaaggtttcaagttatgcagggtctgagacgcacctctggtagtttaatatcgctgctgagcccaagcttatgaagctcatcgatgaatgcgagctgctcagagctttcgacaccaacaaaatggcggatcctatttcccatggcaataagattcgagcacgtacctacgaagaagtcttgtgtgaagtttgaagtacagggccttgcgagcgattggtgtattattttatactacaactcatactccagtcgaatagatagacaggcacctcgcaagcgccgtccacagctgccccaacaaccccgcgacacttcaaacactgattagagcggtaaaaacacaccagtaaagatgatgtgatgccgcagccttgatgcatgcactggctagctgagatagtgtctagcgtcatagcgaatcacaaataccgaggccgcgtaaacccggcatgtccccccggtctcatcgaaaagtgacgaactacgaatcatgccatttattatcaagagaagataattaagagaagtgttaaccattctcgggatggttcagattacaacaaaagaaacgaaacagcgacttccactttaccatattcaagtgacgccagccgtttagactccactcctcccatattcaataagccgtacctctcagctcaagttcggtctgttccctccccttcagaccccccagggcgatggaaccacaattttcggtacctgcttcgcagcccagggactagacgtctcctccaccctcgcccctccagctacgactagacccattgccgcgaagggtccgtctgtggacagcattgtctcagcatcgccccgggtccgagcccctaagctgaccgcatctgcagcatcgatcaacccagacatgacgtttaactcatcgtgcccttcacgactgcggcgcgtacaagcccaattgagtctccctctggagatgctgtgttacgcttggcatcttcataatctcaaggcccaaagccgccgtggttgcaagggacagcagccagtacccactcggcctcatcaaactagaatttaccatactagctcctattacctgtttgaagcctaaactacctatcagtactatgagaatcttcttgtacgggcccttttttagcttgctaatctggcttgcttcctgtggagggagggtgtattggaggagaacgttgaatatggtctatactctagtcttgccaggaaccagtattctttggtagacacttgacttgtgaagatactctcagctcgggctttgcgcacatttttagactgcaggatttactggtgagattgctattaaggaaacaaccccttaagagcacaggcgggggaatccttggttttggcaaccaggattgccttgtttcggactcgctcgttcagggttctcacgacggaccagacggctctggtttttagggttggtttcagcgctagcgatgttcgcagctccatgggagcgaatgttgataggctggcccagagtgctcgcagatagagagcgtttctgtctgcagcggtattggtatcctgctaatgcatccctcttgagccttgtggcagagccgtcctcaagttcaaaattcgcgggcatctcgcccgagcgagatcctcttcaaagacggagggcgcttagacctgttcgcaatagctgggatacacgtttcagacaatcagaaatcataaaccagaattatatcagtgcttaaaaggctcaggccagcgtgactgatatctattaatataggcccgttgattttatgcacacagaagccctacagccaactcattccgcaggaatcgatgcctatccggggtctgacccgttaataattataccttccattgtcgctaggaatctcgatgttgtggcatctcgcaccttgaactcaaaagagtggtcagggtgaattatcttacacctgctttgttaataaacctgttcgcggtatgctccacaagtgcaccacttgctgcagcaacagctttctaatggccttctaacctactttcctgggggacttttttacggcagagttggatagagccataccaagcttttggctcgctatatagtatgctgttggaagactaattgatcttctgtgttttgtttctcctttaaggggtaatatgaacctaaagaaagtagggttcctccaagccacttgtcctactagacactacgaaatcggaatacgtcagagaaaagagcacgatataccaaagttgaatattatagggttataaggaatacactttgcgcaatccataaaaatttcggaagcaatgagagcaggacaaaaggaagaggataatctcagtattgctctatgaaacgcagcagtagaccacgttttatagccagccttttgttattatcgaaggatcctaaccttctcagtgaagcaaccacaaagatagtctccgcatacacctagcaagcaagaactacgggcgtcgagaccattgcccttctcattccagcaagtgagcagtgccaccctgaggtcgcgcgacctggtaattgtggtgatcagacaaggcgccgcccagatttgtagtacacataagtagtataagattaaggttcaatatattcatatagttcttgactttcgggccgttgcgcgcctacacgggagatctgcaatatgatgcttgactgccatggatcgcaaccgttagggtaaatgagcagtggtcgatgtaatacctgtagtcaatattgcatatatatcacatccacttacttcctaaccaattatacctcaaacctcgaaaccacttccctctccccactttcggcagcccctctatcatgctaagagagcaacaaaaacataatatcccaacacagcgtacaagacgcatcaagccccgttattccacacgtgcaattgcgcaagcgtaatccctgtcttggtatagaacgatcagcagctgtccccatctttccaccatgaagagagtcttgcaggtgtcgatgccagccaacgccagacttccgatgacccaggacggcactgcttgcaccaccgttgctgcttccgcctatgtacctgcgtaagacccgcttgagaggcgactgtttgacgtagtagatacctagcaggctgcttctagagcctggtacgtacgccaacaaagcaagatagtttccagtatcaaacatggcgttccgcgattactccatagagggggggatcaatggctagtccagttgttcaagtacatcattaagcgagatgaacaatttgcagaccttggaaaagctagggaacgcccgcgagcggcgccagcctgctagagtgagtctgcagccatcgactggcctgacacctacgggcaagttcaaatagcttagacccttggtcccggagatttgcgactttgtaaggacagcgcttggcggatctgggacagactatgcattatccagtaggctagtctaggtaaatggtcgtgaatcaacgctgtatttaagtacctgcgataccaagccctggcgcccacctcaaaccccgcccccagatcggcgggtaaccttaaggatattctagtttaggaccaagcctatggatcagagcactcgccgctttgtccctcccttggtgtcagtccttgcaagtattttggacttctcgaatactgatggccgtgcttgactcgctccctgtccagggtcaatcccttgaagtccataggggtagtatagctcctaccccagggatcagagcgcgaccccgttccatattcctaaacaagcacaaccgaatcgcgatcattctcattgaccttgtgcgtttaacaattggtttttgggtagccctgtgcaggctttcgacgtcgagttacaagtggcagaaaggactccggcaggcgcatgctgggctgcgctcgattgtcaaaccgatccgcaggtaaacgggaacaggcgtggaggtcggacaagccgttcatcatctattgtcagtcgggagtcagtcgggacaggcggtggctggcctgtattgaacagggcttgcttaaacgaggggtgagctcgtcggcggttaggctgttccaggatatatggacaagctccgagtcgacacccgggtatggccattcagctctgcgagtaggacgatgagagcactcatgtgcttggtatcatggatggccaccagcaacgtcaccttggccaccatccagaggcaatcaggtcgtgagccaacgcgattgcctgtctctctctgggttcacaagtttgcagactccacgaagttcactgtgccgctgctgagtgcgaaccacactaatacttgtaacaatttcgccattatgcgccccaacccccatcttgctcggtgtcttgttcctcaggccgacggcgagtgtacggccgttcaggctgactccggcaacagctgcgcagactcagcagtgaattgtggcatctctggagccgacttcagacaagtacagccttgccgagaggctctacttcagaatgaagcctgagcagcacgtctgttgctgagggcgacctttcggcccccaagcccaacgaggacggatcgtacaggacgtaacaggtcgtgacagatgatactcacgacaacatcgctccgaatacagtctggaaacggctggtctcgacgagttcgaacaatagcatggtcattccagtaatctagcctgctgattgacgtggcacgtactttgccatataaaactgccaatccaacaacgccatgaaactagactccgatcagccggtgagctgagttgagctgagtctcgcaagcccgactggcgaatcagatcagatcgccatcaggatcttacggatcgaccattagcagcgaatgtcagcgctagtcaagcctaatatggctgagctgagacgggaggccgattataccctggctagggacaaactgcatacaaatactccggagtcgttactctctattagcttatcatcggactcgtgctaatccttcaataccgacccggatccatcgctatgcaagacttcccccgtttcaacgacctaccagcagaactgcgcattcaaatctggcgggcaacatgtccaactcccggaattcacgtttttgatgtctgcatcccttctgcgcagacaggatggcggatatcccaagcccagaaagaattgaaatcaagacatgttgggaacggatcaccaagcagcgtatttcttgaccaattcattgcctcaaaaggcaagagcggactgatatctcagagaggcacgaccaaacaatctcggcatacatgcagtaatgcagacgccaactgcagcctcacctctgacccgtcaatctaccttgtcgcagactccatccgacaaagctgcctcgaagccttatcatcaattcaaccacgaccagctgcaccctcgttgaatcctaatgacaagatcagcaccaaaatcaacaccatccaccttccatacgaggtcaagggggcaaacaagtccactacaacagtatactcgatatcctgcaccttcgtttnggccttcaacatnnctacgtttttcctttgatccgggcgtgctgaatccaacgac

SEQ ID NO: 5257 - DNA, 6224 bp, Emericella nidulans
cggcgtcggtgcgattgtctgggccgggtatcccagccaggccggtgcgcaggggtctttgatgtcctgaccggtaaagcagcgcccgccggtcgactaccgatcacgcagtatcccaagagctatgtcgacgaggttccgatgacagatatgaacctgcaacctggaacagataatcccggccgcacatatagatggtacgaagacgcggtcctgccattcgggttcggactgcattatacgacattcaatgtctcgtgggcgaagaaggcatttgggccgtacgatgctgccacccttgccaggggcaaaaatcccagctcgaacattgtcgatacattctccctcgcagtcaccaatacgggagacgtcgcttctgactatgttgcgctggtgttcgccagcgctcctgagctcggggctcagcctgcgccgatcaagacgctggtcgggtacagtagggccagtttaatcaagcctggggagacaagaaaagtagacgtcgaggttaccgttgcgccgctgacgagggcgactgaggatggcagggtggtactgtacccaggagagtatacactgcttgtggacgtcaacgatgagtacccgacagctaagtttgagatcaagggggatgtgcaggtgcttgaaaagtttccgttgtcaggtaacgacagtgattagggctgtatatatggaaggtcacgcaatgtctttattcaaaactcagtcgattcaagcaaggaattatcagggagaatgaatgctacagacttgaataaccaaagaagccaaaggaagagaaatacatgctccaacatatgggcccggtccaactcccattgcagccatcaagtagacataactgcaagagaaagaggatatgtgagtctgttttcatctcctgctgtacccagtctctaatttcatggtctttttgatgcttgtcagttgcgcatcgctccacgagctaatctgtcattgcgtacttagagtacagaaaatcataggaaggatctagaatattcccgtgcttgaaaacagctgcaagattaccttgttgtcttgtcattcaaagcattgggttgggcgatagggctttccgaagatggttgacttacctaccataccctacgcagccatcgaccgctcatccgccaactcctcgacctgttataagtacaactgcagacttgtggtacaagtcggcagtgtcatttcacggtcggatgagctccgacagccagcgcaaatcacacctcccccgcattatattaccccaaggggtgccgatcttcacctgttcggcgccgtcaccatcggaccacacctctcctcgggacacctctcccggtgcagagaacggcatatatagctcagttggactagcttcccggtttatgtctccggagaatcgacacatcctgccgcaatgagttctgtcgtagagagtccgcccaagactggcttcagcctggtgctgcagaacccctatctatgtggcgtggcttcggtacgagcataatccacacccaataaatgtttcgagacatttacctgacctcgtgcagttctcaacgctcggtggattgctttttggctatgaccagggagtcatcagtggtgtcattaccatggagtccttcggggctcggttccctcacatcttcacagacagtggatttaaaggctggtttgtgtcaacgctcttgttgggtgagtagccgtgtgtttacttactttcataattctctttattttccttatttcccccatattttttttcccccccgttttacttcatttcctacattcagtttcatgttttgtacaaaactgacattcccagccgcatggtttggatcgcttatcaatgggccaattgccgacaggctcgggcgaaagatgtcgattaacctggcggtcgtcatcttcatagtgggatctgccatccagtgcgctgcagtcaacgtcgggatgctctttgctggcagagcggtagctggtttggctgtcggcatgctcaccatggtcgtgccgctgtatatctctgaggtatcgattcctgagatccgtggtggactcgtggttgttcaacagcgttagtttgattatccttcccagaaccagccggaaccccaagctgactgtttgtagtctctgtcaccatcggtatcctggtcagttactggatcgactatggctccaactacatcggcggcgctcgctgcgcgccgaacgtcccctacgctggcagttcctttgatccctataccgacgtcccggcaggtggctgtacaggacagtctgaggcatcctggcgtctgccgctcgctgtacagatcgcgcccgcaatcatactcggtgctggaatgctcttctttcccgactcgcctcgatggcttttgatgaaggagcgcgatgacgaggcgctgtctgcgctctcgagactgcgacggcaggctcgcgatgctcctgttctgcgaaacgagtacctggagattcgcgcgtcgatcatgcttgagaatagtttcgcgcgcgagaactttccgaacctttctggtatcaggcttcatgctgctcaggtatgatctgcttatgagcacggccggtgatgatatggtgctgacctattttcgcagtatctttccttcctcacaacctgggcgcgcttcagacgtttagctatcggctgctgcgttatgttcttccagcagttcatgggctgcaatggtatgtatccatccggaatatgccctttatctaattttatctaatttatatcctcacctggccagccataatttactatgccccaaccatattcagccagctcggactcgatggcaacacgtcttcgctccttgcgaccggggtctacggcatcgtcaactgcctcagcactctaccagccctcttcttcatcgataaggtcggccgccgcgtgctcctgatggctggcgccactggcacttgtatctccctcgttattgtgggagcgattgtcggggcgtatggtgccagcctcgtggaccacaaggccgctggctgggctgggattgcgtttatttatatctatgacgtgaacttctcttattcctttggtaggtcattgagtctcgtttagatatcaggcagagcataaagagggaaaaaaactgactactactgtatagcgcccatcgggtgggttctcccctccgaaatctttaacctctctatccggtcaaaggccatttccatcacgacctctgcgacttggatgtgcaacttgtgagttttacactttctgaaagaaaaatatcaccgtctggcaagcttcttatacctttgttcgcagtattatcgggctcgtcacaccagacatgctggactcgatctcctggggcacgtacattttcttcgcggcattttgtcttctcgcgctcgcattcacgttcttcttcattcctgagacccgtggcaaggtacgagaatccacttgagcctatccctagctctttagttgaccgattcatacagactctcgaagacatggacctcatcttcggcgacacggctgcgcatgaggagaagacgcgcatcaagcgcatcgaggcggaactgcatgggacaggtctagatgaagatgaggctcagaagcctatgaagcagcacgccgaggttgtggatgctgtttgattggcattgccaaatgaattcaggtcaaatatatttggtctggcaactgcactgtttcgggcgtggtactcctagggtttattcagaatatagtaaagggagagcggcgataaaggagatgattgagatatagcaagatcctaccaaggataaatctcaagggctaggtaaattgaagataggctctctatacgccgatcaacaaagatagtgctacgcaacgctggtaaagttcgcactgcctgtatacgtatgtacatgtgtccatagttatttcagtacctcaaatttcttaccctaggcttcactgcagatggcataccctctgccactgtctcaagtgcggtttctcttcgtcttttctggaaatgttcaacaagcaccgggcactcatcgttcagctaggtatctcagatcctcataatacgatacatctcaggacctgagcctctgcgatctatatttggatttctggatgtgaaatcagtagaccagttcaaaccccacgcccatactggactagcctagacggtagagaagtcacataatgtctataatattctaacaggttgcggggtcgtctctaaatcgagcgattaccggccatcaatctgcagtaatgagccgaagtggaagagtcatttagattaccttaggaagtcctgaaaggtctttattattctatccaatagctaaagcatcactgtataacgtaaatgccataggctgtctattcaggccctagtacacagaagctttttgccgtcattggggatcaaggcaggcgagggacgcgacccatataaccgccatagaatggatacagaaagtgaggccagtgacctgcaatgaatgatttagtcgccccaacaaggctccggttgtgcttcgaggtctgactccaatcttccaggctctaatgtatctgatccggtggtgcctcctcgtcacccaccctctccttcccattatgcagcctcgatggccgtacggatccccgcatcttcttatatcctttggcgaaagggctccacaggatcttgtacatcctggcaaagccgtaaattagattagcaacgtactggtcaggcacgagcttgagcaacgccgcccatggaatgcaaaccactgcaaatcccagacatatcccccactgccgcccggtcagtctggtgactccaaacgcagctcctccgacaaagatgatcagtatctgtcccccgaccatgatgagattgatgacaaagaaccacacgttgcggtgtatgccttcaaaaatattgaatctgttgtcgagacgccggcaattgaactcattgaagatctgcatccacacaaacgtgttgaaaataatggtatccagctcgagcttctcctggtaggaatccctgtctaggtctaggatgctgtggccgcagaaatacaggacaaagcagagggctagtttgtagatagactgaccgaggatcatcttccacatagtgacggtgaacaacggcgcatgacggggggttggaggccgcttgagaatgtcggctgtgggtgggtcggttgcactggtttgtcagtatctcgctcgctgtcagaatgggcatggcatggaaggcatagcatacagggctaaagcagcaaaggtgtccatgatcagattcagccacagcagctgcaccgctcgaaacacgctctcgtttcggctgttgtatatggccgtgacaaccgttaggagaacggcagtgatattgaccgtgatttggaactgtcaggtcagtgtctgggccaactagtacgggcaggaaagagcatacctggaggaacttggccactgcgtcgttgacagcccggccccaggaaatggccgtgacgatagaccggaaattgtcatctagaaggatgatcgagctggcctctcttgccacatctgttccacttaatcccatcgagaaaccgacatcagcggccttgagcgcaggtccatcattcgtcccatcgcccgtcacagcgacaatctctccaaggcgcttaagatgcttaactagcagctctttgtcgtttggtgacgaccgcgccagaacctgcagtttcgggacgacctcgtcgagctggtctttgtctagcttccgcagctcaggcccttccatcgcgattccgtcctcagtttttatgccgcatgattcggcaattgaaagtgcagtgttgatgttatctcctggtcactgttaccaactccatcagaggaaggatctgattcgatatacctgtaaccattttgacctgcactcctgcagagtgacaattcccaatcgcctccaccacctctggccgcagcgggtcatggattccgaatgctccaatccatgtgatctccttcaatatctcgctgaaattgggggttctcttcatgttcggcggccacgtcgaaaagtcccggtaggcaattcctattgttcgaagcgatgctcgggcataggagttgattctacagagatcaagtgccgatcactgtcagagatctgcgctggaacacagcagcccctgttgggcctggt

SEQ ID NO: 5258 - DNA, 3799 bp, Emericella nidulans
tgcccaaagcttgcttcttcttgtgaatttgagctcttctggatctcgtcatggtcatggctttccactcagacccgtttctgccgcactctgcagacagctatacaattaacaacatgcccctcgtcgcccagaacccggtcccaagggtaatccttgggttgatgacctatggtaaagacgagtcgaaaggcggtcgagttacatcactagaggaattcaacaagcacctggattacttccagcaacaaggcttcaacgaagtcgatactgcgcagttgtacattggaggaacccaagaaaggttcacggcggaagcgaagtggaaagaccgaggtctaacccttgcgacaaaagtctaccccgtggctcctggtgtccataagcctgatgttctccgcgagaagttcgagacatctctgaaggagctcgggacaagccaggtcgatatcttctacctacacgcagctgaccggtctgtcccatttgatgaaacattcgaggctgtcaacgagctgcacaaagagggcaaatttgtgcaactgggattgagcaactatactgcttttgaggttgcagagatcgtcactctctgcaatgagagaggctgggtacgaccgactatctaccaggccatgtacaatgctatcagtgagtttatgacggcaattgaaccggacgagttgttatcaaactgaaacatactgacgtattatctagcgcgctcaatcgagactgagctgattccggcttgcaaacgttacggtattgatattgtcgtttataaccctttggctggcgggatcctctctggcaagtataaaacgaaggacatccccgcagagggcagatatagcgacaccaccgcaagtggtagcttgtaccgtagacggtacttccgcgatgcgacgttcgaagccttgtacatcatcgagcctgtaacgcaaaagcatgagcttacactgcctgagacagccttgcgttggatccaccatcattctaagctcaacatcaaggacggtcgagacggaatcattattggggtgagcaacttcaatcagctagaaagcaacctcaaagatgttcacaagggtccccttccccagcaggtagttgaggcgctagacaaggcgtggttggttgcgaaagcgaccgctccggattactggcatcttgatctcatatatacatatgacacccaggaagcattgttcaagcgaaagtcgaaggcatagacaagacaagagatataactagtaacttacatataatacaccccgattttgaaaatatcggtcatcaaatgccatatgagtacgtacaaggggcaaatatgagtcacgtgaaaggggtgacgattcactaaccaaaatcgagcgttctaaaccggtcttagtaagtaatcgtcacaggcaccgtggccaggcagctgagtggcacctgcaagtctccatctccatccatatttagcccgtcccccagaacttcttactgctgcgctgtccactactactcttgcgattattgcactgactctttaacggtcgatggagatctgctgcatcgtgaccatatttgctgattcaatggcgatttatgccacctaacctgtctttcctatttggttctttgtgaatttgacggccttcgtgtcctcagtgttctccgacccttcaatgcgactctgttcatggcgaggaaggagttcttgcgcccttcgctctttggattcgtgacctgctttattctcgatatttatatcgagactaccaacacaaggtggctttaggcggcgaggaaccgtttgacggtgacgcgaggagagactcaagtctggctgtcgaatcgcgcaactcaaatgatattgagatgtctatgactcgcacaagctcgcatggaccatttgatggccggacccatcaaccgttgatcgacgattagcagcatggacggatctcaactggtggattggggtacagggacgcagaacgcaggcctatgcttcaccactcgagacgatcgacaatgcgcagtaaaagccctgatgcgcttgcgaagcagcagacccgccagaagtatcttatagcttcgggattcttgctgttaagcttagcgagttttgtggtccagacggagacggctgtttacattcagcatgatctggggtgggacaaaccatactgcatgctgtaagtaaaaaaaaaaaaaaaaaacctaaaaaaatttaaataaccaaataaaaggagggattcgttctttgctgattattttctggacgattaggtatcttacgcatggttcttggtttctactctggccggtgcaactcttgatacttcgatcacaaaagcggaagctcctctgggaagcgttctggcgtcgtcatatctatctgcttcggacaacaggccgaatggtggaaactcaggatttacatccaacttcagatactcgccgatcaccggttccttacctccttaagacaacggcttttgtgacgagtgctcttacggtagctggcggttcatggtatgtcgcggtcaatttgacaactcccagtgacttgacagcgatctacaactgctctgcctttttcgcctatgcattctcgattccgcttcttaaagaaaagctgcggttagataaggtcttttcagtgggcgtggcgatagtaggggttctaattgttgcatatggaggtaaagacgacgggaagggtatagacgacggagtaaagcatgaaggagggtctcgattcttggggaacgtcatcatcggtatcggcagtgtgttatatggcttaacaaggtgctgtacaagagattcgcctgccccccggaaggaacaagtacgggcccaagcatgatgttgcccaacgcgtttggaagtctcattggatcctttacccttcttgtcctctggattccattgcctgtcttccatattcttggcattgaaacgtttcgctggccgactggcgaggccgcatggatgcttctgatatctgtcattgccaatgctagtgagtttccccctccccacacaggagccctggcgcgccagtaaggaaacacatacgactccttatggtgtatggcccctgacgcgagcaaccaatcgctgacaatgcgcctcgtcccctgcaacagccttctccgggtccttcttagttctcatctctctcacatcgcctgttctctcatccgtggcttctctcctcaccatcttccttgtcgccatcgttgactggtttcgaactggccaacccctgcccatggcgtccattctcggcggtattttgatcatgatagctttcttcctcctgagctggagtacataccgagagatgaatgaggaacgcaagcataagattcaacaggacgacgttgtttcggaaagcgatgaatagactaatctatactacttcgtctagaatgggctggttggaaattacgttccctgcataaatatatatatatatatattcggcgcggcttttttttttttttttttgctttgatatacgttgattgggtctactcgaccacaagcataccaggtatataccattgaggcgtttgggttattgctttgctgggttggagttaatagctttcagtacaaattgatcagcgactcttctatgtgaacttgggaactgaattctcgttgcaaaccccgcctatgaggtattccacagtacattagatggacagaaccctttatagaaagtagctactcggccgacctgatacaaagtgcctgtgccgaagatgctatatgtatatccacaagaaag

SEQ ID NO: 5259 - DNA, 4512 bp, Emericella nidulans
ccttccatgggccctgttgccgcggcgttgctgacgaggacgtcaattttcgcgatctcgttatcgtccttagagacagacgtgatgaaatcctcgaacgctttatcgacttcttctttctttgttacgtcagtggatgccacgaagacatgcactccttgtccaaactccttctcgattgttctcttagtgtccaaaaggggctgcatgcgtcggcccaggagagcaatcttggatgctcctgctgcggcaaaagaacgagccgtttcggctccgatgcccgttccaccgccggttatgaggattgtcttgccgcttgcagagagttcagggcgtgtaggcgagatggaagcgtaggaggttgagtgccaagtacgagtcgcggagggaaaggggggcgccattcttgtggtagggtatgcaactcacttgggaaattgagagcgggataatagataataagatctggtataaggccattgctgatttatagacttaagcggatttgtgcaatgtgtcaatagtgaagctatacaaagtgtaccgcccgccattatcctaattagggctaacagttgccgtacgtcttgctgacaaatgcctctagcgtcttgtacttcccgactgtactccccgatttctctttcagtttgaccaggacattgctattgaatgactctacaatggctggcgaccaggaaatacaatctgttcctgtcctacgctgcggactctgcaataaaccgtttgataagcgtgcgtgcctacacccgccaacccccttcgagcgacttgactgacatcacagctagagtctactctgaaaagacatggatactactgccgctctcgaagagccggtcctacagctaggtctcggtcttgcatttcgtgcgcggggaggaaggcccggtgcgacaagcggtggcctagatgctcgcgatgtgtggccagagatgtggagtgtcaatacccaacaacgttacatctaagatcaaatgtcatccgatccagaacgagcgtcaacagggtcccagcttcatttataggctcaccatccggcgcacgacacgatcaagaaaataatggcaggctcgatactctcgctgctgcggagtctggtctgagggtgctaaatcccgcagaggcagaggaagatgaccttcttaattgggatacctatgataataatttcgagctcaactttgcggatctggaattggagattctagaccccatcctacaggcgaacaggacaccggtctaccaagcacgcgatcctcagatatcaataccgccgcccttagctctcccacgactccttacccgcaggccagaatcaacaaccggaggaaagcaaacaacgcatctcattttgcagacactaaagtcatacctccacatgatgctgcgggaaaacatccttccaccgtttatccacacacattcattacctcaatcattcagtgtaaattcccagactgcccctgattacagctcaatgggccctctagaagtttgcctgaacatattggacaccatcaagaactccgcgagccaaaagtcattctggaaccatgtccgcacccagtgtgagcagctatgttcagagaaacatcagcagcttggtagatgggagctgctaggcgcaatgcaggctctcggtatatatatcttggttaggctgggcgagggggagacagatgaaaacaatatagacttttcgttgttggccggtgttactgtaagttcttgtcgtccacccccccccctgctgctgcttcgtagggttcgctgtgggagtggtagtaatggtgtccaaccataggtacttgcccaacagcttagtggcatccacgctctgagtgagttggactctccgctcagcgatgggcatggtctcgatgcaaattggaacgaatggatctttgaagagtcaaggagaaggtaaattccgcccagcccactactcctgttccaaaataaagacagagactaacatttgaagactatccatcatatttcgcatggtcaacatgctcacctacttccagccagcgcgcaggtgcgatcttccaacagatctggttctcgcaccactgccagcaaaaaaaccgctctgggaggccaacaactggatcgagtggaagactgaactacaaaaggagccgagactccagcaaacggcctttggactggcgaccaccggggagctggtccggctgaacaaggtctatggccagagtggtccaatatctcatctagcgttggatgcagcgactgtgtcaaggaatgctgccagctgggaggagtggtgttcaggcatggacgggctcggggcccttgtcatgcttgctgcttcttcgatgctttgagctctggtatacctggaactatgagtataaccagtgcttcctcctcctttccgtaatgagatcccaccttaagtctcaaggaaaaacagcagctgactacctgaaccctttgagtatgcccaagaatctcctggcttcctgctcttgatggggcaaatatgaagagctgaagccccattgcaccagaggctagcgatcattatattgacaatttggccccaagatcgagtttatgaacgaaagcagaaaatctattataagcagcactctgtacttcaatccccaaaattcgatgaatttctagagagcactttcagagcataatgcgggtacaattgtacaaccaacaacaatcgaacaattccacttatatccctgcttattcatctatgacgaatgtgattgtgtgacagaaaggaagagcccgagtcagacggcatacgaataactggaagagtccttaggctccaggatagatataaaaagaaactgcaggaacatggtccgatttcgcaaagcgaatcaggtgtactaccgtcctacagtacagtgcgggcgccacagcagaaagtggctgtgctccttgctacccagtcggcggttggcccagcgacaggcgtggggcgcagtgctcgaccacgggcggccctcgattcgacgcgctgacctggggacccatggatgtacatggaatccatcatcgggtgccacggtgagcgaaaggactttcaggggatcgcattctctagggatgttggagcattgaaagcaacctcagacgcagaagtactgtgtggggtacatgtgatacgcctaactccgatatctgttgagcagtatgcatcctacaaagcctccccattcaagaccatagccaactattttcagaattattcagatcaagatttaggcttttgcgctgccccagatccaggaaactaggcatctttgaatatctgtggcgcggcgctctcactccacttggcgctctcgttgcccccatcaaacaacctggaaacagccgtgcgtcctcttccagcatcatcgtcgtcatctcttttttcttttcctctattctgcacccttacgacattccttttcagttggtcctcttactgtcgacactccagaatttctgccgacaaagctgggatccaagctctgaacttctgtcgcattcctcctctacctcagtgaggaatctcgaaggggtcgcccattattggagcgggctgatcgctcgatagtcggccgccaacatgtcctataatcgcttgggtcagtacacaattaattttctcttcttgtttctgcttagccatactgttctgcctgagctcgcattgcgcggctcgcctacattctcggcatcaaatttcccaaccagttctgaaactctagctcccgacgaatcgcgacttcagtgagggggtcctacagcagattcgtactaggatcgtagcgcgagcccctggctcttcctcagtttcatttcgttattagtttacatatggtcatctcttgtggttgctcttcggtcatatagcagttactcttgagcatgcacgtcatcgtccgctcaattgacatttggatccaggagacccctacggggacgaccgcgacgctcgttcccccatcatgaatcccagcagcttgagtaaccgatcgccttcgcctgggcgaccgctcgacggctaccagctctcagatgcgccgtacggacatcaccatcacatagaaatgccctcgagtgaccgattggccgaacaaccgacggtaagatagtcaggaactggggcggtagatatggatactgaactgttgtgcgatagtattcggtcgagagaatcccgcagtcgtatggccacaacgaagcgtatgaagcgcagaccaacattatccaggttacgagtactcggtggaccccgaagcacaccatgacgcttactatacccaaccataccagcctacagttacaccgggccatgacgattatgacctcggccagtatccaggacatcagcattcttaccaggatgatgagccgatcctccaaccggaagacccctttcaggcccagaacccatacagcgacgactaccaggaggacatgacaattgccccaacgcctagt

SEQ ID NO: 5260 - DNA, 2535 bp, Emericella nidulans
gcccgcggtatcgcaaatgcctctttctgacatgaggccggcctccaaccaaccagcaaccctaaaggtccttcctaagattcgagagacgcgtacaacaaagcacgagaagcgtctgaaacggctacaagcccaatggcgtgaagacgaggctcgaattaaggagcgcgaggcggcggagcgagaggaaagagaggaagagatggaggaacagttgcagctttggaaagaatgggaggctgaagctggtaagatatagaagatgtatggctctactgctgatgatgatggccctgatccgtgggcgaagttgaagaagaaaagagcggctgtgaatccatttgaggttgcgcaggagcctccccagctgaagaagccgagagaggtgtttaaagtgcgcggcggcgataagtggacgttgccaatgtgccttcttctgtggggagtttgaggaggcgtgaggagcttgcgagtgagaggaggaatattgttgaggagtatcggcgcctgatggcagagaagaggggggcataatattgatacccaggattactctatatctacgtatcaaaatcaataaacctagaggcaatagaaatgtggaatggcttttgcatttcaccttctatgaagaaagaattccaggctattgatgtttttatatacagtacagaccgacccaaagaaacaccatgatcatcaagaaacattatgcaggatattattcctgctgcagggacttgacatactccgcagccttggccttaatctcctcgaccgttttctcatcacccttcttctcctcaaaatcaagccatttcttgaagaagaagcgcgcctgtttaggtttaagtttcttaccctcttcaattgccaagccaccacctttcttcacttccttgataccaaggacgcgctcaaacaaacggcgtacctgctcaacgtcgccgtttttgatttccaaatccagaaggacgttccaaagatcaacacgcttggggaaagaggagagtaggccctcgaagacggtgcggccacgttcaacgtcgccattgggagagcggaattcgagctgtgcgaatttggatgtggtttcgacgtgcgtattcttggggagggattggagggcgcgggaaaggaggccacgaccgcggtctggggcagccatagtgtcgtacaggaaggtggcgtagttgataaagaacttgggggaattggggaagaccttcttcttgagagctgtcttgaagagctcgtctgctttctatagctgggctgttagcgttgctcggaaaggggtaagggacatcaggagattcttacctcgttcttgccggactgtatgtagatgctggtcaaccgttcatagatctcctgcgtatcattgtattggcaagcacgcttaaagacttcctcaagggtgtcatcgtcgccgtatgtgttctccaggttcagcatagccacccagatgtttagcttctctgtgtcttggccaatggtaatggtacggagagcacgttcggcaatctccctggccttctcgacctcgcccagctcgagctggaatgccatgtatttcagccaaagaagcgaagagttaggctcaccgagcaggagtcgttcgtagtcggctacggactgtggcccgttagcatcgagctcccctgtacggtcaaccaggatttcaggctgtcggtgctttctcttcttctgtatgcccttgtcctcatcatcagaatcggattgcatggcctcatcttcatcgtcctgtgtgttgccattccaatcgaaaccaacggcaccaaggccaccctttcgaatcttattcgtaggttcatcaacaacagcatcaccctcttcttcctcttcactctcctcacttccactttcatcttcaagatccattccgcccatggacacatcactgtcgtcatcctcatcgctttcgccagattcttcaagctcaacaccgccaaaactgtcaagactgactccgtcggaatcactatcttcatttccgctgctctcatcctcggcatcgtcattgaagtatgaagctttgagcccgaaagagatctttccctggtcacgatccaccttaagaacttttgccttgacggcatctccttcctcgtacagggtcctcgcatcttccacgcgagtatccgccatttcggtgcgatggcaaagcccactgacattggaggagccgtcaatgacaatgaaagcaccgaactgctccactttacgaacttttccagtcacgatttggccaggcttgaggtcataaagtgttataggagccttgtagcttggatcaagaacagagtccttaagactcatctgaagctttttgttctccgggtccaccagggttactcgtcctttgacgagctgaccaacctggaacgaatctttccactctttcaaataggagtccgacaggtccgaaatgcgaataaaagcgacgatattgtgaccaacggtcacaaacagcccaccatcggaaacttgtcgaacgaagccgcggatgat

SEQ ID NO: 5261 - DNA, 9412 bp, Emericella nidulans
atcacctgctagggctgaaccttgaccaagctagacgaagcgctagacttagtagagttacattggcatagccacagaaacagtcaaaactgggattatagcatgagtcattatggctcataatacccaagtctgacctagaatggctgtacggtattattttgaaaacgcaatcaaaatggcttactgaacagtcatatgtctaccttcatgggaggggacgcaaaggtggtgaggtataatgttaagtcggaacagtccgaattagggctaatgtggagagcgccaatcagcggccgtaatatattggttggggtatatagtaggtatgcagtgcaccagatgtcccggctagtcgaagcccgtgaattcctcgtctccaccttcctctgcgtccttgtccgctttagcagctgcgcgtttcagccgcctttgctcttcattttttgccctaatttgctcgagcatctgctctgtctcgagagccttcttcttctcttcctccgtcatcttctcccaccgcttcctctcctgccgcacctgtttcatgtcgcgccgtttggccttcttgtttctgttctcagcattgttgctccaggccacagtctcgttcggacgcttcttgttcgttgtttgttgttggccagattccgccatctcttgtaggagctctaagcgacgcttcctcgcgctgcttatccttgtatgcgtacgtatcccaatccatttggacaccaagagttttgtctcccttgaaatttttcaattcgggcatcttcggcagcttcagtagtccccacgctttccctaggccctcccagtccaggtcgcgacgcggaaaatgctgcttgcttgatgtttgctgtagctccttagccaactaacaaaggccttttggccgcggtcatggattgcgcggtctgcctttactactttccgagcagtttctgtagcggcggcggcttcggcgtcggaaacagtgatggggtgcggaaaaggcgcaactggggtcttccgtacttctaggaaggagacgtaatcttcttccctgcccggatggagcagaaccacactaagacctctacgaccgctctgccggcacgaccgcatcgatgaatgaaggtctttgggtccgaaggagggtctatctgaacgacgaggtccaccgacggaatgtccagcccgcgggaagcgacgtctgtggtgagaaggatggccgggttgtgagcgttaacgaaacggttgaaattcttttgacgcacgtttgcagggtgttttccgtgaagaggtattaactggaaatcgttgccaagtatcaacgggaggatgacagataagtagtcgacacctgagcaagttgacacgaagaatattgatttggagggcgtcggttgcactgaattaagaatgtgctttagtgctggaaatttaccggttggtggttgagtcaaataggtcatttgaaggctgcatcaaataagtatatgagagtatagaagggtaaagaagtgccaacctggcgggggtacgcttgtcatcaactcccgacgcccccttgaccttgaccacgaccttgacaggattacgcaggccgacgcggacaatctgatcaacagcttcgcttacactagcactgaaaagccccgtccgcctttgtttcggaagtcggcgcaaaatgttctgcagtgtttccttgaagccaagatccaacaacctgtccgcttcatctaagacaagcatctcaaaggacgattgtgggcagtaaacgtgcggggaggaaagcaactcgagaagtctacccggagtagccaccaagaggttcggagagcgcttcaaaaaggtgctcagatcttctgcaggcgaggtcgagcctccaagcaggagctgcggaacgactctaagaacggaggaagagtgtttaggccggggaacgtcttcggtttcggaagtgtttatcacagccgccgaagcgggatggaacgcgagtagggatgtcaaaacgttgtagatctgcgaacggagttctctgcgaagagtcagcatggacatctccattagctcgacctgctttaagccaaataccttgttggagaaacgatgatggcgccgacatgatgcttcttgatgggctcttcaaggcgcaacaacttctccactactggaatcaagaatgaaagagtctttccgctcccagtgacagcctcaacgacaacatccttgtgagccataaatagaggaatggccgatgcttggaccggtgtcatgcgggtgaaccccatcgaggagacagcgtcaagcacccattccgacagcggaggattcacagcgtcccaggctcgggacgatgtccctgacggaggtttcggtgccattgtcagattctttggccgtttattctccgctggtctctggttcctgatggtcaaaaatcgaaggaatttttcttatcagtagattgcgattagatagcgaggcggtgagtttctgctgcgtgatgcttttttgatttacacgtgatgcacggggttcggcggaaagcaagaagcgcgccgacggcctgaattttgaggtcagcagaacagtttgccattacttgcctggtacaccaaaacaacctaatccgaaaaaagatcacctgtgctgacactctatttgctcggttcgtgcacaatttgacggcaatgcgcggctttgtctctgccttgtccctcagccctcgccaatcttacgcctaaccatcggcccttaacctttgcttcccttttcgaaggacacctgcccatcattccgtcctccgaggcaaacgatttattcataccctgcgtcgcaggttgcagcaattggttcttgcacgaacgccctctttccggactgatcgccgctgcggcccttccgcccttctccgtcagaacggcccagatgtcgtcggcgcgaagtcctggtgctgttccttcgacgccaagggtcacctctccatcaccgacaccatcagaaggcagaacctcgtcgagatcgcgggatggatattcagcgcccacgacgcgctcggcagcccgacggcagcagcatctcggcgacgtcacggaagagacaacggactcttcaccaccgcgatcccgtcgacgcaagtcaaagctcaagcagcctacatcgggagaaccattagtggcgcggacaaacggtaatgcaccacagaagaacggatttctttccccattgccaaaagcagacggcacaggactcgtcgatagcgtctcacgatctccttcaccactcggcctgattcctcttcacacccgctaccgtaccttcatacaccgccatgagattccgcgcaaactgctccacgtctcgattggatttctgacgctccatctatacagccgcggcattcaaacacaccagatcacaccctggctcttcggagctcttgtgcccatcgccgcgacagacttcctgcgtcaccgttcagaacgggtcaacaggttgtacatccgctgcatgggtcggcttatgcgcgaaacagaagtgtccggctacaacggcgtgatctggtacctcgttggcgcatataccgtcctccgctttttccccaaggacatcggcgttatgggcgttctgctcctctcctggtgtgatactgccgcctccacctttggccgcctttacggccgctatacctttagcttgcgcaaggggaagagtcttgcaggtaccttcgctgcctggctagttggggttgtcaccgcggccgccttctggggctggttcgttccctacattggtacctttcccaacgatcccgaggacgcattcctttacacaggccgtctcaatcttttcccagatcccgtgaagcgactcattgggtggacagtaacatcaccagacaccgagtccggctctgttatcaccggcccgctagcgctgggcgtcatgagcgttgtatccggccttgtggccgcaggctctgaatttatcgacttcatgggctgggacgataacctgactatcccagttctcagtggcatcgggctctggggtttcttgaagatttttgggtgattattcctgagttaccagtatccttaggtagactcccggcatgtatttcctcactctcattgctctcatttggttatcctttacgccgtcttcttacacccggatcatccgctccagctctcacattaccttcctcgcagagcataacttttgcttatatatcttcttcatgcatgcatacatacatttagccttattcccataccacttatgctaataccacacctactctctattctccacctgtttctcatatttctttctctataccatgataaaaaagaatagaaatccacggaagaagagaaagcaatgaagtgttctgaatattgtattactaccactatctaaaaggggttgtataggatatacaatagattaaatcagaacagctgaagtttagcacacttaaaaatcaagtcaaaaagagtcaagttccggaaccctgtactttatccaaagcagcaatatcaacaacaaaaatagagctttaactccacgctggtcgagtattcacctcgcgcctgtgtggtctaagtcttgatcacatggctattttttgttatagtggatgaacataaacaagaagaaaacaaggagacagaataatagacttagaaagacaggtggatgcgaaatataaataagtaagcccagcacgccaattcaacccaaacgcctatcaatagttagaccaacaaattcctcgcatcatgtatccctgtcccagtaccaagtaacgccgatgacaacaaccagacatggatgcaatcatccagtcctcggtttcttggcgcgctcgttgctctcgccgtcttttcggagggggtacagatgcatgccaacttcagtgggaaagtcgggatggaggaggctgaatcgattcgggttttgtgggatcccattgatctccgctggagtctgctcgacgaggagctggataaggtttctgtcaacatgtcccgggggcttgctcgccatcttgtccatgcgattccaatcgtcgtccacctcctcgttcatgagcgggggcaatggtggggcaccactgttgctcggtcgggcgtggtagttggctaaaatattgtatggcaaattcggacgaacagctggtttgtcggaaagctcagccaacggattcagggcatgattgccatgtgttcgggtcgaccgagtagcatggaaattctggctcgcggtccgcgccatgtcagtagcaggggtaccgttgtcctctgcaccggtgccatccacacctgatgcctcttccgcgtctgtgttgtttccatttgtcactgcgcctgagggttgatcggcgcgcttggatgtagagaagaaatgaacggtggcaatatgtgcctggttagcgtgcgcactgagctctttctccgtgaagagtgactgaatagagtatgttggcgcaagttgctgctgggctacctgggctttcgcgcgctctgccggagtctcccgaaccggtgacccaacatcttcctccggagctttcctctttctcttattcaaatgttcagtcatgataccattgcctaactcatccaaatccacccgatggcgagtatgtctagttttgcgattgccgtgaataccaccaggactagcgggattcgtgatgctaaattggttgggatggaggagtagggcattggtgtccacgatatcaagctgttctttttccctcataaggcgagcccgtttgcctgacagcgtctgcacaaggcgctcccggagagtcgctgagaggttattatattcttcttccgcaaaatgggcgcgaaacgcatattctcgctggaatctctccagattgttattatggcggtgctagatacacaaatcagttagcaccgcgttgaagctaccatacacaaatggaaaagaaacttacgaccagcatagccaggtcagcatctctctccgccttgacctgattgacctcctgcacaaatcgagcataccacatacccgctaagctagccatttctctagcaaactggccgccgccaaccgtgctttcaatcaactgggcaatctcctcggccgaatcggggatcgggcccgggttatagggatcggcattgttgatgagggtcatgtcacattgaagagcgtgcaattgttggcgaaattgagtatcgcgattctggctgaaggaggccgtaaggtcgtgaagacgttcttgcagtgcactgcgccgcttgtcccgcttcgaaagtggtacgccagttggagggctgaccgaacggcccctagagtgcaaaccgttggacatcatgggagcaacgcctgaaggaccaggagaagtaggagcaggagagtaagccatggccgactgagccgaccgttcagcagaactgtcgtcacgcaagaaaagggtggtgaggcgctttctaggcgaggcagcactgtccgggacggataatgctatagcatgaatagagagcagctgcacataatacgtgattataagaagggcacgaaaaggcagaaatagaaggaaaagcaagcaagatcgttcggcgtttctgggatggggcactactggcagaaaggaaagcgggaggccagtccggccaatgtgccttagtgcgggtattatcttgaccgcccatgtgacttttacatacgatttaacgactaatcaaaactgaccagaagcgaatttgggttgattcatcatggtatacatagatcatgtctatcaaactattcactcatactagtggtcatccatccgtaacaataagccaaattgcgcgaaacccgggtattattcgtgtccaatgcatgtcaataacccactcctatatcccatcgtaacaccagaaaacgccgttccatgaagttcccttttgtgcagcctaaaatcacttctaaacaaacaggcgagggaatggccagttggttgagatcgttggttgccctgccaatgaaggttgcttagtgagttcggcgaatgacaaagataccgagctcgattccatcacggggctccatttcctccccgtatggtcgttttcgaataccctcaaggatttcactgagcaacatggcggacgtgacctcttttgtctccaagcggtgatagccggacgtgtttagcgacgtcgatttggccgctggaagacgacgactattttggtagtagaggctgattacctccttcattcgagccttgtcttggtggatataccactctgaccaaagcttgcgatcaagacggacgctacccttgcgagcatccacaatcttgaactgcgaggaggatgagcttaaagaaccacagagctggtcgaggttttctcgcatggtgtcgaagtcgtccatgtgagcgaccgctgaaaccttgccgagataccgactaatctctgctgataattcgtttactacgacgagctgtcgcagcaaggggtcgaggataggtccaagatactgtgatttgaaagtcgaggcccctcttctggtgggatagataaaaagcattgatcccccttccggagaaagttcgctcaatcgatcaacaagaaaggacggtcgggtatgggaaaagaggtctctatactcttgggacgatgatgggggcaggtagcgttcgagaacggagatgtggacactgaatggaggcacgatcggcatcgggaaatgcggcgccttggtctgaatcgggccgcggaagtcgtggtacgcagaaaccacggcggcgctggaaaagacagcagtcggtttaaaataatcatcgctggagaaagacgagtgaggtgtgctgggaggagaatgcgggaggttggaaagactgaattgctcggggactgcatgggtgacgttgatatatggcgactgcccatgctgcaaatggtgctgcaccgcttggacgagtgagcagaagacactctcattaacctcagcgctgctcggtttatcggcagggcaggggtatggaagcatctggtagacaattttggcggcttctcctcgtgcatttgagaatggcagagacgagactatggaacatatattaatataagcccaccatgacgcaagcgaggacctacctatggtctgtatgctgttccaagccacgagctatcgtcgcaatccatctcaccactcgaggactgcggactcccgctagaggttgaaggtgatatattatcagacgggctacccagggtatctgaatgcccccttccagaaaaggtatccatgtttgggccttcatccatgggcatgaggcccgggtcccggttcacatgaggttcgaagagcagcatattgttttgcggactccaggcaatgtgatcgtcgtcctcggcaggcgttgcaggcaaggttgaaggatagtcgctcttgtccgtcgaatcccacgccgtcgagtcggagtcggtggttcgagccgccagcgaactcgaaacggtagaaatccgaagccgggagtcggcagagtgtgtacggaactcggcggagcgagaatatgattgtgtgacggagccggtggcgtcaagggacggggggtggagagcagcgttgctacggaacaggaacctggtgactgtagagggtttggtgatcaccgagccttgcgacgcccgacgcttgagtcgacttgagcctccggttggtgttaaggctgctggcgtgcgttgactacgttgacgggatggggttgaattggacggtgatagtggtcttcgttgagtgtatggctgatcgagcggattcacgattgcccgatgtgaagaaccgggttctgtggatgcatctgacgacggatctggcgagaacggtcgcgaatgcgaacgcatgacagggttatatcgcactgttgttggggcaggcagacaagggccataatattggggagaatacatcaagggtgcgtttggatttgacgggcaacaagcaggcaaccaggatgagcgctcccgagatccggacaagaacaaggaatccgccaggtatattgggtcgaacaatgggagaatgggagaatgggagaatcgtcggtcgctggcgatttggcccgttgagagacgaggatcgagccgtaagagaacgtgcctggtgttgagggtgctgaggatgctgagatgaagggagagggatgaaaggaaaggaaaagggcagcggaggaagctgccgctaaagccgggcagaagaggtgagagtgacgctgatacagagtgagacggtggagaagagggagattggaaggaaagagaaatttgggacttgagggcgagcgagtctgaaaggtctagaatgggagagcagccatcgaaggcatgacagagtcgcttggccggcactcgttctagaccgacgggcggga

SEQ ID NO: 5262 - DNA, 6248 bp, Emericella nidulans
tttccatctttctgatgcggagaaagaggtgtattcgaagctgccggtgctggtctatggctgctaggtatggccattcttggatttttgcaatgctctacttacaataataggcgagctcattccaccgacatcctccggagtactgaaattcaccagcactacctcattcaaaaacacagttcgaaccgcgactggccatgagatctccgttcctgtagaggaccagtcctacgcctccagaggactccaagaagatctaatagctgccgttcgtgcccgtctcccccagctcttggacaatgaccggagaccagattactaccggctttgctgggacgcgatttccgctagccaacacccgctgataacaggacatcctgatccgcggctagcaaacttgtacttcgccgttggggggtcgtttcatttctacaagtttctgccaatcattggaaagtatgtggttaatgtcctggaaggcgttggaaatggaccagcaaaggatacagcgtggtcatggaagtcagtagaggagactgggtgtggtgtccatgagagcctggttcctaggaaggagctcagggactttttgtagattttcaacacaatcacaaccgagtctcttcatgcaatataacctctgtttaactatagccagtacacataactgttgtaatgagcttgagtccgaccattgtctgcagataatgggcaccctcaaacaaaacggcaagatggccaaggaccaccagtgccaggtttgtattcttgccacctgctgcatccgaacccatctgtctctggatttttgaggtcgttcagagtccaaaagcacgaggtatgccatgaatgtaaagcagctgttcggaacctgtgctgttacctcctgtgaggacgagaatgtacctggtagtttggcagcttttttatctctgcgattggcagatcgcggctctgggaccgtgaaaaaatgaacaacatgtgtctggaacagcagacggtcttgatgtaggtatgaaatgctgagagtgagcatattgtcaaagtgatatgctgatatgctttatgatagttcatgatttcctcctgtgggatacaggtgagattccccttccatcctgttctgccttctatccaatgtcaaaaccactttcctccccatctatgacccttcattccacaaagacaggctcgcccaataccatttaacgaccccatcaacgtacttccatggtcatacaccacaatgcttgcaggagaaatgaggagattgggctgggaaagagtgtgaggtagaccgataggtgccggcagattgccaggtgaagctcaggtctaccatcacgcgtcgggccgtagtacgactgatgctgcgtagctatgcttgggcgttgttggtactattggtgctcatgctttctcgggagccgacaggtagattgaaagggctagctttaaaatgtgtgtgtacgtgtgtgagtgtgtgagtgattgtgattgaccacctatcgtcgagcatcataatgctatgctggatgttgctggatgttggtagcttctgttgggtagttggcctctaaagatctggctccagcactctactcgccctatctgtcagacttctctttctacctcctcttgttccttgctgtatcctgctccttgtgggatcataagcagaagagtccggttatgtttgttcgttacattgtcctagtctgtgtttgtgtagagaacatgtaattgaggggcataggcagagaatgcagcagaagattattctgcgtataaaaattcacatctagacaccataccgacattatcatcacgaatatagccaataagctgctacaggctcagcctagccgtgcaatgctagcagatggagggaaaagccggtaatgaaagttaataagcataaaacaacaccgactcatcattactcctccggatcttgcagttagcactcataagccagaatctcatggtccaggcaccggcggcacaggcgattgagaatgcagcgctcgaggacatagcgattgtgtagcgcggttcatcggaggagggccagaggtactatgccgagttactgttagaagcatatctaatatataacatggaggtaggaacaaaggtaaagtgaggagtggatgagcaggagaggacgcactggagtccatatgaacgagacattcgcgcaggtgttgacaatagccagcgccgaggcttttttctctttggtttgcccgcatgtgctgcttacccagccgagaatgatggagtttactgcattggaaagtggttagtataaatggaactgccctagaggtatgagttgacacaccagcataagtcccaatcgcaaaaaccaccatagcaaagtatctcgcaccggtattcagcgtcgcgcagcccagcacaaagccaaatacggcgactgccttggcgctagtgatatgccatgtgggcccaacgagttagaatgcgacgtcggaggaagtaggctctgggtaagagggggagcaataaactaaggcgtgtagaaatcaaaagtccaaaaaatcctttgacttccatatggacacgggatgaggcgatctccagttccaagccgcacagcctcgtaatacagagcttggctgacggccagcccgaagaaaaaccatgcggactagaacacgtccgaaagtggagaagtaacctccgccttcaagctatatctatttcttggtccccagaaaatttgactttccctttgttatgtggctgatgccaatcacgccgggcttcttggaccacgataacacaatattgccaagcggaaacgtagtatgcgggaatttttgctccgacttggccggtacatcctcggattgaatatttggcccctggattgccagaaggtgctgtcatggcgaataatcaggagggttctgttcggcgggatctatgcccggcggagcaagctcgttcgatgtctgtttgatgctgtcttttgagctctctgatatctattagccatagccgccaatgtggcaattgagcgacataccatcttcgatatcctgcaagcggggccgcagtttcctgtcagaaggcgtgctaagccggcaatcaacaactctgtgtgttgacttggtcgtagtgatatgcggggaccggcattcgcattgtaaccaacgatatcgcctccaccatttggggtttccccgcgcgaaggtgacaaggacccagaaagattggcggtttggtaaccagcgtttgtaagcttgtacgaaagacgagtagatcgggggccaaagcaacgtatgatggtgtagtttcaggaagctcgataacaactcggagggtcaaggcggccacatcccggtcgaagggagcactgtctgcccaaatcccgcgacgtcttggatggaatactgatttgttcatccatcagaccaccaatgtgcttgctatcagctgattctcaagctcctgggatggaggggtgcgggtggtatgagaaaagatgccggcaaccttgtggagttgtaaaggactcgaaaatgcggaattgttaagggacagctagagtcagctgactgacctcctttaaccacctcatgttctcccttattctgtcccgtatctttccatccttcacctcgcgaattctgagttccatcttgatgtcgtcagccactgcataccattactcgaccaaatcctccttgatcctacctgggtgcccatgtgttgacctggagaatgaatgaagcagaacgaaatcaagccgagtagcaagaatggcattatatctcgattatacaggcatgccagggttaacggttaaagcgatccctctatcgtcggctatgcggaactatcgtaccgctgataaccgcagcgtaggactgatcttggttgtatagacccaaggcaatcgacccaagattcgtgagatgacggaggcctagctagtggtgaaggctactcttctgctacttcaccattgcagattcctccaaagaagccggaacgccacgctgaaggtggctgacggccaaccgctttgatgtactttcatcgtcatcaaatctaccaaggagctcccaaaggttggtctcttcatttatgtgatagcttcatccaggttgtttctgaggttgtttatcagctcatgcaaaggctaaaagacggcaataggaatgtccagctttaactcgcaccgcttgaccaaatccttccagagaaacaagaggggctgcctaactatccgccaaaagatccccgttcaaatacttcaacccggaatcgcaagcaatagtgaccaccgtcttccccggcctagctcctttgccaatctcacagcagcaacgacattcagcccagtcgacgtcccgacaagaaaatgccttcttccctggcgagtctccgacacatagccctcgcctcgcctcgtcgatcccccacgcctcatcatacatctctcgagccaaatgcggtggcacgaaacccggtgcaatgccttcaaaaccgtgcacacccgcgccgccctctgaaatcacgggcaaagacgcaggctctaggacaacaatcctggtttcaggccgtttcgttctcaagacactagagacgcccatcagcattcccccactccccgccgcaccgcagaacgcatcaatcccgccgggaaactgcgccagtatctcttccccaagagacgcatatccgggcagcgcatcactgttatgaaactggtccgcatagtaaaactcatctggatagacgccactcgctctttcgcctttcgcatcattgctggaaacaaatccttcgtgaccttcccacctggagcatgaaagatttccaactaggcacacatcgtcctagtcttctcaattgcaaaggcatccgagctcacaacatgaaaacttgtaccctttcatcgcgcagatgaaggctagtgaagaccctgtgctcccgcctgttgcttcgaccactgtcatgccgggttcaagtctccgcgggcttcagcttcctcgatgatggacagggccatgcagtccttgtatgagccagtggggcttacatattcgagatttagatagacagaggcgtgcgtgtctttgtcagggatgatgttgcgcagctgcaggactggagtattgccaatcgccaagggagacgaggtgacgggcggtggcggctgagacattggttgagtttgttaagtttgggttcaaagcagatccagacctggaacacagcgtagaggcggacacttggagatgggggaccacggagactatctgtatatcacatgcaaagactagtgggctctctggctcacaacgccttgtctgggggtcggtgggcgtagagtagcgtgcatccagggcgtcgatgtcagattaatctttccttttcgtcttccttgatttcgttcatcattctcagctttggcgtcgattccttgactgatggtggggttgagccctaaccttgcagcgataacggcgataaactcttgatacattcttagtataggtgtcaacctcctgcctacttgtaagtgcatctgttatatttctttactactaactcccacatcaatagaccgttcttcagggcttatcggcgggagacaagctggttttaagagtctaggtcttgcatgggcgcgtcacctgatatacaggcctgcgagtaagctctacgaattgggtgcacaaatagatagggctagtacttaggaagctcatacataagcagtgctaggattgaggagctatttcagcggtaggtagctttagagagctcttctacaccacatataggacaatatagatggccacctcgactggtttttgcagacccaagtatgccttgcaagaccaggccccaatcttttctaaataatctcattccttccaattgatgaggtattcctgatagccatgtatttgtctagtcaattagtgttcggttcctgcacgtatgtgcggctcaaccagaccccggcaatgagagaccccgtgtcacccatccaagccctaagaaaccaccgagctggccctccatgttaagtgttttatatctgtgaacaccagtcatcacatcgagaacgatcaaccgctcgatccaatcaggctcagcaaatgtcacaagagccgatcacccccacaaatgctgagacgagccgaggaccaagaacggtccacgtgctattattgcggagtaggtactgtacctaagaa

SEQ ID NO: 5263 - DNA, 724 bp, Emericella nidulans
ccctgtaggatacagaattccccggaatcgtcgcacgcccgatcgggtctttcacgaacaaggcagactaccagtaccaaacattaagatgcaatgtcgacttgttgaagatgatacagctcgggatcacgcttttttcgccgaaaggggaagtcccaccgccagatgccaccgatgcgaatggccagccattaggaaatggcctggtacctgcaccttgcacatggcagttcaacttccggttttcactagaagaggacatgtacgcacaggaatcaacggcaatgttagcaaaagccggcattgactttgcaacgcatgagaagaacggtatcgacccgcttgaatttggagcactgctgattagctctggactggtattattggatgatgtccattggatctcgttccattccgggtacgactttggctacctgatgaagattatgctctgtcaagcgcttccagagaatgaggaagaattccataagctcctcaacatcttcttcccatcgctatatgacatcaaatacttgatgaaacacgcaacacgcaaccaagctgtcaatgactcaccactaactccggctgctgctcagatcatctccaatctcgggcaaaagtctgggcttcaggacatcgcagacgagcttggagtgaaaagggttggcatcgcacacaagccggatcggactccctcgcacaggggagattttctggaaga

SEQ ID NO: 5264 - DNA, 4229 bp, Emericella nidulans
attgcaattcctcctcacatcccagggctccccggctgtctgtccgccatccacccccagactctccttcttatacgcattctccaagtcctcacacgccacgcctcgtcctgtcctcttgaatcccatttgtcaccgaaatgggcagctcaaaaatggtatagtactcttctccttcccatagaaacgcttgatgcagagtgacattccactcccctctccagtccccgtcatcttcatcctcgtctccatctccagagccgacaaaacacctcggccaaacccagttgacgtgtttgactgtcgatcctggtccaaggtcgaggactggtccaacgtaacctgactctggatccgatgggttggtcccgtttgagatggtcaagttgcgttctatttcggtcgaagtcaggaaaatacttatgctatggaattctgtcgtcgccttgtctgcagagagggcaaggcggccgtttccggagacatcaattgcgacatgtagattatctagggtttcccttgacattagagaccgttttcctcggcattatctgggaaggcatacctccaccaagtggtgtatacggctgcggcgcatcaattattgccaggccgggggtgtagatttgaccgttgacgatggtgaaactcatgctgcacttcctctatgtctgcaagaatgattattcttctggacataggttcacgtaaactgagaagagggcccggacactgcgtccatttaaaaacttgccaaggcattttcatctccggagatgagttagggctggacatgggctccaccctgcctattaattaaaatgatgcaccccggtctaaactggactcgattcaaatcaatcccttgacgatcgagttaatgccagagtcgatacccctgtccaaaagcccccggcctttcccgttggcttgatccctgactgaattcttgagaattattcttaatgctattgatatcactattttcaggaccgtttcttgtgccaaacgctcatattcgaggtgatcaacattattcccccgtaacgactggagatctagcaaatattggtgtaaattcctgtgatgacatggagagcaaaatcgactccagcacggccgccgggtgatttgctgggcacgtcggcttctgtctttcccttcctcccaacgccaggcgtcatcagtttcccctgaaacccctaccctctgtgcgtctcccagagccagtgaaattcactgctgttaattggtgtagtaagacgagtatcgtccagacgtgcctcaagggctgtataccgttgaagcggcggtgaaggactagccgggcttatctgagtcctactactcccctactactctctattcccagtccagtcaagggggtctatcgcatagcacgtattgcctttaatgatggcagttcctaacctaggatcctgcataaaaggcagcctggagacgttcatgaaggtataatccacagtggagatagccatttatcattggttcaaatactggtccaggtcgtgggcgtaatggatcgaggctgagagccgtcagctggcttttccccatgcgcaaagacatgacgccgtgcagtgggtctgacctatagaaaataagaaaggcttgcctgtcacatactcaagattcagagacatattgacgtcctttactgatctaagtacgtagccaatattagagagcaaggtatacatagatgtccaaattcgcatttggttcggttctcctgagtccaagtttccagcattattagcaaaatctgccgtaaatatcactttgggcattccatgtctggcgagatctggctctcagtggtgcgtaggataggaagtgtgccatccagatgctgtcagcttacttgcattgccaacacaccagaaaagataaggtcgcaccaccggaggatttgggcatttatgttcattgcatattttagagacacaagctgagtaatacagtaaacctacgccaggagcttttattttctgcatctcatagacctatcaaggaccaggtcagctcagtggtttgaccttttgatggcagaaatgactgaacacgttctctcacatccgctataaatccttgtaagctgtaggctggggaccacgcggccatcacggaggtagaaggagtggaatatattttgcattcagtatacctgcacatatgcatatttcgaggtatacccacgatatcagtcttccacgttcccgccactaactttagaaaactaatcatcagacagcatgggcaccagataccagctacaaaagcgcgaaatgcgtacagtgtccccaggaagctcatatcgagcagagatatttgtaacgttatactgctgatagcattgccgattttcatcctggtcaaagaaaatgctagccctgacagcgtccattcaggagctctatcgagatgtgtcccacaatagggcactcgagacaatcggctgatgaactcacatgttatattcagagtaatcagtcgagattgaaattcagtctttatgttagccctgaatgctggggctgacgggttggatgtatgtgtagagtcctacagtccgtactgagcccgaagagtaatctagttggaaagatacctgcttgaatagatccgaattctacaggtcagtaccgctttatcatcatttgtatctgcttcttttgcagcaatgcacatctcgtggccccctgtcatattgtccttgttgctactggccatctcgttcaaatctactacatctgcacccgacccttcccatcgaaagtgccggtgcctgcccaacgatccatgttggccatccgcgcagacctggagttcattcaatcagagtgtcaatggacacctaattagtcttcggcccatcggcgccgtctgccatggccacgagttcaacgaggccgaatgcgctttggcccagcaaaacacctacaatgcgcagtggcgggcttcgcaaccaggtatcgtacattttccttggccccttacatccactatatagctctgcccgaatgattaacagggatctttacctaggtgcactgcaatcaacaaactgggagagcaggagccaaaccctgctggactgcgacctcaactctccccgcgaagccccctgcacccaaggccggatccccgtctacactgtgttggccgaatcagcagaagagattcaaacggccgttcgctttgcaagggaccaaaatctccgcgttgttatcaggaacacaggccataacgcactcggacaatcttccggcccgggttccttgcagataaacaccagccgactcaagagaattgagccggtgcctgacttcattccacaagggattggtgcgtcagtgggacaagcggcgactcttggggcgggtgttctcgcactggaggtagcgcaggttgggctggaccagggattcacttccattatggggctgtgcaataccgtcggtagtgtcgggggctttatacaaggcgggggagtttcattacttggacccctatatgggatgggctcagataatgcggtggagtttaatgttgtcacggctgaggtgagttactcgagcctccttcgcagacgccaatccaccgttttctgctgccgatcagagctaagcaaaccgacagggtgatctcgttgtcgccaatgccttccaaaatgcagatctcttctgggccctccgcggcggaggcggcggtacctttggaatcgtagtcaacaccaccatacgcgtcttcggcgacgtcccaggcattgccttttccctgtacgcccagatctcgcggcaggacccaagataccccgactcagtgaaggccatcttcgacattaccagacagatcgtaggtatatttccagcactgaggcgggcagacgacgcaacaagccgctatgtcactccagacatcacactggatagcacaacctggcagtcctatcgagatcctgttccaatacccgaattagactcattggacgcgctgaacccttatggcgacttgagaccgggtttttccggttacacactttacccggtcctggcttgagttttatatgaccatgattcgcacggccctttggttttctgagttgaggttttttccaaggcctttgttttaatttttggcttcttcaaggcaccttggtttttgtttggggaaaaaaaaaggttaacccgccctaaccgtggggg

SEQ ID NO: 5265 - DNA, 3133 bp, Emericella nidulans
aggccccttgttagttgcggcaacccccgcgccggctctatcatacctaatgagctatggcaggtatcatgtttatttgccctgaatcgctccagtcccgctctcaggggggagatgcccattctcctaaaaccggcgctgttcggtctagcgtcccagcccgggggactctcgggggactggcacagcgcatgccaatgccaagggatctataaaacccagcggccggctcttgatctggctctttgcaaatcgaacgctctggcaggtcgcattcttgagaattcgcatttccattcattcgtactttcactttgatctggctactgttcttccatctttcaactcttacccaaaatggtccatcttaaaaccctcgccggcagcgctgtctttgcctcgctggccaccgcggccgtcctcccccgtcaaagcgccagcctaaatgatctttttgtcgcggccggcaaatcctactttggcacttgctccgaccaggcgctgctgcagaactcgcagaacgaggccattgtggcgtcgcagttcggagtgatcaccccggagaacagcatgaaatgggacgcgcttgaacgtgggtctttccttcagagacggtagattttggcagggctgacggaaatgtgggaacagcgtctcaggggaactttggctggtctggagccgactaccttgtatgttccttggctgtcggggtcgattatttcggctcagccggtgctgaccaggtttaggtcgactacgcgacgcagcataacaagaaggttcgcggacatacgctcggtaggccagctcccacccgtctcaacgtcggggtcactgaccgatccagtctggcactcccagctcccctcttgggtctcgtccatcggcgatgcgaacacactcagatccgtcatgacgaaccacatcaatgaggtcgtcggccggtacaagggcaagatcatgcactgggtatgcctcaccagaacccattcccgccataaacaaagaaagaatgcatgagagagagatcgccttactgagatgagtgcaggacgtcgtcaacgagatcttcaacgaagatggcaccttccgcaacagcgtcttctacaacctcctgggcgaggactttgtgcggattgcgttcgagactgcgcgcgccgcggaccctgatgcgaagctgtacatcaacgactacaagtgagtcaccctgctgctgcttaggaccagctctgatagcggattagcctggactctgcgagctacgccaagacgcaggcgatggcgagctacgtgaagaagtggttggcggagggcgtgcctatcgatggaatcggtgagtggaccttggtctacagtatagcgcaactcgactgacgatcttccaggctcccaggcccactacaggtacgctcggcggtcgtctggctgaccaagtactaacgtatcgcagctcaagccactggtccagcactgaagccgcaggataagttttttccgcccttggatgcactgccgtcacactgacaaccccaaacagcgctgtcctctctcgctaacacgggcgtctccgaggttgccatcaccgagcttgatattgcgggcgcagcctcgtccgactacctgaacgtaagtagtccgatccactggccttccggctcgggctaacgagaatgccgtagttgctcaacgcctgcctcaacgagcagaaatgcgtgggcatcaccgtctggggagtgtccgacaaggactcgtggcgcgcgtccgacagccccttgctgtttgacggcaactaccagcccaaggatgcctataacgcaatcgtcaacgctctgtcttaggcattgtcctggatttggtgcttcaagcgcacaccgactcgggcacaagctgaaacagttgagagagttgagacaatggagacacttgagataaattcaaacaatttaaacccgctcaattgtatccatttccggagtctagcgaggtagttgtatatagctttgccagtatttgcagtacaatcgaactgcttggagcttgaccgatctatatttagaactgtgatgcctaaacctgaaactcttaacttatattggccagccaatcacactgcagacgcagccgctagttcggccgagcatcttgaagcggctctctgtcttggggctctgacaccagacggagtctggaatttcgagctttgaatgtggaccagtacagccgcgggttggcatgaaccttcagctgatcaattatcatcatcaatagttctcggctgggttttgaacctgccctaggctgaggtgggctgcactcaattgacagtgtgacactgatgcaatggccgaccgggtccacttatagatcggcgacggcaacgcaatcgctgcgggccgacatgaattatagtactcagagtagagaaacaagaaataaaaaatcgagaaaaatcaagtcaacccgcgagagcttgagaaataaaaatcaagaaatgatgacgcccgccgatcagccaagcgctcactcgacagatcgtaagcactgaatagggccatccccactgcgaccaatagcatgtgactctcccctctcgattccaggttggctgtcgcggccgcgtggaatcaccaataatgagccaacagacaacaaactcgccatgcatgagctcccatcggccttctggatccgactgacccggtctgaatgtcgactggcctgcactgcctcgtttcttgtttttcatcttcatctttatattatcgatctcccatcaccaactccagctccagctcagtttcttccatcatataaccatcgacctcggtctctacaacaccccaaattatgcattgagccagtctgctccagccaccgggccatctacactcgtttctacccatcaacctatctccccatctctcccgcgatcgaccctatcagggggggaaaaaggaaaaaaaaaaaagaaacaaaaatcatacaatgggcctgagcaactccgccgtcattgtcattgtcatcgtcgcctgcctggccgcagtcaccctgggcgctgcctattccgccagtataaccccgccgaaggggcatcgtgggcaacggttctgcgcgaccggagatgtcatgc

SEQ ID NO: 5266 - DNA, 3225 bp, Emericella nidulans
ttgacattcgcgagtcttgtcacgaacagacggtatctgaagcctagcaaagatatgcgcatattaagggccgggtttggacctgataatctgcaggagaggcttcaatcaccctccttggggcggcgacgatagataaacgtcagagcctggaggctaggaatcggtccaaacagaccagtcgagattgaaatccccagcctgcgctcaattccccctgaatatcacttctaggacggagtcctgagcaagcgaggcgatggcgacgctgatggcgacagataccgcgaaagagcgagcatattggagacggatacccctcttcttggctgtaaccctaaggcgcgatccggcgcacgcgatctagcgcctcgattggcatctgcagacatcaagcctgtccttatctgccttggcactttacactgtgattgccaagtatcttggcccaggcacgcgatgtaacaaaacgcggcgcagaacagaccgatctgcatgagtattgccagcattcatctggcaaacagcggtgcggtggctggagtgcaggactataaaaggactgcccttcctgcatgaaacaagggcgatcagggctttaggacacgtccgtcaccgcaaccgcaatgaaatctatcctcgtcccagctctctccctggcctccctggcctgggccgggaagcacaagccgcttgttactccggtgcgcaacacttcctgcaccagtggtgctcaaataaattccgacggggactgtctgactgaccggtgaaacaggaagctttgcaagacctgatcacgctcgacgatctcctcgcgggttcgcagcaactacaggatttcgcttacgcctaccccgagcgcaaccgtgtctttggcggaagagcccatgatgacacggtcaactggctgtaccgcgagctcaagcggacgggctactaccatgtctacaagcagccgcaagtgcacttgtacagtaatgcggaggaatcccttaccgtgaacggtgaggccattgaagccacgacaatgacatattctccgagcgcgaatgcgtcggctgaattggctgttatctcagggcttgaatcaagccctgcggacttcgcatctgatgttgccggtaaggtcgtcctcgtccagcgtggcaactgtacgttcggcgagaagtcggtgtatgcagccgctgcagacgctgcggcgaccattgtgtataacaacgtggagggctcgctctcaggcactctcggtgctgcgcagagcgagcagggaccgtactctggtatcgtaggcatctcgctggctgacggtgaggctttgctcgcccttgccgaggagggccctgtccatgtggacttgtggatcgactcagtcatggagaaccgcaccacttacaacgtgatcgcgcagacgaaaggaggcgatccagacaacgtcgtcacgctcggtggccactcagactccgtcgaggccggaccaggcatcaacgatgatggctccggtatcatctccaacctggtgatcgcgcgcgcgctgaccaagttctccaccaagcacgctgtgcgcttcttcttctggacggctgaggaattcggtctgctcggcagcgactactacgtctcctcgctgtctccagctgagctggctaagatccgaccgtacctgaacttcgacatgatcgcgtcgcccaactacggacccctcctatatgacggtgacggatcggccttcaacctgaccggcccggccgcctcggacgcaattgagaagccgttctacgactacttccagtcgattggccaggcgactgtcgagaccgagttcgacggccgctccgactacgaggctttcatcctcactggcatcccggctggcggcgtcttcacgggcgccgaggagatcaagtccgaagagaaggtcgcgctctgggccgccgaggccggtgttgcgtacgatgcaacctatcatcaagtgggcgataccatcgacaaccttaacaccgaggcgtacctactcaactccaaggcgaccgcgttcgccgtcgcgacgtacgcgaacgacctcagcacgatccccaagcgcgagatgaccacggccgttaagcgggccaacgtcaacggccatatgcaccgccgaaccatgcccaagaagcgccagacggcgcaccgccatgctgcgaaggggtgcttccacagccgggtcgagcagtagcggctggatcgacatatttcacgtaacgggacgatatccgggcaggaagaatgtcttgagtaaccagatcatattgtatcaatactcgtatgatattcgcatgatattcataagccacaaaatagcatgcaatgcgatgcaagcagtcaaacaattccccaaccgtccccgtaaaaccccttcactctatctcttgtaactccagctcccctcaactccatttcaactccatttcaaccccattttccttatcgccgcaagatgctcatgatataacgcatccggatagtcaatttgatcccttgggcgggtactgcttcccgtcgctctcgaccttgggttcgcaggtgcagcgttcgctttcggggacggcgtcgaggactgcggggatgtggttgccgcacccccaccaggtggttttgtctaaaaggcagcgttagccggcttagtgctgaaggagttgggtgggtggcgtacggcaggtagagcaagtcgctttcatgcacattttgacgcagatagttgtagatggaaggatgcagaaagagaaaagaggatggcggggaagccaaagattaatagtcgggcggggcaacgagtcgccgtctgcacgatccccgagatcccgatcggcgacgatgctcgattaatccttttgctgggttttagcaggagtacataattaatgccctccacggcatttttcatttttcatatggaaatatctggagcgggggttggtcctattagatattatatcttgttgcttccgtatttgtcaatgtattagactcacgaggcattaaaaatatgcaatacatatttgctaaaaagctgaaatcgtagcgatggctcaatgaaaatatatcttgaggtcatgtaatagatctttctgtctctcgattagctgcccatatggtgtttgtgtctagggttcactgatctagtccatatataactacagccgtattcctattactctcatagtaacgagcagtaaaggaagcacgtaa

SEQ ID NO: 5267 - DNA, 1273 bp, Emericella nidulans
actgcgtattagtcttacattaaagagactgacatgctagctttccactatccgagcatatatgctgtctcaagccccatgttgacgctcctgactatgtaaaaacccatcccgttgttgaattggattccgccatcagtgactccagcaagagtggtaaggttgatgtcctacggaattggtcaatctcccctaggagaccttgatacaacacaatgggcagctctggagcaaatgctcacgaagaaacttgctattcgtcaaggctccccaggaactggtaaaacttacgtcttcgttcttgctctgaaaattatgctctccaatatgaagccggatgacccgcctatcattgtcgcgtctcagacaaaccatgcccttgaccagatattgacccatatttctcattttgagagacagtacattcgcctgggggctaggagtagcgatccagaaataaaaaaacgcccattataacgttcgacgcaatggaggcatacctaatctttcagttggtacgctcgggcatgccttcaagaccagtaaaaggttattcaatgccatttcggaaatattgcagccgtccacactcttcaagcagtacggccttttgaaagcgaagcagtatgagagccttgaaaaaggggctaaacgctgggcgaatactgagggagaacaggatgaagctgaccctatagtagcctggcttggagaccaagcagtacctttccaggtcaggtgcactaacgaggattttggttttgctggagatgagtcggatctggagtatgaacagttgaagtactggaagctgagcaaggcctcaatgatgacgatgaacacgaagctctcagaggcacgttcatgatccttcgtgaggattatcaagggaatgacagtttttcgaaccttggaactgatcgttgcgactatatttactacgatgatatgtggggattcccctcggagcacgtggctggatatataacaagcttcggatccagttgaaaaggaggatcctttgtgatttccgtcaactgctcattgactacacagaaaactgcaaaaatatgcagattggcgcgtgggagagagaccacatcatcctaagggtgccgaagtactcggtatgacaaccactaacttgagtaaatatagagctctcgtttcaagtatgaagccccgaattgttctgatcgaagaagcggcagaggcaattgagggtcccttagctgcggcatgcttggactccctccaacaactgatccttgtg

SEQ ID NO: 5268 - DNA, 7882 bp, Emericella nidulans
tgtggcccagtctagtggtaacctgcatcttcaattcaatgactgcgctttgatagagctagaatagacagtgcatccgatatgccaatttgagcgggattgctacatgatacgcactcagtaagttcatccgcctacggtatctgccatgtgtacttgtaggtatcccagtaggacgagacgggtgaggctccagtcgaaccaagattgtcttcctaatatgtatagagtcaaactacagtgaaacttacatgcagaacaaggctattatttagttacaccggtttattccaaattatgtagaagcatatctacctttatcacgagtgagaaaatttattcattgcagtatgcatagcctggctggaatcataattacccattgatatcatacactacgcgtgagcaataaaaaaattcatctgtgtcacaataactccgtgctatgaactcacacaacaagctagaggcgatgcagcgaaaaagtaggcaactagctctagctccctgtctccgtctcaatatccggctccctacccgacagatccccactgaagtgttgtcggacttttctgaaggcatacttggcctcgtcttttgcaaactgagcattacgagcgggcttccactgcatgaggccacgctgctggcgctgctcgctgcgcttggcggcgcgcttagaggttgttgagcttgaagccgtgtcggcagtgttgatggtggatatctggctcgtgcccgtgcttgtgcgctgggtgtagctactgctaggcggggtgccgttgtttggcgtagcttgggtgtcctggttggagacggggtcggacgcaatcgggttcgagggttcgactatggcgttggctgtatctccgtgtttatgttctcgtccgtgttcgttggaggaatcgctggtgtctgagtgcgagtcgtcatctggtaagtgcatcaaaccatcctcttgaccaggctcttcctttccacttttctcttgctcctgtatctgagcaaggggatcttggccgaatgcgccgctccagtctcgaccctccttgtcaatccagcggcggcgctccttgggatcagcgaccttgaggatatcgcggccctggaggagtgacttctcgtgcatctgctcagtacgttcggggacttcagcctcgatatgacgcggacgggcgccctcggccatacaagcctcccacgtctcgaaggtctcgcgggagttgttatcaacaacgaagtgctcatgggattcgtcaatgccaggagtgaaaacgcagctgaaccggaggcgcccaacctcctggatatcctcgagacctgggctgcgtttttcctcgagattgtcttcggttatatagttctgcgtcaggcgcgccccattcctcgtttgccaaattgggatatcgatgggggtatcgttgttatcgacgaggtgttgcagccagagggttgcgtaacccgtgtgatggcgctttccttgagaaacgaattcgaatacgacgggagaccggtagcgatgcttgacggggaggcgcagatcaatgttagagatgtcgaaggaaaccgagttgtctgcgttgacgctgcatacgtgccgcgggatcttgctactacttcctcctgtacgtacgcgaaccttggtcttctggctgaggccttgtgcggtgagattcccggtgaacttgaaagttccaacgtcccatccaagcatttggggaggcagtttagtctcaacgtgcctgaacaggagcgaaatgcggattcggccaaagccaactcctccgtcaagggggtaccacctggtgacctgggagctggtctggaagagttctgacagtttcagaggaacgacacctaaaatagggtcgtgctctctgtatctctggtctctgaccgtcacacacaccactgctgagcgccagtcgcgcacgaaccgctctgttccagcattaaagattggtttcgagctcagagctttcgctcgtgtgcgatagatctgctctaatattagtcgcgaaatacacatcaagggggtgacttacgagttcgtcgtttagcatgatcttgcagtagctggtgggcagctctccaccttgctcctcagtgttctctccgtaaggctttgccggctcatactctctcccttggcggtttccgttacttcctttgacattgacaagctggaggttgacaatctgatgcacgatgacactgagaataccgcttggccacaaaggatcaggcggagtatgcgtgacggcttcctcttcctccgtggtgatgacacccttgtcgtcctcaaattgcttgtcggctttcagattctccggcaaatccttgaccttgccgtcggtcctcagctcattcctcagtttcggcttgccaaagaatccgacttcccagtgcagctcgccgggcatttcacttccctcgttcataccctgaagttttgatacatgctggtacatccggcatggatgctggatcatttcgcgaataggcagctccaccttgccaacaatatcatccgctgtgtgacgatcagagtcccagagctcaacgctaaggttctcgttcgccttgatgagttcagcattcacaagtagtgctgccgtttcttcccagactggattcagatcatctgtgatcacacgggtgcaatacatcggctttccatatttcgagaacgaaaggttgatataagggttgctcggcccaccctcattgccacgcttgtctgcttgctcaagcccaccgcacgatgaatgcgaacccacatgactcaaagcgcttgcgtttccttaacaatatcatcaccctttgccagcatactaagatccatcgtcatagacttaggagcggcgaacataccgcaagcggcaccaatggcgtagttgacaaagttggaaattaaggggaggtttaaaacgttgacgcctgttttgaacatcggcatacagccggctttgatatgagggataccagccagactaaatgtcaagtctttgacgaacggcacctcgggaactagctgaagccttccacgcactgttccaaccatctctatcagctccacgaagactgggaaaggcactccgaagagtccacgaactccaagatagaagacaagctgcatgtgcatgttgcgggctttagcagaagcgctctggccggtgggctttgcatggtaggcgaaagatgcttcgaaattgtaaaagctccccccttcttccagcgccgctgcttcgtctgggtccttgttttccctattgtctcgagaggcattctcctttaactgttgcacattctcatccggaagagctcgcagacttaaaagccgtattggattgtttccctgatcaatttctgcaattcgaacattctcaatcacaccaggtgaggacgcttgcataatatcttcaatggtatcagagatcggtgctaacatgtccgggttgatcaggccccagattatgcccaaaaacgtattcatccattcaacggattctgggatcaaattccgtgtcgcctggataacattcatcagcatcaagattatcatcactggtaaacgacttacaacttgtccacgtaactgttcactactccattccatctctctgccactgcggatcacttcctgtacccatagccagacgccactggcaatacagaaagctagagggaaaagtccccagtatgaggcgccaaaagtccggccgaggacaatgatcccggccacgatgccaatacatagactggcccctcgcttttccaagttctcaaacatgggtttgaaggagaccgtcggcgtcgggtggaagaggatgttcgttctctctccgtgaatgggcacgtcggatgtagtaccctctgcgatgggatccggcggtgctgtaatatcttggttttccttatattcggatagcggttgattcgagtcggaccttactggctttactcatctgtcaacagccatctaatctagtcaagctaatggataactcaccgtatccttaccgaggttggcattaggtacaaccaactacgttccgttagagacgactgtcgatgcaaagaacaatgcattaccttcgggttctttacaggctccatagcagactcgtccaaatcctcaacctcaatctctcttcccgtcgtagggtctgtgacttctcgggtcctccccttgcccaccttctgtggtcgatgtggaacagcattctcgtctgtctgttcgtcatgcgtcttcgacgccgacgctttctgatgtgcttcgcggtcctgctggtctgcctggagacgttcaataaatcggccgatcgtcgggacagggttgtttccactccagtgctccccaacccggtgttgcgtaggggaactcgacccctttgggtgagcaggcatgttgaatgtggtgcgtttggctcctgaaacaaataatgaggtactcgaattggataatcggctgccaaaactgtgttattgttcctagattccagaactagtagatcccgcggagttgaatgtcagccgcaatctagatgctctaaggaagatggaggaagatatggtgagaaaggggacatatcaaaggccagacagccctactagaggggctacgtcactggagttaatggctgttgagtctgggcagtagcgcgtacgatggattgatggatctagagtcttgagacgttggtgtaggtgggaccggtgatgtcaccacgatctcccatcagatgctctctcgtcaagctcaaaagctcgaaaggctgctttctccgaatagaaccagtaaacgtatggtttgaattgctgatctcgcatttctttgtcggtgcctagatttctagctttcctgggggttagtgtgatgattatcgcgagatcgtgcttacccactctatactatattcccacacactgtcgtcagccgagaaatcttaccttgtttatgggttccagcaaacaaatataaactctgcaaactgtcttcaaagcgttgctggtctttctgggccgcgtggttatagacctgcgcagtgtgggtgtatgtatctggtttcgtcatcagtggtcatcttgcagggtcccttataatagtctcaatttggctgtcttcatggacagtcctggaaataccttgcagtagtctttctatactctgaattttgaatattgctgcatttggcttaaatctactctgcgtaatctgggctccgtcttggacatccataaataagtatataccgttgaaacatttgcgtggcgcaaatactcccctatttgatattgccaagctgtaacactaatccagtcaaatgatcatctctggagattcccgagtaaggaagatggtaactcagagtcaggcgtatgtagtaaaaaacgcgcagggcggtctttgcaagttctcgtatgcagctcatggtaagctgctgatctctgcagttagaagatgaaaccatcttaaagtgccagtgtatactaggttcgcgaactaaaaatctaatataaatgggtagcaaggtctgccaaatagagatgacaatgtcccgatatatatatgaagttattgatgggtgcgatatgaggttattgccgacatcaacagaaaccaaatagcgagcaaaccagcaacttctcgatcaagagcagcggtgcaatccattgacacagcaatatcaatctccaaggactatatatctcatcgtatcattgtcactgtgtttgttgctaatgtcttgttgggtatagggaggcgctatacccgaaaaagaagaccaccattggcctcggccacgaccagatgatctgcgaaattcactttccatcccaacatcgattttaccccaatatcaactagattggctctgaaacccagagcttggaactggatcacatattttgaactcaagtagcgtcgcttcttcgttacattttggacaccgcgaactttgtgtcctccctcctaaacgatcgcctgaacgaccacacaacgtcattgaaattccaaatcaccgcgggctacaatgtcttcaacggaagagtccccggctcagagagcagctcgcctgcggcgcgaacgccgcgaagccaagataagagaggggggagcgtcccgactggacaaaatcacaagcctgagcggacgaacgccctctaaaggtacactcatcttctactgaaggagcgttacttagctgcttctcgcattcatccgctatattctatctacacgatataagctaataggtcttccgtacagatcgcgaccaagcctcaccatctccatccccacaacctccctctgctatccccgccgcgagccccgaacctcgaccaacccctcaacaaccacagcaaatacccaggcaagggccgccacagccgagtgctgaagatccaaccccagatgcgctccgcgaacaacaagaggccctccgtgccctcctccgccaaccaacgccctcccagcaagataccggcgaagatgaggacccgactctgaaactcctgagctctctcatgggagggatgcccggcgcagctcaaggtccgggcgccggttttggcagtggcgcaggcagcgaaccttcggggggacttccggcgggctttttctcctcacttggtcttcccccttggatggcggacgcgcttggctccgcttcgaagccacaatcggaagagcagaagaaggcccttcttacatggaagatcttgcatattgtgttctcggttgctattgcgatctacctttgtttccttacaagctcggccgttgccacgtacggcaaacagccgccgcctccggccacggcgcaaaacccttttcttttgttcacaaccggagagcttctgcttggcggggcgagagtaacgatgaagaattctggaccgcctggacctttcatgtacattcagctgctccgggactttatccgcgatggtagcattgtcctctttctgttcggtatgggctcctggtggcaccagggatggtgacagccgtgctttgatatgctctctctgcttattgcttctcgattacaagaaattaagccacaagtattttatcttgaaagtgtcttatcatgaaaatgccacataagtgatcaaacgaattcagcgaacaagctactacgatgtgataacatcgacttttcaagatccattcctcgtttcatctccccgatctaacttgctagagtttacagcgctttcgatgggaccatacctaaagaacaccatgaaacgcagatcatggataaggttcatcagtcgcgcgatttctggccacccagaaccatccttttgatgtcagcatcagggggctggatagcccgagtcccgcacgaactggtgttgaggctaaacgcacgaaccatggttgatatattgaaatttccacgagcaatgcgatggttagcctatctagtccaagccgactgattcacagtagcatggtagtactggagatgtgggcagtagactggagtcaggaggtccccgcgaggtatattcatgcaggctgcttgtatggtcgaagcgttacacaccgtagcattgtacaggtggttaattaggcgatgtatcatcgtatacgtgtacctttttttcgtcaaatgactctacgtcttgttgttctacctttacatgtatttctatagtatatcacggctctagcactttgttctagcactgagggacggtggggtggactgtgggtgagtgggaagagtgggagtgggagtgtgtacactcgtataagcatttctgggcggtgggggttaaggcaattccgagagctaaggacattattaacaatgagtgacatggatcgcaggcaactgatacactaacagatgccata

SEQ ID NO: 5269 - DNA, 2375 bp, Emericella nidulans
cttttagtaacattaagctgttcgaagatgcaaggcataatcagatacaggggaatactcaggtataaactattgctattcctgcttatctagagcgcaaccgcagagtaccgctggcagggactgtaccacgccattggtctcacaggaggcaatctggttatacagcgacattcccgaatattgatacctaagttgtcatgttcaagcgcatcctaatccatgcggcgatagtatattgaaatgccgcaatacgcgtcgcaacgcgccctgtccgcataccactaccgaagtcacctatctcaaccggaaccttcatcatacatagtgtctcgctagagccgatcgtcaaatcaccagggccatacctgtcaagttgaccgcctgtaagagttggtatccctcttggattacagtattcatattctttaaactccgagatttcagtgggtctttgtgttccgaaatgttgcttagtgaagttcgtgataggaagtccaagctttatatatctgcggtctccaaacagtccatcactctgtaattcgcattcaaatcatgatccattcgccaacatatgcttaatgctactagaaaccatgaagtgctggcatctcacgcattctctgaagagatatccctgcgaacatctatattatagtgctcaatcagtcctgctgggagtctttgctttgtccgtttggttattcctgatgggtaaagccgattcgtcagattaggcccattccttaaaatgcctcctttgctacaccaagaaagtttgcatgtagtttccctgcactcgagaagatcatggtagttgccgctatctcctattgatattggacggccctggaaaccatctcgaaacccaattcgaccagatcttagccaagagaatattccggtctgcatgttccaagttattgctattcttacaaccgcatcgtcggttgctttgatctcttaagcgaacataaggaggcttttcaggagtcggacgcggcttggataccgccatgttttcaactatgactctcgaataaataatttcaaagccgcaatacctgtcgagtcatgcggagtggaggtcaggttcaagaagtagtgtgggatccattcgacagtgaattaacaagattggtaagactgcactgagttttaaatcccggatgagccctgagcacaaggttcaaaccttatgtatcagtactactcatattactcccctactcaccccacgagttcaccttttgactcagctcgtgcgagccagggcagcttactcacctactaagagaaggtctctatagtatgtctttatggttcttgctggataggcgagtagactcatcgtcaaattgctcgggcgattctctcaaactcgcccaccgtatgctcccacaccagatcgaccatttcgtttttccgcaaggtgtctagaaagcccaatgtttccatagttacacactctccatccaatcccacagcgtacaccccacttccaagctttccgtcggtaccacggatgacgtcgggatccgacacaccatcgccatccaactgcgccaaatcagcgtcttcattccggcccggataccgcgaacttgtcaaaagatatagatgccgctccccgctctcggtcgggttcatccagtccaccggcgcagctccagtaccggacatgactctcctcgtcaagggtgtgtccaccgtgccagggtagctgtggataaaggaaactgagggcgcatgtcgagcgagagcctccaagccgagcgttataagcgttgccacatgcccgcgaacctgtcccggagccacatggagagcgccaaagtccgacgtgtcaatgggaccctcgaagccagctgcaccaacggtcaccacgcggcgaaggcacgaggcatgctcgagaaggggcaggagattggcaatgaatcgcgtgcgcgagtaatgggccagtgctgtcagcaggtgtaggccttcgggtgtctctgttgcgactccttagctgggtatctctgaagacaaggggctctgggggatatactgttgcgctccaggctcgcggttccctggctcaaaaagagaatatctagccgggtctccctcgccttgatgcgcgcacagacttcgtctaccgtgcggatgaggctaatatccgcttcgatgaagacatactcgcccccagggttaagggccttgcattcggcaataatcgtgtctgctgcagtctgcgagcgaccgacaaagtacgcgcggggggcacggttatacttggcgaatgcctttagggttgctgctccgatgccgctggtagcgccaacaaagacggctactatgcctgcagggagggaagagcggataccggc

SEQ ID NO: 5270 - DNA, 4620 bp, Emericella nidulans
cggcgaacgatgactctcctccatgcttgtcctaaccttgagaacctgccacgagatagcttacggtctctagagcttaccccctccagcgcggattcaccgctacctgtcaatcaagagatatttttgaaactgggaattggctgcagccaatggagacattcttgttggaaccaaattgcaggagagaagatcggggttgcacgtcattatacaaatagccaggtatcccgatactcgcaggactggatttctcgtcaacaacgctggggaaacaacctatgttgcggaaatacagcttaatcggtgcgaaccagcaaatcaaataagtcgtgtgtttcttttactgagagtctggcttcccttgatacgacactctcggtgacctcagagtaacaaacaaaccgaggggaacctgagcgctttgagtggggaagatggcacttcatcgccgtagcttggacgcccttgaggtggtgcaacatggggacaccttgcctctactcattagcttctcgcattgtccgtggtattcgatgtgaatcgcgcgttgactggttgcttgcaaagaccacggttcaaggttacaaatggtttatctcagcttgggcggaacaatcggagctcccaggaggcgaaagcaacgcgtatcgatatcaactggatcatttgttatgggttttggtactccctgatcctaaggcactcggaagagctctcttcggcagtatgacttctagcaccaaagaataacagcctgtgatatacgccttatttggattcgcagagccagtcctggtctgcgtgttcgccaccattgattatcgagctctgaatataattcaatcccaaccaaatatagcgtgttatcggcaaaataaaacgttttcagaaaaccagttcgggattaatattgtgtctatatagatcaacgggcccataagaaacacatcaaagactgaggttgaaaaagtcaaacgcaaacctaaggtcatgagtgagcttagtttgcgttctccatcccgtctgtttattccgctgatttaatcatcgagtggaccaaggcaagcatatgtacaaaaatatatacattctccggcagctcctggaggcgtgggcaggaacgcttctgcgaaacggtgacagagacagttctcacaaggatatcagcgacccaggtaagaagtgctaatagtgctaataacaactagccgggatagggctcggaaaagcgagggcttcagagcataagaacatcatcagaaagtggagctttcgtagcacagtgtcgtgaggtccgtctgatatggccctgaaaagtaagcgtagtgagtgggatgctcttctcgcttttgaacatgaccgtgactctgtctcaatccacactcaatacctttgtctccgtgatatgtttcagatatagaaccttaatgaagagccaactttatgacaaatgcatcttcgaggggtgggtgttgtatagaggcagcgcgggtgggccccgcggtcttccgtagcccaactcccaaaacagtccagggtaacgtactgggcaccaccgcactgcttttaagctactgctggtctttaagtctggactctcgataacttgttgcggctttgctttttctttggtgcttatcaacccaggtgactttgcgaccacagaatcgttgtcgcttgctcaatcgcctcctgatcgattatccctctaaggagagcttgtccagtcgggagcgctccaacactccactatagtaacactgttccttcccctcaagccgcactcgctcacttgtctcctgaagccaccgcttcttcccactaaccttcccctcccccctttacacttgcacaccccccccttatatccatcaccttcctccattcctcatctcgccgtccgtccaattttggtagtctggagggcactcttccaaaatggaccccaacaacaatcgcccccacctgaacttcggctacaatgaacgtgccttcaaccctgcggccgcaaacaaccgcgcgtatcccaccacgccctccgcatttcctcagccgatctaccagagccagagcccccaggactacatggacgctcagaatggtgtttatggtcagggatatttcatgccgaacaactaccctgcgcaggctgcctatgcccagccccattacggccaacccaatctccagtctcctcagcccgcctatcagtctcgaatgggatacaatgtcagccccaacgatggaacaaatggtttgatacagcagttctcgaatcaggatttaaactcgaaccgaacgggtttcttcaatcgctccgcttcgcctgctcaaagaccccgtactgcaggcaatacagcccccggacagcagcagcaacctggacacttggcccctccagtgcctcgcagccctcggctgccccccgagaacgaagaacttcaacgctacccagagcgcttctctgaaaatgttcacaaacgtggaaaagctgcgaaggagttggtcaacgtattctttcacgagaatatcgagcgtgcgcgtgatcgcaacatgcggtgggtttttgctactgagcgccgtatttctctaaaaagaattttgctaactggagttataactgtacagttcggcggagctcgacaagatgatgcgcgaccccaacatttcacaagatgcaaaggtgaaggaggcggaaatggttggaaagaaagagtcgacattccttcgcttccttcggacaccagaaactcctgccaacttccaaaccatcaagattattggaaagggtgcttttggtgaagttaagctggtgcagaggaagtctgataacaagatctatgcgcttaagtcgctgatcaaatcagagatgtttaagaaagatcagctcgcccacgttcgtgctgaacgtgatattctagctgactcgaaggacaacccttggcttgtcaagctccatgcttcattccaggatcccgcatacctatacctcctgatggagttcttacctggaggtgatttgatgaccatgcttattaagtacgaaatattctctgaagatatcacacgcttctacatggcggaaattgtgatggcgattgaggcggttcacaagctgggtttccttcaccggtgagaataacaatcctggtctctcgtaccatatacagcgtgctaatatacttgtactatagagatattaaacctgacaacatccttctcgatcgtggcggtcacgtcaagctgaccgatttcggtctctcaactggaggcaagaaaactcacgacaactcatactatcagaacctgttgaagaattcaacatccaaggataagaaccgaaactctggatacttcaacgatgctatcaacttgacagtatcgaaccgtgggcagatcaacacctggagaaaatctcgcagggctatggcttactccactgtcggaacacctgactacattgcacccgaaatttttaatggtcaaggatacacctatctttgcgactggtggtccgtcggtgccatcatgtttgaatgtctcgtgggctggcctccattctgcgccgaggatacgaccgacacctatcgcaagattgtgaactggagggaatgcctatatttccccgaagaattgacactgtctcgtgaatcggagggtctgattcgaaggtatgttatgtcagcaatccatttgagctgcttgtctaaccggagatcagcttcctatgtgacgcagaacaccgcatcggcaacgaaggtggccaatacggaggtgctacacagatcaaaaatcacccattcttccgcggggtagtatgggatcaactgcgcaaaatccgggcaccgttcgaacccagactgacgtcaaatatcgacgtatcatatttcccgattgacgagattcctcaggaggataccagcgccattcaccgcgcccaggcacgtgccatgccggatgagcagaatgctgagatgagcctgccttttatcggatacacatacaaagcattcaacgccttccaggccagttgagcatgcatttaaagtaagaaatatatttgaatgagccgatgatggatgccattggaaagttttgaagcgggcgggcttgcgttgataacttttcaatggcgcatccaggtttttgtgtcggtcggcatagacccttgttgattggtattttcatcaagcatatagcgcatacatcatgtcactggacacatgagcatctcactaccatatgtgttttcttgttctccttaaatgtttgcatcagatctcaggttatttccttactgcgctacgcgcattgtactcggacggaaacactctcgcgagtgcatctactggttgtcttgtctattacgaaggtggtataaacagttaggatatgaatcaaagtttctagagaagaactgtcatacacgcaataaaagaagttctttctggtttctggtagttaaaatcgagataaacaatcccagttttgcttcaataagacccaaaaaacgcccaccggagcccccagaaacgtgatatgagaacagaaaacacaactccctatccagagtgagcacgaaattattgaggctagctcatgcagcgcccatcggcg

SEQ ID NO: 5271 - DNA, 3778 bp, Emericella nidulans
ccatcattaggtagcactatatgaatatcctgagatcacctcgtctgcctaatgttctcaaccgcctgagcattaaaaagtcgaaaccagctccgaagcgtgggaaactacagctacctcaggtgctctcgaatggaatatttccagagcacgaacaagcacagggccaagacgcggaagtcgatcatgacagccctaaggttgtgtcaaactcttccaagcttaccaagaagtctttccacaaggcagctcattctgattcctggcctctcagctctgaacaagcagaccctgtcgactccggcatcggatcagtttcatcaccttcgagtactcaacaatccgcacaagctcagacgccgaacggaggtgcagccaacggtaacagaccattttcacaacaacagccttttggcaccacagccgagtgcgcaccgtcccaggagcacgatcaatccgtcttaaaaagcaatcgtgcctcggatgtggtcattgaagggtctgggcgcaagaagcgtttccaacgcttgaagaaagcatttggcattggcaggtgatcatgactgaacaaacctccgccattatcagccatccaacgatccaactggttatactacgctctgataccttttgacgtttatacatcttctccaccatcgtttcccccctttttcaaatcagatatacttttttaatatctgttgcactatattataccataccattttacagatatcgcctgtgacctgacttagtcagtgtctacctgcaaaagcgaatttactcgtcacagctgcccgtgacagcaacgaattgagcgaccggagtatttacatatatgcagtgaatgaccacgaacagccgtttcccttacccgggcctgtggttgtggcaactcgcggagtcgatgtgacttcaagcgcctataaagaagccaatttatgttttatatgagaatgatcttctggaaatggaatttatgtggcaccgcgctttaatgcacctttgtattgtctcatcaccgttttgtatcacttcgctattcttataataagggatgagaaatgcggagttggcgtaggtgggtatacggcatacgagtgaatacggacagcgcccaatgtaaggagttaggagaatttgactatgctatactctatccggagtacagtgagtccggtggcgtgtgagacggagctcttgagctcgacgaaatgggtgatatcgttcttggggaagagcgccagattgttagtagccatgctggttccgttgaatgtgcaactttcgatctgcttcgacggcacgccagaacccggcggagacggacggcactcataccttgtctgtagtctgagatctggcaacggttgccctgagtatgagtaaatcatgaaagtttctttcgacgataatcgatagcagcctagtattgtcgttcataattttgcacccatggaaatgaagatgcacacacacttttgagtttcagcggcagggcgagaatgatgttattgtttgtggcgaattttggccttcaaagactcaggatccacgagcatactcggcggtagacctattatttccaacctgtgaataatagatatatctcgagatcctccataaattcgcgtattgcgtataaccttatcttgagtactcaggttgagaagctcaggaatagtcccacttcttgcgccgttgttgacggcatatgggtgtccttagtgaggtgagttagagcctgaaggcttgggacgttggcaacgcaacaacctcgggacggagtcaacctccactgcgatctatggatgggatcgacccacacggcaccccagccaactgagccagccacagttcctgttccaaatctcggtccgctggcctccggctactgtaacatcgatccaggctcacccaatctctataggataaaaacagaaggctggacaagttagagcagttatccacggctaatagatagtccagcgcagatgagtaccgaatcgtgagctatcactattcggcccacgctcagattcgctcaaagaccgtgctttcttactgtggagccgcgatggcggtgcgaaggaagctgtccgacttcaaaaacatcgccaatggcaacagaccacggggctgggcgcatgcaaatcagggccgtgttctgatgagtctcgaacagcgagttcgcgcgtcgtgataccgtcaacgaagggtatggaactgggcgaggttggctcgacccgagcctgatatttttggggcagcgccattattcgtccttgtagatcgtgccgaagctcagcggactagcgctagaaagtcccgattagacccgcgagctggaacctgttgccatggtgatgtatgaagtggctgggaggagagctgtgtgatggcgcaatcgaggtcgctcattgggggacggtttggtgtatctgcatctcggtgcttctactgccgcatgtgataaggcgtgcgcttcgctgcttttgagcgctgattctaggtctctcattgagcgggaggtgcggttctagtcttgctgcagaagcggctgacggagacggtggacatgtgtttttgcagcagctattattattgccatgccatcttgtgtgaatcgaattgagtcgatcgaggagaacaatgtccttttaagcgagacatcggtgttgaattgatcatgagggggcattgtatctggatcaagacgagccgtagtgtaccgtagattgttgtagttgagaggaagaaaagaagaggctggacggatcaggaaaggcgcggtaaacaaacgcgtaacaacaacgcccgcagataaaggccaccacctcaccttcgatccccttctctcttctcttcttcttcccatcttcatcttccattccatcaatcttacattcccagctttaagcttatcctcacattcctaccccaggaattctccgcatcttcagtcaggcatagatctctcgctagatctatcttgcactaccttttctctacgagaaagacttccccgtgaaaagtcttttcttgtctcatcttccgagttgttatttttaacagttcgggagagattcgagaaaagacgctcaaaggacagccaacctggactttgacgcccgcgtccccatccccttcagtgtcttcccgtcgtcgtaccggagtgacgctgttcctgagactactcttgccaccgagagagtcgaggaagatgtcaacctcggtcgcacttcccacgatgaacgggacgatgctcgaacctctgacgctctacttgacccaaaagtctacggaaaggaagaagtcgatcttcgcgtataacgtggatctcaccgacggggtggcaactgtgccgttgtgcgacgaacgtgtgcaggaaaaccgatgtccccagatagaactccctcgtgaatcggatgcaggctgctctatgcttttgcctttggtgttttgttaccccacggaaccgccgcctgtgctcccaaaagctgggaacactagtccttctctgacatggacatgcctgttagggctcatcaatcagcgccggtagtggcggcgtcgaccaaacaaatcgttgcgccagcccataatgattcaaagcctgtgctgcggggttttacctctgaatagtcttatacttggtgcagtcctcttcccttgtacaaatgtttctcattttttaacatttttcctggaataccctaaagggttgggttttttcctttctcagatgctattctttctctcttttaagctcttttcc

SEQ ID NO: 5272 - DNA, 1332 bp, Emericella nidulans
tgggatgaggagctttaatcgtagaaacaacagtcaagtcacgagttctactaacagagatggtgttatcctctgcagctgccaataacttcgatcgtgaaggaaaactaagagaggtgataggcgcagaatggtgtagcaaagctccgagttctctgtttttaggattctccaggattttgttgccggcgagtgtagggaccgtgggatagtgctcgctcactgtaggaggcgccgcagacagcgaataaaggttgatgcgttcatctgtaccgccactagccaatatgactttcggaggctctgtagaatctgctttgggcaacggggacagggctaagcacttgatcgcagaggcatgggcctcgaatagaaaggtatccacgaattgaacgggtgatccatcatctgaagacttcttgagaccatcggaatagcaggttgaaggaactgatgccgtaaatccatgtaggattcgctcatatgaaccagtaactatctgcaacgttatggcggcactgtcggtttgttcggaggacgaaggtccctttgatttcgttgatttggcaatcttcgacggttgtgcctgctgaagctctttagccacctcgtccctcttgcgtttggccatctctgaagtcctattgagcacagaaaagttaaaaaatgagctcttgctggtcagcggctgagcatcagaaacgcgggcaacttttttttctgccagacattcctgctctgtcaaggcggtaggaaaagctggggcgccggtcttggcgttcatgctcaagccagtagctcaatctccatcacgttaaccacctcaaaacctgattatggcaagggcaaaaggctggattgctcgttcgcatattatttcgcaatgtccggggcatgggctacaatagaataaacgcatctcccccctaaaatagggaataactagccgtaaaataacataatagtcaaacatacctccaataccaagggttcgcccatacctgcttcgctgctccgggtacccttccaaaaagctttgcagtcaaccaaccacaactcgactcccttcccatcaccacgaaccctccccaaaaatcccttcacagtgccatctctgtgttgaccatctgtgcatcgcaaaacatcacaaccacaaccatttcatcatttcggagcgatttttcccctttggatgacttcgttcacctatcttcctcatttcagcgcgttatcgatgttgggtcttgattagatcgagctccggagagcttttcggctagcagatgagacggtggtttattatgaagacagtctctgagcgatttggattgt

SEQ ID NO: 5273 - DNA, 2652 bp, Emericella nidulans
atcatgccaaactcgtaattaaagagtttctcgctctcaatctcacaaaagagcgtattcgcgacatggctttcgaagatgttggttccttgttgtcggaggagagaatattatctaccacggctcaagttctccgattgtgcggcttgcaagatatgacaagcggaaccctcggtggcagaggcgcagtgcgacgttcctcagcagctatttaatcgtcacccaccctgcagaagttctgagcggcgatggtgaacaggagcaagacttgatctctaaagcacgtgaactcatcgccgctttcgaacaagtgacgcctttactggcgtctggctgttgccctccagaagccatttgcactgatattcaaaccctatgcgaggagtacaatgtctttttctctgcgtttcacgcgtggaaggcacatgactccagtgttctgattgagattatgctagctcaattcattgaattggagttgatatggcagacagtcaaggacgatcaagctggtggtgtggcagatgactatcgtcagggcatcaggcagaatcaaattttacttcttgccagactcaagcgccttgcaggctccgataaagcaatgcagatggttcgcgatgctttgaagaaggctaagcgacagaagaaacggtcggcttctaagcgagccattccacgatcagcggaagtcgcttctgccacaactactacagaagctctaactgagagcgtggcatcgcaatcagtgaaagtttcaacaacgtggagagcgcagtactacaggaactagagaagcaacgtacatccccacatgaacagttcaccaagattctcactgcactgcctgagaatcgtgctctggttcatgaactccttatcaacaaagatttcaagattgacgagaaatcttatacagagccgcgcaagcggatcatggagcatatgtgtgctctgatgcgacgggatattgaggctgggtcaggtacgaattggatcgttgcaatggctaccgttattcaggatcgtttactgcgctccctccggccgggcaattctcttcatgtgctgattagtgaggccctcgacccgtcgttagtagagaatcagtgtaaggctggaactttctcgtatgatgcgtttttcaactttatggccacgatcctcccaaagctttgtgcaccttaccgtgacccttgtggttaatggcctttgccgaggatacatcaggggatgccatcgagcgcttagcaagactcatgggcattatcgacttattatctttggatcatacaaactttatgattcacgttgctgctcctcagctcattcaggaggccccgggatatgaacaaagaacgttcgagagaggacttcaagatggatctttgggtatcggcaagagccggcgtttctggcggacacatcgaaagatcgtcgctgacgagatgcgaaagcgcgatcctgaggatgtccacggggagccccagccacctgccctgaaggtttatgcccatggccttgtggatctcgttttcagcaacgcgcccgtatccgatgatctgattcctgagaccctagagctggatcgccaaaggctcaatgcactacattctcaggccttcaagatagtagccacagcttctatactcttgaccgccaaaaacctactcaagcgtgatgcacgagcacaatggaaggccgaagctgatcggataatgtcactggatcttaatgacgtttcctccgaccgcatccagtcaatactcgagtctactcatccaatgcctcccacggccagtgcccagctggcagcaacaatcaggcgagtgcttccaccagtcgtgacagcatgtgcagcggcatcttcctcagcgggccagactttagttgaagtccatactgagatacctgcgcaaggtgcacagtcctcggctgctgcggccaatcctgcgacatctggtgtcgccggaagtggcgtttctagcttcgcggatccagttgcgcgtctaatactctcccgcctgcgtgcacatgtgctttcgcgcctcagcgcgttgagcgcaagcgagagagtgcgggcggcaagcacggctagtcaaagtctagccggggcaggaatgcccgagttcgtgagtcaagttggccaactgacagaggaactgaataaagtgcgtgaggtggattggctgtgtcatggcacggtctacgaacggattctcggcgagagcgggcccctgagccctacggcgtgaagggtcttcattatatgagtcatgtgcttcgtccattgtttcgttctagtgtatcgaggaatggttcttttccctatatgtagattcttccgtgagtctaatgacagcaattgcaagcagttattgttgacacgttttggagtaccttatatgccgattggatgtgcgtaataaccatttgtgtacctttgttttgggatcaaattcatgcgcttgtgtcttgatctgtacttcgtactccgtatctgtatctatattgttggagacttccgcggacatgtctggaaccccaccaaacctgagtttctctctccgccctcagtcttcagcaacgacaccaagattcctttaaagaacgactcattgcattgataccaaatcgtatcattcatgatga

SEQ ID NO: 5274 - DNA, 2564 bp, Emericella nidulans
agtcaagaggctgatctcctgccttctcgacccatccagataaactgctatattattccatactactcttccagcgtggttctttggctacatatatccaaatgatgtcaaggcagcccaaactgcgcccaaagtcgcatatagcgggattcccagacgctatatacgatttttctactgtctcatctctgtcccagctcgaatctcgcatagcttcgagtgaagaaaagcatgaccaacgcgttttccgcgtaaagcgcaaacatgttttgaaggcctgcgatcgctgcagagtcaagaagacgaaggttagtcgtccttaattctgttatccaggtgcattatgcttgcgatactgacactgcacagtgtgatgggaaacaaccctgcaatcgttgctcatcatataaccacccctgcctattccgggaaagaaaagctactcagacaaaggtctactctcgagggttaggcttctttcgttctcccattatcccttccatatatcgatgagcctaattgggtccaacatccagattcgtggagatgttagaatcacatcattcgctagttatcaaggcacttcagaggctgtacaagctctgtgctagcaaggaaggattttcaggcgagcccgcttgttgagacgtctgacggatatcccctaacgcacgcaatcctcgaccgcttggggctgatcaagcaggccgaggactcctctcaagaggcgcgcagtgaagagactgaggaccttcactatctccgcatgctatcaggctcaaccgactgcagcgcaacaactgacccgtcacccgagcccgttacgccctctgaccctgtcccaaggcctactagtcccattcaactatccccagttgaacatgaccccatcaagtgggagttccagtcaatccaaccacagactgtccgaccagagccacctgcgtatcacggctacccacaaactgaatatcgagcagcgacgctgccaccatcaattctagatattccagctctcgcaaccgaatccaagtgcgccaccgtgggccccgttgccggcctcgcgcagccctatctctactgttgcagtccccagtcaacagataaccgcctacctgcagtgacgacgggccccgcggttctatcctcagtatcagcagctggaattccacttgacttagtcgaggactacggtctgcatatccccgagcatcaacctatttaccaactgccttcgcaatcagcgtgggcatacccttgtgaataggctgcctgcatctgttgcagtaaatagtcttctgcgaacgatggctgtaaggcccgcaattaccctataatacccactacaccttaatgctgaatgccctgttgtgtttttgtcattgatatatatacctgcccggctgctgtttatcgtgctctgctgagatatacccgcctccttctgccacatgttattgattatttatgcctccgatctttcagacttgggttccacaccaagagttgtgctccactcaggatttgttacactagttaatcgatcgcgtctgtcatagctggcgaagtgcgtctagaacccttggtatctatagtaaactctattatttacaagtcccgggcactgctaacaaagcgaagtagcacagctcgtggcagggtgaagaatgattgaagagctcgttatcattaaagtacacctgcaagaagtaatttcaaaccaaggactgcaaacaagttcgtatagagggacttagggtctaccactatggactgaaaacgtagatttcccgggataatacatgcatgtaatgtaaagaaatgttaagaacttccacaatatagctcaattaatcccgttgagactgatgcagacgggagggagctatgcgaccggaggcgttaaataccaaatatgtcttcaggggtattctctaacgcttttgtttgccctattcttatttgcattatttgcattcaatcgtccaatgaaaactctggacaggccttttgtcttatttagtcgtcaacatcggtttcggtattggtatcgctagtatctccttcatcgccttcagtgtcactctcttcgtcgcttgagtcatctgcaggtttcttggctttcttctttggcggctggccggtcttcagtgcctgcatttgtccagctattgagtctgcggttattcacgcgttagctatggccaatcagaaatggaaacgctggtaacataccctcatcgggttcactaatatcgtcttcctcctccaaagcggctgctttggccggatcatcgatgtgaagggtgatgtcaagcttggaatctaagccaatgtagctgtcgcaaaccatgtgcatgacgaagtggaagtctccaacctgaggaggcgcttgaaactgcatccggagggtctggacgttatacgtggggttgccggcctcgtccagcataggcttttcaaaggtagtaaatgtgaacgggggcacagcgatcttgccctgtttgccatcgacaaggaagatctgccaccgcggagagtggtcgagagcaaggtatggcgcg

SEQ ID NO: 5275 - DNA, 1662 bp, Emericella nidulans
tctgcacccagtcaatccatgtctgacccctcctctcaacttctgccttgcacagctcaatacgctcaatcatcgacttttccaccccatcattttccgctatgtagccctccagctcttctctgtcggcttggctctcgcatgactctgagatgaaatgtcgcagttcttggtttgagcgtcggaggtgtgcgatggagttttggagctcggcgactttggcatagagaaccggtagggtgagctctttaattgcttccgcaaaggcaacgggagttattgggaggctttcggcggacatttgtcgactgccgtgtgtcgtagcttgtctggattttcttaggttttttctttattcgtggttcgtagataaccagggcaaaggtggtgattgtagagtgtaatgaggggaagtctggctggaacatatatattgtcgaggctctcaacacaaccgctaaacaaagcaaattgccgataagctttctttttcctgggtttaagagcgcgtctcagattgccatacatatgaaaacatctacctttccctagagctctgacattttatagtctttaatttgagctgtcgctattgtacgcctggaacaactcggcagcgcggagaaagataattgagaaaccgacaattccactatccataatttccagataaagtccaccaccaactccctccagtcagattcagaactaggtttcctccagagccgcaggatatgagcaatgtcttcggcgtaacatggcgcacgacatgcctggggcttcgttccccaagcttgcacccgccaaatctagcagcgccattctgcccacttggtcgacaaatctctccggcatggagcctcgatagcaccccgcgacggctgcttagctccaagagattgtccacgattttacttccagatacaagagtctcagctgaccgtccctgttttccgaatcgaatccgtccccgaagcttccagagctccgcagtcctattagccaacaagccaacaattccgccggttgaaaaaggagtcaagctgcgcgatgtcccattctcgaagacggaaattgacaagatatttggatcacgtaacaaaatgtctcctgccatggggaaccgggtgctctcggttcttcaagccagacgtcttgccggtacactcgaccttgacctgcccgccgatatcacacgtgccacgcgcccttctatgataaatgttggcctagaatacctccgaaagaactatcccatggatgaagacgccgccattatcgcccggatcgaacgagaggagcgggagtatgaagagaaacttgcgcgagaggcggaggaactgggtttatacaaaccgcaaagtggcacatatggcgcggactgggcgagcaaaatgatccgtcgggaaggagtgttctgaaggcaattcgtgaacggaatgaaaaaagactccttgctgaggcggagaagaaacgacaggaatggctggagggcgaagagaactaccgcgagaagctgaaggagcatatggcaaagaacactgcgcttcagaagatcgaggatacgactgccttagagggtatactactataaccatggactccggcggccaagttaactaatagggcgatatagtcaaaggacgggcagacccgagccag

SEQ ID NO: 5276 - DNA, 5086 bp, Emericella nidulans
acatgacattcgcggcctcataatacgactcaccataggcatcatagatccttccaaccatacgatgaccctactgccggtatttctatattccctcgctgttcgtcggcttaaggcttggttgaaagtttgttgattccacgagggtcatggataagcttcctgccgcgcttaacgctaactcgctggaacacgttccaataagcagattgctgcagcagagcatgtgcggaggcaaggggcttgtgcaagggttggcacgtcatacccggcgctgacggcccgacagacggagtattctctgcgccaagtggcaagaacgtgtctgctatcgagctggagttgcgtgtcaccgagggctgaagtgaatggtgaccaataatgatcttgtactcccatattccagcactctcggtgccggacaaagagctctaggtgtctatggctccgtgcatttcgtgttactgccggcaacacctagaccgagatacactccgaagctggaacccgagccttgtgctgctgcgttctggcccgtcggtgcctgaagagtgctagtctcctcgatctaatcatgagtgacgcctttcgccgaggcgttcagatggcacccaagtttttccgtcgtgctctgccgtcaacagaagtcaactgctgactatctgcatgataatatgataatgcagatggcgtatttttttttttttttgcatttcttttgataccccttgcttgtcatttgcataaccttgtcagctttgatatcacatatctaatgtagcggtgaaaaagatggatgcggtgaatagcaaacacgcaataatctacgaccactactattgtacattaatcctaacttcggagacaactcgaaataagttgatttaactcattgggaagaatgatcagactcgactgctgatactacttacgtgtcgacgtgtcgtcctggatgaaggcccactcgctttaggtacatggaaagcattaggtagtgtcaagcctaagtgtcctcagcagtaaagtatgaactatattgtcacaatcgcgccaaactccgtatctgaccaggggccttatcctcgagcgacctttgtcaacacgtactctgaggatttgccaggctccagatcaattcgacaaccatatccgtatcgctccagcacatccatccattgtcgctggccttcaagggccaaattccgtatgaaccatgctagaccggaccaagacccccttggaggatagggtttatttgctagatgaagcggctttgatccttgaagtgtatattattcaaacctcgaagctcgactacgaactactcatgaagtaatctctccacagccaaatgacctttgatattgacggagtacagtcgcaggtggtaagcatatcaccctgtcggactctgagaagcctgcccgtgcaacgtatcccagtaaaggataagagtattttattacacctgagcaagagagggtctaggtaaaggcaccatctgcgacataagtctgctgtcatgtgcgttacaccctggccgagaaggcatctgccagtgccacatgagaatgaacaggctccttgcatgtatgctaacaatatacgtattgagcgccgaaagatgtggacgcgagaatgttgtctgcttaccctagatgctgtgtgggaaggtcctagcttcttctacctatctaatggaaatggtggcgcttgggcttgaaggtcagctgcgcctagggctgagcaggggtttgcactcttcatgagcattctcgaagccttacaggttatgaacctgctcttcgaatcgttcataccattcgaagagagtatctcatcacaataacagtgtccacttcatctcgctcactgacatctaatttcagtagacacgtttgcgctatttacttttgataaattgcccaccttcccacgactcgccagcttccagcgactgccacccattgacggctcctgcctccacgcaaaccatcttcttatacccgtcatcagggctgaagtcacccattgcttttgccttttcgatccacgggttccacaccactgcatcattgagcccttcgcgcgtgatgctaaatagctccttatcgcctaatgagatgaccagcggaactgacgggtcgaggtccttgtatacgcggtccgtctcggaagtgaattgaacggaggaattggattctgtgtgagtggttgcgttttggaccttgtcaatgtaggttttaccctgtaggttcttgacatggatttgagagatgtccttcatccctgttagttgtcaccgttgctttgccgtggaagaggggaagacaactcacgtcaattgcaaaataagtatgtaacagcacctggaactcaaagcttctctccccctggttctgcacctgcagcgaagttcccaatccttccggcgaaagtgtaacactatagacaagcccaaattcatgcggccacttcgatttgaagtcttcactaagcaatcctgatgacagaccaaaatcgagcttcacggtgtcgtcgccgctgttggcgccggaggactcggaggaggatttgccgaggaattcccagagtgaggagcgtgcgaaaccgctgttgtgggagaaaggatgtggcgtggtcggatggagggggcccaaagacctgaccaaacatgagtatcaaccagtataaacgactaaattccagtcccgattcctttgcgaattgaaatttaggaatggaggacacgtaccggaaagacaacaggaatcccaccgcggatcggcttcgagccgtccagaacggcagcttcactgagccatagcttctcagcgccggaggcagacttccaggatgtgactgttgcgccgtttagattgacggtgacagattcgccggagggaagagtggcttggacgacgttgttggcaagggagattgttggctggggcggggttgcggtgacaccgatggcagcgggtttcttagaccggtccatttttacttgtattattcaggagatgttctgttgagtattgatgagaaggcaattacaggggagaattgagaaaggatcgaggtgatgatgtgaggatgagaaagatcgaacacagagaggaggggtagacgtcagagtggggcggtttcaagatccagatctatacacaaacaactgctgaacttcaaactacactacaacagaaattcccccttcgtcttcgcaacctgctcatcatagtacggctggaacgccaaccaccctttctcgggtccgccaacctgtggtgccgaataagcggcctcctcgtcgtcaatgataatcttcttatatcccgcggccgccgctgcatcagccagcaactgcgcatgacaagtcttatcaagactaataaaccagaatgccgcttcatctacactttgccccactgtcaacagtccatgattctgcaagatcgcagccttgccgtccccaagcgccttcgcaatccgcttcccctcttccccatccagaactactccccggaactcgcgatacacagcgtgactcttgtagaagcgcagcgagtcctgggttatcatttcgagctcacgcccgaagcatgagaaggcttttcctgcgacgctgtgtgcatggcaggcggcgttcacgtcaggtctcgccctgtggatctcggagtggatagcgaaggctgggagattgacaggttcgtcgccctcaacgacgtttccatcctcgtcgacaagaacaaggtcggagactttgattagtgagaaatgtgcggagagagggtttatccctgcgccatgtcagtcaagaaagcccgacacaatctcggcatagatacaggagacggacaaaagtggttagtcaaaatagggtcgcgaacagagatatgtcctgcaacgccctcatcgaagcccctgtccgcaaagacgcggaatgcagcggcgagatgctgcttgcggtagaggcgctcgtcttctaggttgtcgaactgtgggtagctgcgaatcttcagcgtcttgccgctcttggtcttgcctagaacctggactggaggaggcttctcgggcctgctcgatgggatagagaccgttgtaggcttggcatcaatcgtggctgatggctggaggtcacttagggtggttggggccattgtgtattggagaagcgagaatacctggtatatgtggttgaaaaaagatgcccgacggaacctctggaacctccaatatataagatgaacatctactccagaccccgcatcacctctgtgggtttccagttttccagctagaaacccggaaaagcgtgcgcatttccggacccgaggttatatgatcagccaaagacgttctttcttgtactctccacgtacaaactcggtcaataaagctccgagttatgacagtagtgagaaactacgtgttgattgtctttctgtaaaagaccgcgccgtgtgacggcttttggaaacgttgccattcaagctgaagtcaataggctaattggatgtcctagcgtagatactacatataaatgccatcctgaaatgcattaaactggcctgctgaaggatcttggatgaaacgtaaatgctgacacacgggtttgttctcaaccgtcgactcatggtcaatttgctttaagaaggtaacgatatgtctcaaccctgaacgcttctggtctacccaacaggcgagacatactaaagacaggccaaacatggtctgacaacctttgatccttgatcaccgacctcaaacggccacttggacgtagaagtcactacttggaagggtaaaccaagactctcaagctttctctccgcactccaagttcgatatgtcgacgtctcaatcaaagtttactcacccctttattttccccttcctccgcttccaccatcctctccaccatctccttcctcgccatcaaccaagtaccgtcagacccagacaaaagcccatgatactcctcatctccccagatagccttatactcgtcttcttcgaagtataacgcatttccatgatggaacccaaataaaatcactgcatctggatcgccaggcaacaagga

SEQ ID NO: 5277 - DNA, 2331 bp, Emericella nidulans
ctaagcatcacagagaagcccaatggcccgagaagaagcccaggatcccaccaagcacgaatagcggcaggtagtgcctgagaaggggcggatttacgtttcccggtgcgcgtcgcgcaaacttgaccgtggtgtaaatgacaaagatatcaacgagtagccacgagcggacgattatagtcgcaatgggcagcggcgggggatagaagatggcatatacaaactcccaggcgagattgttactcagtgctattaaggagacgccgggtgtccgatcttggaaagctgctcgaatcgtcgtgaaatagttcatcagccagccggtgccggagacagcgaagaggcctagcaagaagggttgcacttgcttgaactcggcgggtgcggcgtcgaaatcccagccttcttccatggtgatagatttggattcaaaaagtataagatctaactccaacaatctggggagaaattcgatcgagccctgaggacagttgggtgctcagatgttccactccatagacacaattgcttacttctcggttttagcataaaggacagacttattacggctaaattagaccctgcatttgtctaagaacccattgtaacgctcggaccggcgcccgtgtcgattttattgaagtcgcactgccaccagcggagcatcttgtcgttggcggccaagcctgcagctttagtgcaggatcgcatctatagagactacatagattagtatcgttaccttggctatagtacttgttgtactggcaattcagctgacggttacggccttgctgtcctgtatccacggccgcccagatattcaagcatgagagtgtctctgccgtcgcatacaggataagtacttagatatataagcaaagatataccaagggcttgattgcgcgcgtccacaccgtcgtgcttgccacaatggtgtttgatactctcaatgctccccagccgtatcaagagcattatccaccccggtggaacgtacaccactcgtcctccccgcttccaaatggacactctatcattccaaatggacactctatcattccaaatggtaaaactgccgtagcagtgaccaatggagcagataaccaacatcagcataaaggcaaggaggaagaaatcatctccgcacctgtgcactatatctcgaccctcccaggcaaagacattcgcggtaaactcatctcggccttcaacgagtggttccaaatcccagatgagcagttggagatcatcaagcgagcggttgggctacttcacgtggcttcattgctgtaggctctttcaccctcacccaccaaaccatccagttcagacagattgacaatttgtgtacgcgcagaatcgacgatatcgaagactactccaaactccgccggggcttccctgtcgcacacagcatcttcggcattccgcagacaatcaactctgctaactacgcctacttccaagcacagaacgaggtgctgaaattgcgcagatgcgagaaagccttacgtatctttacagaggagcttctgcggctgcacagaggccagggaatggatctctactggagggattccctcacctgccccagtgaagaggagtacctggacatggtggcaaacaagacgggcgggctttttcggctcgccattaagcttattcagttggaaagtgacgttgatgagttcgtgcgcctcttgagtttcttccattattttagacaagagctgaacagacttgattacggcgcagggactgcgtccccctagtggacctgctaggtataatcttccagatccgagacgactaccagaatctgcagagcgaccagtatgccaaaaacaagggatttggcgaggacatcacagagggcaagttctcgtacccgattgtccatagtattcgaagtagcagtcgtactggtgtcgggagcgacagcagtctgcaactgctgagcattttgcgccagaagacggaggacgaagccgtcaagaaatatactattcagatccttgagaagacaggcagttttgagtttacgaggcagaagttgagggatttgacagcgagggctagggatatgcttactgaactgagggagaggtcgggggctggagcgggggctgcggggttgcttggcatattggatttcctggagctgaaggagtgatttctttcgttttccattttcagttctgttttcatagtttattttttatttttatttattttattttctgttaagccccaccaaagctttgaatgaggtgtatttgcggattgaatcctgaataattcgatatagggttatactagggagcggag

SEQ ID NO: 5278 - DNA, 7374 bp, Emericella nidulans
caaggacgccgcccgttctacaaaacgttctcgttcagggtttattctatcaggacgttccgcacgatctggcaggagaactccttggaacttctctcgcagacgtggcattgcagcaatggccgtaattgttttgggagcagcattgttgagagcactgagttcggccgttccggcttcaatgctattgttccgtgctcgtagtaaagcggaggcgagatatacaagcgagacatatgtcggttgcgcgaactcgggatgtctcttgctccaatacctcttgcccttcggccccaacataccgcgcggcttggggaagggttgcttctccattagatcaatagcagcagtgacatttgaatgcttgaaaccatgcgattgccggaggtggttccatcctgggaacgctggcataaacttctcttcaaagaccgaaaaagctttgagagtgttcgtcggatcgtcggtggtcgcaaacatctgcacgtacgtagaccaattgaaagtcgacaggcagaacccatccttctcaacttgtgctactacttcgtctatttctttaaatcttttccgataagcaagtgatctcatatataaagacaagggtcgagaaagttcgaaacggtacgctggtagtaggggtggtcgtttggtagtcgccggaagttcttgcggtttccataatcgctcgcttatgggcttgccaggctccgcgctcggcgatgagctaatttccagcattcatccactttttcgagttggtctgccttcaaataagccagcattaaacttgtaaggagactgagtggagctctagcttgagcatcctcaatcgactgcctccgggcttttgcatactcgctgaacagctgcttaaccctgtcaagattacccttctttgcgtactcggtcataagaggctcgtaatagctcgacgggaaagcttcagcaactggcaacctgctaacaccgggtattggggctgttttcactaatctcgcttggtcgaaatcctcgatgatttcggccaggagcttctctgcatgcacgaaatgaacttctgttgagtccattccagcttcttccgcctgagcctgggcaatgagatgcagatcccgttgcagttgagacctcaggaaaagaagctgcgtgcctggctcatggtgtccgaatcgctcctggatctcacggaagatgacgtgtaccatgtcacgattgcgatctttgacatagccgtacaagacgagggcatagtgaaactgcgtggcgtgcatttgtccacttctactgagtgtcctaaggattcgacgcgccgagtctgtttgccgaagaaggactaagctgagaagaaacgcagcataggtcatgtcgtccgccggtatgccggcggcatccatgcgcgaacgtatcctagcgatcgattccaagtccatctcaaatgcataattccagagtagaatgttccacatcctcactcttgagccagttgcatcaacagtaaggcaagcttctgcgaaatgttctgcctgcttcaggtttttgtttcggcaatgagcttccacaactgtatcgagcattggtgttgttaactgaacctgttgttgcttggctacctcgagcgcttcaagaactaagtcaatgtcaccccggtgtgcgcataagcccaggataataccaaatgagtaagaatcaagcttaaccttgttctcgaccatcattttgaagcgcgaaaagcagccggtaaggtcgccagcattcgcatatgctgtgagcagaatattccagcaatgtgtaggcggtcggcggctggtcttcctccatagcttgccaaactctactaacgtctcatgcacatcacctttcctggcatgggcgtagaggagatgtgcgcgcattttccaaaattgcgaagtcacccgctctccataatgggttacatattgctcgtacaccctgttaacacttgacgaatcagcagccctcgaaaaaacggcaagagcgtgtctgtatgcaatcgcgggcggtttcgaatgatagcgcgagaattgctcgaggaaataatcgacgttggcagtaatgtcgaaatgcgcgagttgtttgacaaattgattaagtatctgagtcgatggtggcattttgtccatgagccagtcaaagtcacggtagataacgacggatcggacaaacattgccctgcgttcagaagactgaagagtcctgataagattccaaaaaatatgggaagtgagaaaccccgctgagtggaaatctcggagaaggcggataaggatattggttgatatattctcgacaagattcgacgttgcaaagatcttgccagtgaaatacttgacaaaatcgggctttctttgctctgcacttactacgttgtttgctcggctctggagttgcgcggataagttaggcaggctggtcaatactgatgaagtgttcaacaacgggagtatgcagtcccacaacttgtgtccatccactggacacacagtctcgtataagccctgcgctagagcccagtcagagctctctatacagtgagccaaagccaaagcccagcacgacagaccgtgcccatttacctgcgcctgctggcagacgcttcccagctcctgcaattgcccaacggtgagatgcgatcttaatagggtcaagtagtcttcagtagaccgcgatttttctggcatctcgtagaacaaatgctttgctcgtacatgatctggttccttccctgatttgctgtactgcacaaacagagcctgattcagttcggagggctggccagcaaacatataaagttgccacgccctatcggcctggtcgaggattccttcctccagtgacagtagttcaagaagactatctctcgcccaattgcccgatcggtccttgatgttgtgagcgtcgattgtttgtccaggcacaactagcgtgttagggccggttctggagacaaacgttctgcaggcgaggaccccactccttcttttcctccgcgataagatatttcttgctgaacgtagtaggcatgtggccacgaattcctgcgtctggtgagggtacagaaatccgagcgttggggccgaataatcgcttgaaactctgtcgccgcttgtattcgagccgcgagatcgcaggacccgccgaggagatagtcgccatttcgaattctcggagcagctgctggtatattggccgagccgggtgcagaggggctttcgcgttcgcagagcaccattggagtcgcggaagaaacgcctccctgcgttttcaacacatcccgccgtccgttccagcatccccctcgaaagcctggttttcgcctggattatcaccgtagcttcgtcagatgaggccgcatatcgtattttgttcctttccctggagaatggcaagctgtcagtcaataagctcctggaggttttttatatagcaaaaccagtctgagcgttcgcctaccggtttgttgagctcgacttcaagcccaggttcggtaaatcaactatggaaacgactgagtcagacagttgcagaatgtgtggtgggacaatttgaaggccgtggtgtgaacggcgttcgaaatttcggaggttcaagctgcgagaccgacgagcgtctcggcgatacgtttggccgcacatcttatgatcgggggcattgggcgggccacaacctccactccgctggcgctaatggtaattgaacacttgctggaatcaccactcgttcacaatataggccactttgcgggcacacaccactacagccatggatattaccgagttcatctttgctcggagagaggaagttcttgtcgctggagactataacgcttatcgcgcacacacaacccgcaaattgcacaatatccgcaagaagctcgggcagactactcccaagggcaggaagtatacctctaagcctccaatcagtgcccaagctgtcggcgaaaatgcggcgtatgtccccaggcgaaaatacggttgttttgtatagtgctaatgagcaatggcggcagaaacgtccacgtcctactcctcagtgcggaacgggcgtgggcccaagcgatgcatatgaaatcaacacattcggcagatccgtcggcgaaggggattacaggtgccgctcggcgtcatataatctcgcggctaagcaaagcagctggatatgctaaccagctggtgggtctacttgaagataaaagcggctctggggctaccgacgtggatgtacttgaagcgcgggcttatctcagttcgctcatgggggctatatatctggagaagcgtaactgggagcagtgccttcgaaactattccgtttcgcgggtcatctacaccgcgctaggtcaggcagcgaagagggatgcattccgtgatcttatgtccggcaatatcgacccaagtctacgatacgcagcatatcagatgaagcttccccgatcaaagcccataccctcattggccattgagtactttccagccgattctagcatcagggctgaagttgagaaagccaatcccgattgcctgaaagaagatgccgctggcacgcgaaaaaccgcggacggacaagtccagcaactgccggagactattacttggaggtcacgcactgtcacaatagaggatgccatgatatcccaagcgctcgcagcggcgtcggctgaggaatctcgacttgccgcttggttgaacgctcctgagggaaactccgcgtctgcaaaagacaaggcagcagcttacgatagtgtgattattgctagccaagacgctgtcgatgccactaagacggccatcgacgacctagcgagcgaaggggtggacccaagcgataagagaatgcagagcttacagataacacgaaccgccgtgaattatgccttggtcggctggagagttggacgcaaccgcgttttatgcggcgagaatgacgggattaccttcgaaccgagccggagacagtctccaaagaacaagaaagcaacgtcagagcacgatgaacccagcgggaagaagttgactcggctgcgtgagagagtggtcttatacgattccacactccaaagcattgagttcatacttgagctacccggtgtggcggcagattcagactttgtccaagagctcgaagcaaagcgcacttacttccgtgctttgcggtaggataatctccagtgtcccttcacaacttgcttgcgctgacgaattgacctccagatctttaaccattggccgctcccacgccctgcttgggaaatctcagaacgctcttgccctgttctctcaagcgctctccctcgcatccaaagcagccgcatcaatccaatctacggccaacactggcatggacatcgacggcccctcgcgcttaagcatcttcccagcacaagccagctcccttgaacatgaacttcgcgccctcgtacaaagtataaggcctcgtgacacttgaaagcatatccgcgcaggaacaatcttcgaacaagtcaaccccccagcgcccgctcgtcgagcgcctccacgagtacgctggcgacagccttgacctgaataacctcgtcccgtacccacctgaaatccgccctatccctgtcaaaccgcttattcttagatgtggcgtggaattacatagattacccgcgtgagggtaaggctgctgtttcgtcggctcaagcgcaagcaaaggtggagtcagttgcccaggagaacaagggtgggaaacgtggttggtttgggttcggaaggtgaggtaaagtttggcggaatgcatagcagtacattcatcatgcttggttgcttccagccctgtatgcatcacccgagtacataataagactctcatgacttcacttgcttgactaaacctgcgaaggtagtgtagtcgttcctcgcctctgcaaaagcaaaaaaaaaaaaaaaggggaaattcatgagccactcagctttatattcatcttttcaatatcacaacctccgaccaggatgtaaggtaattcatcatcatcgaagttatacaaataaggcgtgtacttactagcccggtttctggttacaagctgtatataagcctttcaagatgatatgtttgaggcgtctagtagtttatgtcttcaattgtgatccagcctgcgtacttctatgcagaccagacctagtaggagggaaataaattggaaaactagcagtctcaaatggtcagcagaagaattcatgattaatattaatataagggacatctaggtcatccgagggcttcaggagtgacgaaaaatatatcacacaagcaaacaactccacgtagctcattcccattcccatatgcatgacatgggtggttgatttaacccaagcaagccgagtctaactgccctgcgcgacttcaatcgagagccggggttctaaggacgaagatgagacgttagacccgacgtttccagaattatccacaaacttataaaaagcaattttaacagcaaacgatacacccggtcggacagtagcggttcgatcagtgagaatagatacaggaagtagggaaaagaggaaagcgcccatgcggttctcccatctccgggacagaatcgccggggttaagggcccacaaggcggctgctgtatatcggactccatggtcaaagggccatagagtgacacagctcatctagatctccgggttgctgttgcattgcggtacaagaattaagcgcgaggacgaaaagtaagcaggcagtcgtcctaacacaggttagtcgaagagcagaagattaaggtaaagatagaggggtatacctgagggaagatagtagcaaagaccttgatttcctcagactggggtgtaggagtgtgtacccagtccatctccatactggccttgccgatcatcgccatcaagttaaggacagcgtatgtctgaccaaggcagtagtgaggcccggtgccgaagatgaggaagttcttagggtgctgctcggcggtaccggtgatccaacggtcagggtcgaaagagtcagcgttcgggtaagcttcctcatcacgagtggcagggtagaccgaaggattgatcatggagcccttggcgacagtaatcttgtcggtaatagggaagtccttcttggcaatgtagggaaccataatgacagggggccggtaacggagagtctccttgacaacggcgcgggtgtaagtcattgagtcgagcaagtccatggtcaagggagcattcacatctccattacggagacgcaggttctcctcgcgaaccttgtcaaggatctcggggcggtcggcataagttggaacaccaagtgcaggcggaactggtggcatcctgggaagcgaacacgtgggtaaagatggt

SEQ ID NO: 5279 - DNA, 3230 bp, Emericella nidulans
aaaaactagagaagaagaaacagaatgaagaaagcagaataagaagaaaggtaacagaggaaaaggaagataaaagatcagaaataaagaaaaaataaaaagggaaaaaaaagaaagaacaagaaaggcaataataataaaagatgtacaacaagaaaagacagtaagagataccgaaaggcaaagaaaaagggggaaaaaaaaaaaatctcccacctcccatacgggtcgcgcggcggtctaagacaccctaaggaatattgtgctggagctagattttaaggttaacatctttccaaggcgataaagcaaaaccggtctgtacccaatgtgcgcgccgcaaaatcaaatgtgttggcgccggcaagaaacgctacaaattcaggagcaagacccggccgtcgccagaaagcgagtcctaacacgtcaagacgcaccggaatttcgaaacaaagtggttcgtcgtatcgcggccaacccgataaacagtgccaccctcctaggacagcgtcttgtggcggccattaagccgcagacggacttgaggtacaacctggcgtgggcgtttggtggctatttggtccgcgtcccccaacgcttgggcgtgaacgaggcgctcgacgcggccgtcgacgccctcgtcacggcccatcagacctttgcgtcttgcaaagtgatcccagtcagctcgctgaccaagtactcgcgggctctgaaggcattgagacggtgtctggataacccgcttactgccggtacatcagagacgctctgtgcggtatcagtgctgctactcgtccaggtaactgaccactcctctcgcccagtcaattcttatattgctgacttcactagcatctcctggggccctccgacttgcggtggactggccatgcggagggagcggcgaggatactcagggcgcgaagaagctgtgctcctcgcgacgactttgagcgcgtactgctgctatctctgcggggtccagtggtacgactcttctatctacagatctacctagatgccaagactgacgatgagcagctcttcgaaggtctgttcaacccacgcatagacttgactccgacggaatggaccgagctggtacagaacgagctcgacgcagggacgccagagggcgagatgctcctcaacctgtcacgggtccgtgatattctgagccggatcaagaccaacgagcacggcttagccgggctgctgatcctgcaggccgagatgaggagcctgtacaccaagacccggcagatctgcgagacatttcgcgctgagctgcacagaatcgagaatcccgtccaggacagcctaccgaaaccgttcggtcttccgccgactttgctccacgccctcacgcaaagattctacggtcttgccatcaccattgctctgtacatgaactacgctctgggagcgataacgagggatgtcgacgtctccgcaaatgccaactatttcgcccttgagatgatcacgatcgctgagaatgccatccagtatcggccgtttggcgcggggtatgtcactgtggggctgaccgcagcactgatgacggtcaaggacccgggactacgcgccctgctccagatctggttcgacgactaccgcgacgactttaacatgccagacatggacaaattgcaagaggcagagaagttcgctcttttagacccgtatcggtcgcagcgcatgccggacgtaatgcccgagacgcaggagcatgctttatacgagcccatgccgttgtaggccgcctccctcaagtatgaacactctagtgatcctcctctagtcaatcacctctaatgaatcacctctagtaaaacacttctagtaaaacacttctagtggcgtccgtgtagtttattaaagaccagttataatcagaaaacttccagcttgtctcattgtctagaccttgctcagtatatggtggcagctgcccggtcatgtgactgctagtggagccgttgatgcaatgctgagaaccgtggaactgcgctctggcagtcctggcaagatgccagtcaaggagtccaacactcccactctcgctcgtcctcatgcccttctgccagtgccctcagccctcagtggctatcactttgtcctctatcctttactgcctacctcaatagcacgacgtgactcaacaacatgccagaaccgtcgttaagctcctcccaccacggctcccaccacggctcccaacgggacgaggcgatcctctcccagcacctcgatccccaatacaccgctgctctccacgaggaggctatcctccctgataacggcgatggcactgcatcgaatgctaccgatgtctcggagccccagtcgtcgctccttctccaggggggcgatatgcaccgcgatctctaccgtctcgatgccaaaacaaaaagagctaggatggacaagcgagcggcgacgttttctgcggcgcctcgtggaagcgatctctttgaggaggcagtagcgccgctcatcccgggcatcctctgccgccactttatctgtcacaagggccaggactcatgtgccctgtcgtgaccagtgcccagagtacaagcgctaccgttgtcgcggaacagacatctgtttcctattcccagacgccctggccctcatccactgctactgaagccaccagtgcctcaagttctgcaggaggaagcaacaatggtcacaccggcacacatgatgaagctggacattgccctgctcatactggcaagaaacgttccagactgaatcgtagaaggtctgttaagagcagaagccatgctcatggtccttcagtctagggaatactgatcgaccgtggagccgatgtgatgcatgttgtctggtagggacacaatttcttgtagccctatgtgccacatagggtaagtcatcattgttacaaaccccgctaattccttggcggattcagtcgattcatatttcctctcagcccaacttcatctagtggcttatgtgttcataaccaaaccatttgattccatgagactatacagttaaagtcacatctgcttctcggtgctttcaaaggatgttgagtattgtgatctatatatgatgcgcatcggaagggattggaattggcctgtgtttaccaacatttagaagaacgacagattataaaaataagatcaaaaccggatactttgggaaattcctccagaatctaggcacgacagtcggttttt

SEQ ID NO: 5280 - DNA, 5177 bp, Emericella nidulans
gaacgcgcatttacccatacaggctacggacaccagaacgatttccagccttccaagtctccgctcatgattggccatttttcatggatttcttccgtaagacacgagctttggaggttcaactcctagtgcttttgcacttctcattgatgcctccacaaacggcgtcgagcggtccgtcgccccaataatccaaccgctgggatggtatagtgccgcaaataggccgtttggaccgcgccagatgtctctagcatcgctggctaacttggtgcacaggggctcagggtattcggtgcggacgactttgttgatgtcgttgccggcggcctcagaggaggggatgggaaagcgatcgagaacagtaaccttggtgtagccctttatcgagagatggtacgcggtacttgtaccgaaagtcccgcctccaatcacgattatcggctgagtgagctgcgagaggaccatagtgtattggactatgaaataacaaagatccgggctgctgtctcctttgtcgtttttatattctcttcattgaaaccggaaaacgaaggctatgcctcatggcaggtcgacgcgccgattcatgagtatagattcagcaaaagtggttagaacattaccccaaccagtggcgatagggctaatccaccaatatctctgttcagatagagtcagacctgcaaaagttggagtaacaatattcagcggcgatccgacctgcctctattttgccattatcttggctggtgtcggataacactctagcactgtaccaatggtgatatcagtgggtttcatatcgaattgatgttgctactctgtgcaaatataaggacaccggcggtgccacctctaagtcagtgtgtattcaactccatcccatcgggcatgttgcagtccaagaacaccaaagcgggcctgactagttccgtggctcacattaatgcagacagcgacgtagggcagatagttgaggtgcagagcgatccgggcctcccccggaactttactcctcgacagatccacgtatgtctcggtctgccttcccacagagtacaggtctaacgcatttataggtgatctccctcggaggccagatcgggcccggactattcatttcaaccccaaagcccagaacgatcctctattcagtgagatctatgcttgagggtggctctttggccgttgcctccaatatggcttcttacttgctgttgcttcttcatcgggacttcgttctatcttgccttgtaccctattgtaagtctggccgcccctctttgaaaccgaagctaatccattcatcagggatcggatacgccatccgcgttgtatttctttgaatatatgttcgtcataatcttgatcgttctcactgcagttggctacaagctgacataccgcacgaagttttgtgatccccggacggtcgatctgcagccgggacgaaggcctctaggtgtcaaggagatcaaggaactcgacgattataagagtattgccccctggagggaatccgtttctttcgtgcaattgtggtagttttgcctttgaaccagatccccagccgagaacgagcgatgtatacgaggatcgatctggagctgctccagccacagtacaacgtaaggctgtgactagcgtaggtagatcaacggcctgttgcattagcttctcttgtcttgtatatcgtggctttacatctcggaaagttgtacgtgggttgccggtcccgcatcccgacctggtcgttgtcctgaatagacaaatggcctcgactgcatgatcaaccggcctttcctcatatcgggctggggggagatccaggtattatcggactccgacgctatgggattggccactgggcccgctctccgatctggtcttggatgaacgccaaccgaatgcacgaacgagcctttcctggtgtgatattgtcatgtagacgtcgtgtcctgtgactgctgtcagcttcaggtgcaggaatgccggcgaaatggtaagcagcgagatcgtcgccggactaattgcaggctccggtgatagcaacttcacgggttcaatccagaactcgcaggatcgtttctgcactagaactgatacagttagtcctgccattcgggagacgatgccgttgagagagcgacagggacgatggacaatcgaatacgagcacgtctgactaaaaggagataccttgaccatgattggtggtcgctctgtaagttacgggcagtgaccccagattaccaaaattacgagtgataggacacccgctttcttcttttggctgaggcgcggcgagctgacgagcctccaatttctcccttccaggcggactctccttgagtggccctttgcagcttcttctacacgttctctcgtccgtctcggcgtcattcttcagctctgcgctgtcctgctcccttcattccgtctgaccgccagccagtcatggtcgctgcccgatcacattaatacccctgtcttctgctctcactcgttgcttccagccgctcgaacctcgtacgacctgtccctctttctaatcgagccgtatacactcagcacagcttccgacatgacctcactgttacctgtccgccctcgctcagtccggccaactgcccccgtaactatcagcgacgaccacgaaagctccgacgcttcgactatcccttctccttccaccacaaccagctccaggagcttctccaacccatcgacgacgccagatcagaagagaatcaagatgcagcggaaacaatcgtctccattggctccggcctttatggtgtccgccccgggaaaggttattgtgtacggcgagcatgccgtcgtgcacggcaaggccgcaatggccgcagccatctctctccgctcatatctccttgtcaccactctcagcaagtcgcagcgcacgatcactctgaatttccgcgatacaaacttgaatcacacttgggatatcgatcaattgccctgggatcttttccaccacccgtcaaagaagaagtattactacgacctcgtcaccactcttgatcaggagctctacgatgcgattcagccccacgtcgaagatatttccccagatgcccccgaggagatgcgcaaaatccacaagcgatccgcgagcgcgtttctctaccttttcctttcactaggctctccacagagcgcgggcgccatctacaccctgcgatctacaattccgatcggtgctggtttagggagcagtgcgagtgtctgcgtatgcatgagcgctgcgctacttgtccagatccgaacccttgccggtcctcaccccgatcaacccccagatgaagcagaggtccagattgagcggatcaatcgctgggcctttgtcggtgagatgtgcattcacggaaaccccagcggggtagacaacacggtgtccgcgggcggaaaagccgtgattttcagacggggagattattccaagccgccctccgtcacctccctgcccaccttcccggaactcccgctgctccttgtcgacacgcgacagggccgctccactgccgttgaagtcgctaaagtgggagctttgcgaaaagaatggccagtggtaaccgaatcgatccttgatgcgattgacaatgtaaccgcatccgccgagaaagttatccgagaacctaaccctgagggcttgtctgagaaaactcttcagcaattaggcaccctgatccggatcaaccatggctttcttgtctctcttggcgtatcccatccgcgactagaacgaatccgcgagctcgtggattacgccgacattggctggacgaagttgaccggcgctggcggtggtggctgtgcgattaccttgttgcgccctgacctaaatgatgattctctccgccaacttaagagtcaacttcaggacgagaactttggcatatacgagactacccttggcggtgacggagtgggcgtgctttggcctgctgtcctccgcaacggaaccgacgaagaaggcggcgaggagattgaccagcaaaagtttgaaaatgccgtcggcaccgagggtattgagcgtcttgttggcgttggtgtccaggagaaacgcgagggctggaagttctggaagcgagctgttgcttgacgttccttttcaccctagcgttctacccctgctacacttgcccatacttccccattctcaacccttatactaccatttgcgcccatattatttaatccgccctactggtctacgtgcactcgtagtcggttgcctcaatgaacggctggacagagtacgagatggcaaagttcacacacgaagaacaaatcgccagcaccacaaccagctcgctcgagatctgcacacacaggtcagcaggctcgacagtgtcaaatgggatatactgcgcgtagaggagaactcaccccctcgaagcactccatcgcataagcggttgccacactcgccgcggagacctgctgcgcgatcatcccgcccagaccgactgcgatcaagacccaagatttgccatctgacgcagaccacccgtacatgaagtatccgacagccccgtaaacgaaacttagactcagagtccagagacgcatctcgggctctttgtacccgccgttcgcgcgggcaaggcgcagggttaggatgtcgccgagggcgccggtagccattctttgatgaaggcggtttagtcatggcattcagtgaggcgcagagtgagtttacgtacccgatgaaagacccaaccaatgctgctaggaacatgaggcctgtcggccccgtggaccagttatacggggcaccggtcatgatttcggagatggtattgaaggagacgattcctgctgtgttggcaaatgcgtagattaggccggcctgctcttgattagaacccgtcccgcaaactgctcgcgggtacaatacaaaccatgataatgttaggaaatgcgaagagatggaaggggcgtcggaaatactgccaccatgtcgtcttgtcctctttccagcgatgaatcggcgccaagacgtgcaggtaattgcgcgggaggaggtctgctcggccctggctgatcgttggctggcggtttagattgacagactgttcttttttggtgtcattctcagcttctggttggtgactgtcctgggtttaggaacggttgggtcgtaa

SEQ ID NO: 5281 - DNA, 2118 bp, Emericella nidulans
cacggcggcttgggaggggcaattggtccgtcactcatattgagaaagcgttgcgagtctcaagatttctaaactcccaggaaagttagaaaatgccactgaaatgccaccgggcaagcgaaagggggaaaatgcagttgcttggtggggagacgcctgcgaacaaggccggcacgtgagaccgtagtgtgtgggatttaagcttaccgttgtagtggtggtggggtagcttgagaaggaggggtagcagaggttaacgtcggagtaggagggagaagggggatgacgcgtatgctgggtgtaggaggaggagggggaggtaggtaagaggtgaagagaggaagagagcaagagaaagagggatacagtggaagaatggtcgagaggaaaggaggagactggtatttaatgttgcgttgggctaaatgaaattaatggatttaattgttgaggcccgctgtccggctgtcgggcggaggggatgcctcccttatatggcgaattatgcgcagcctatggtagggactgagtttccattctaacgaggttacgaggttacgatattacgagcgaataccccgactcgacgtgggcatgagcctgtgaggttggtcccttttccgggtgaccgtcagctcgccggttccaggttcggtccacgggttcagtgggagctttccccagcctgggagattctggtattgggtcactagtcacggaccagtcaatccctcatctatgcttgaccacgggtgcttgacgctatggaggcgctcgactgggttctggataacctgtctaatactactgatggaagaatgtcgtcctctgtcctgatagccagccgctactgagagacaatggatcgtccccctgcaagggcgatgccggagcggttcaagtgtcatttgccccctccacaaaactaaaatcgagcagactcggccatgcggggcttggccgcctttgcttctggtttccgttgctccggggcgatccgccaccagtctcaacccgaacagaggtttgttcaagttcggtacgctaattacatcagagggtatggaccgaggatacgtctgcgtgcgggcaagagtggatgtccgaatttcagacgaagagtgcgagatatgtccgatactggagtcctacggggaggtctacgggagtggtacgggggccctacgagcgtcctatggggagatgtacagaacagtccacgtactctgttaaggagtactaaatcattggagcggacggcgaatcagggcgcgtctaaaacccccggacggagggatgatcacaagaacgccagccaagcatctagtactcacagtagtgctagtgaactagcaggagtccatcagaggtgcggggaagcaggcgactcgagctcgattttctccctgaaacaggcgatatcgaaccatttcagccgttggagcccgtttgggcccgtttgagtttcgatttgagttcaggacggcatgggtttcgatcatggagggcatcaagcaatcccgttacaaccatcgacctgggcatcgcgagcaggggtcctctggatcgtacggtactgtttgcggaatgcggcatgccccctgcccctccgctgtctactgcagagcggcacagcccaggtactgggtactgtacgctatttccacacgcaacgtcgcaccactgaagattaggatctgagaagtcgacttgattttcgcgcttgtcgagcatttcgagattttcgagattttcgagataattcggaaggctgagctaaccgtcggtcccgcatccggaggtaccaaacggccacgcagcgactcagtccgcaaccagcacgcggcgaagcactatcagtctggctgcgtcccacagaatcaattccaaaccgccggctcggtttagtttcgggctacagggctacagactcgtgcatccagccgccagtgcagtccgtgcgttcagcccgcttagtagtggctcatctacggacgatgctgtctccaaccactacatcttagaatcatactcagagtagtgatcaacagatcagagtgatcggaaaaagggaactgggatcctgggtgtggatgtacttgatatacttcattatat

SEQ ID NO: 5282 - DNA, 4577 bp, Emericella nidulans
gtaattatgcccctcattgcttgggcagtccggctcctgtaaaacacgcccggcattgataattgcacctctaatggtcgttcaccagcaaaggcccgcccgtgttcattttttagactgaatggcttcccctgggcaaggaaccaatggcaccatgcgacggatcgagcggagtggtgacagcagttttcaccagggggccagttcatgactcgagtagataccagacctaaggctcaacgcgaacatgagtcccgatcggtactttcctgatccagcaaaaacatatcagaacagggggggggaagttgccctgagcggcgttagtggaggacaaggtagcagcgcacagtgccgtctccacaaacccatgctgctgcaggcttggtaattaccttacatgaccgatatcgcttctgatactatcacgatcgatggagaatggagggatggatccatcccgtctgatctcctacctctctctctctccctcctcgccttctgcatgaaattccatgctgggacgaactgacaagtcaagaatggacacgcgttgatcgttgatccatgcctccggagtcgtccttcttgcacaactcgaagtgcgtcggccttgtccgtcaacgcggacgatcgataatacgactaccctaaatactaataataataatactacgactccctgctaccacgccaaaacacatccactccagccactatcagatcttgctctcagcccttgctcggttcccacccagacagccgacagacagactgagacagtgagacctgagagaaacctcactcgacctgcaggaccgtttcagcctgcattgacagccgacaagtcgacatttattttgttcactgtcttgctgtctcgctaatcctcgtgctccagtcccactggtgttagtgttaccttgggtctcagcctacactgctacctacttgaactccatcatccgataccgaacgatcgctattgctgctgtgttctgtgtcttcagtgcccttaatatcccgataccgtcctcatggccttctagattgtccccatgcactgataagcttatatcacttttctttttgaccaccaatcttcttctgcatacacaaccttgatcgtccttccagactccgctaggcaaaattgcccgacctccaaccatgtcaagccctctagtcaaggtcctgcataggatgcaggcgctcttttcgaacatcgtcgccgctctggagacgatgttattgttcccgtcgttattccgcgattcttcacgcgggggagggaagtcccgtgcagctttccggcgaagacgggctcttgatgccttggcggatgagatcgaaatcattttctccaagcccttaaccctgaagaacatgcttgcaatgtcagagaagatccgcgagcagtttagggcgggtctagaatctagccccatcaatatgttgccttcttataaccatgctctacctactggactcgagcaagggacatttctcgcccttgacgttggcggctcaacgatgcgagtggctctgattgaactttgcgggcaaggaaaaatggaagtccttcgtgtatcctcgtcactgattgacaatgatgtcaaattgctagaggggacttcattctttgactggatggccgagaagattgaagagatgctacgcgaggtgggcaccaactacggacgtgaagaagctccattatccatgggattgtcatggtctttcccaatcgagcagacttcgatcagcagtggactggtgatccatatgggtaaagggtttcggtgctctatgggaaccgttgggcaggaattagggtccctcatcgtccaatcgtgtcagaaacgcggtctcaatgtccgcgtggacgcgattgtgaacgacagctctgccgcattgctttcgcgagcctacgtcgaccccacaacccgtatgtctctcattcttgggaccgggacgaatgtggccatacatttccccgttcacgctattgggctcggaaagtttggcaagaggccacaaggctggttcgactacgctaagcatgtcatcatcaacagcgagatgagcatgtttgggggtggagttctgccaatgacacggtgggacgacatactcaaccgcacccacctcaggccagactaccagccactggagtacatggccacggggcgctacctcggcgagattgtccgactcatcattgttgacgcagttgagactgcccaactgttcggcggagaactgcctcattcaatgcgggatgcgtattcattagatactagcatcgttgcctttatcgaagccgacacatcgcccttcctaacagcatcagccgcacttctccagaaagaacacacaatgtctaggccgccatccccggaggacctacggtttctcctgcgagtatgccgaaccatctccaaacgagcagctgggtatctcgccactgctatccacagcatgtggtgcctgcgaaatgaagccgaaatctcccaggggcctccgtcgccttctttcaaggggcctcgggacgttaccgtcacggagagcgggagcaactctgactgcctgtccattgcatgcgacggcagcgtcatcaataaatatcccggtttcagagatcgctgccaagcgtatctggaccaattgacgcaggagacaaatacgtccaaggtatcccagatttcagaggaaggctcatgcatacgtctggagcctgctcctgaaggtgccatattcggcgcagctgttgctgttgcggtcgcggtggctggaaagcttgagcaaacgatagtgtgagattgtggatccatcgatgatcaaggataatttgcattgaacggagttctctctgaattggggcagtgtctatatcttacatgcttgattttttgtatgcatctcatcttaattgtgcggtattcagggctgggcatcgtgcttgcttgcatacaccgctctattaggagcattggcttcaaggtggtcagatagaggtagcactctgtaaataacgataattcacatgatattggattcaacccagccgctgcttgtacagttccagatgcaatagcgttcatacagacggtgccgttgacgtattcgaatatagctgttccatgaccgcaccggcgtcatcgagtttatatcatatagtcatcgctcggcatgacagaatcattccttgcagagatcctgtagcaactccaacatccgccgctggagggccgacaattcatctctggacaggcgaccctgtctatcctgtgtaccaggagtgggtccagaggaatctcgatgtccttgattctggctaacagtctcgcccgcaataagacttttgttgatgcagaagaacggcacatctaatgctttcagctccatcatcatggcgtcagccatctgcttcgctgccctatgcactttgacatcgtagttgcggatctcggcaaggtcttcttcggccgtctgttcctgtttagtttcttcacaacaatcttttgccatggcaggcgcgttgactcacagaaacttccttctcgtcaaccggcgcgccgactgatcgtctattgatgttaatccggagttagaagaaatggcaacggaagggagtaacaggtccagtcaggtaaccctaggcgagtaagtaggcaaagagagacatacaaaacctcatccaactccctcttcttctccttcctcgcactctgcttctgaagcagcgcttctcggcccgtccaccactgcttctcgtggtcgtgctggcgctggataaggaagcggatgcgtcgctggatgtcctcattgtgggcgacggtgcgcataacttgcttgagggctgcaggccatgttgttatcgacgatgagggttcttgattttggggttggggcgatgatgatgatgatgacgatagaggggtctttctcgggtagtgagcttgtgcttgggctacaggaggagggtgagctgggggtggttcgtagttatcgtcttcattagcatgattgtgattggagaatgcggagagtgttttcagaacggtgttgaggtcgggtctattgttctgggacattgtacgtttgtactgccgtagtagataggcaatctgaggtaaagatcaagagatattacaagaccatgctgattatgtgaagagtagtatgaatagacgtagactacagaatacagaatagacttggggtggagtcttggcgatcaaccgtggaagacgcggcggtcatcccaacgccggctgaaaatttcccggttcccaagacctccatcaacatcatacctagctgtcgggccctgcagccatcttcacaaaacatcgtttccgtgctcagtcacagtacagagtactaggagggccgtttcaaagccttcacctattatctactctctcccctcatcttccgccctgtccttccgaccgcatcacaccatgtctcgatccgccgcagacgcaacccggttcacggccacggggccctacgctagctcaaagcccagcggtgccccgtacaaactccccgggtttttagcgaatgaa

SEQ ID NO: 5283 - DNA, 4613 bp, Emericella nidulans
aacacgcctatatatatgaagaaaagtctagacgccgatactcatgcaccccatgatcacagcgaggctcttgtattttgctcgcccatccagctctctgagtgcccctccatcccggtaccaagcaggcctgcccttcttcacgggtcaacctaaactttagccggcttttcacccgttgcatcatgaggcaccattgccaatttacctctctactgacctctatacctcgctatattctgatcctattcctccgcccgcccggaccgagatacgtacaagacacagcctcctgtcgatatcccgcggcttgcaaaatgtcagataaataaaacaaaagaataaaaaaaataagcaaacgatgcctttagtctcgctatcatgccttaccgtcaacaccatagttcgcagcagcaatatgcagccgcagggcacgcctcgcaagggcgggacagggcaagaggctatgcagtaggctaactgccatacatagacattccagcatcgctcgactggctttcgagaactgaagggaacaagcacgtccctaaactttattaacatacgaagcaaacccattgggcgccttgccgtaagtgcaagcgcgtggataagcggacgacgattactccgtcggtataacgcttagccctccttaagcccgaggcgtaagcactgctgcagccggctgatctaatctcccacgttcggttgagactaacagccagggccggccacgagcgttgaggcagggctgagacagagctgagacaaggccctggtagtgggatccgcttgaagcataggatggggaagtatatctcctaaagcggctgcctggttgaggctgtattcgtattcgtgctcatatcaacttactcagagttgttacttttcaaggggtcgctcactatgaggtatatacgtaagcatgtcttgcgtcagtctatatattcgggatgacgaaccgcgaccaaatagtcgactctccactatagctcccagctttgaagactcagccgagactcctatctatgtagtgagatgggtgggatcagcatcgaagacggacagatggcaaacgagactgtggctgagctgtcctcttgccatcgatcctaagactgtagggtctgcccacaatgaatcataacgcctgattatgagcttaacaaggatcacggcaatgagggatatactttggtcggtccctgtaccaaatttatctacgctgtactactaacggaacgagaacacccatgctactctatgcccgtagaacggtactatggataggctatttctgagcatgatatagagagcgcctatttccgggtgtgcattacaagactattgcaatgtaacctgcaaaacacttgtcgtaccggcttactagtcttatcctatcggatgatttgacggcgggtgcatcggtaagtgtcagcttattctctataatttatatatctcgaatcaagagtgcttactgggccccttccaccttaacccagccccatgttccattgcagcctgccatgcccaggtgtacccttttctatgttgtcagcatttgctaatatgaccatgttaaaaagatacattacgcttgcgcggcgcttcttaccgatttgcgacttcacaacaatgaggaatagacctgctgggcctgaggctgagctttaaaagggccaacagttgatcctaacagttggcaagttacttgcattttctaattctctctttcttttcttttcttttccatcccttctctatctgggtcacttgacagcgcggtcctcctcatgcttctaggttgcgttggatgatgtcatggctttggctgcccttacggctcgcatttgacgctgtacggaggtcgaatcttggatcttgactccaaccggtgtggaagttaagccatttattatctagtctgccagagaatttgtagcttggcgggtgatcagatgcattatgcgataactctctgtagttcgagcaggttttcacgatgtcgattacatcaagcaaggtcaaagcgtaggagctctaatgctgtatttggatatcaagatgttagggaatagcctaatctattctacccgacctaggcgcgattgaccagtcactctgagtggctatatgctctacttatttaagagaacgaaccatcataattcgtccagactggaagttccaggtcaacaactataggaccggggtggaacttcctgcctccatggtgcggccagctggttgccatgatcgcagcatttacgatacacgtctcgcgtttgtgagatcggtgatgctctgcgcccgtatactcaacttcaacgccgactttggcttcggtatcggattcgcttgagcgcacatctgctgtctgaccatagcctatgcccggccgctgatgtggaagtatcacgacatctggtgagtcgagtgacgggaacagcgatcccgctcgagaaagaccaaaacccacgttatcgaggcgaggggctcgtttgcccgttagatcgacaaggcattgctttttgctcccttgagatgggagggttccctgggtgacttggtctctgacgcgtttgcttccaccctcatcgccctcgttagttgcagatgcggccgtagatgccccccaatggacccgtttatagcctcgtccctcgtgaacatgtccacaaacagcaagacacggtctaacaattcgcagcctctcccccaaagctggacatcccatacgtttatccgcctcagaactagtagagacattgtcataatcgcaagcaaaacgaggcggcgtatgcgtgacgacgacatctgcgtccagtggaatatcgcgccatagctcctcagccccgtcaggctcgtataagaacgcccactcaccgtcgctctgtgaatacggggagccaaagaccttaaagactgtgtttggaccaccacgccttgcggagccgcactagtgctgactggtgctggaggaatacgatcgatgaggaggcggtggtgattgttttaaggcattcttctggatcttggcggtgtttattgtgaaattttgtgctattttgactgtagaagggagcgtccagggttatgtcgtggttccctgtttgcgtccgcttagtcgctggccttcggtataaaagcggattgttgtctatgaaccttgctgggcgacggataaaatactaaccacaaatgacaatcttgatttcataatccgcagtcgcaatccagttcatcgtcttgcgaagttcggaactgctaccctgatttgtgagatctcctgcgtggatcaaaacgtcgcccgcggggagtctgaatcccgcttccgaaggcgtgtagccatgagtatcagagacacagacaaaacgagttttccggcgcatcttcgtatgaggtgtggtatgcgagccagtttccaatattatgacaatatatgtggttggtagtaaacatctactcgcaggcaaggcacagcaacggaatgattcggtgttgccgcttcttaaggggttatgtaatcaaacggtggtcaccctaaggagtactcttgcctagtcatgacttgttttaatgcttgctttgcaagtaatatcagttttcttgtgaagcatgttgtgaagaaaaatggcgcaaagcgccgcgtggcccgggacttacgatcaaggtcggaaaagaggtctgctatagattccaagagccggaggtcggtattgaaagtctgcgccgttggagacgcaatgagatatcgaaaaagggagaccacagcggtcagtatatactgagcatgaatcctaaaaactgtaagaaactgcttatgttaagaaacagatagccacacacaccaaaaagtatgccagttgtgggcatgccgtatacggcataaatagaggagtatgatccgggactcttggtggaacagctccgcactagaaggtaggaaggaccaggcctctggagaagacatttgtgtactgcttgctccatggattcttcgcaggcgaaagtaataatcgaggtgaaggttaactccgcgtagactcaagtcgtgaaaagtatagtcaggtgtattccctgtcgcaaaaacatcaggccagcagctattcgggaagctggacttgagagcgcttagttcttcatcgagttcgcgaatacactggagtcttatagctaccggctgagctcggctatggttggagtagaggagagtgtggattttggacttgataagggacatacggagatcggacgggtatatgacaggtttgaaggacaggggccgcaggaaaaaatggtcgtctgagcaggattcaacgtagccgtccggcggctgtaagtccaagtcaacgtcattgaacagaggtggtatgctaaagcggatggccaaggttttgtcagaaccgtagatataccagaatagagcacgtagatgttcgccctcctcctcacgaacaacagaggctcgatgagctcccaagctataggtgattggaacggcgactgccagtagtgagtccacggcttttgtatgaccaaggggtactaaacatgttgcctgctgttgatcacccttcatctaatcagtattaatgttaaag

SEQ ID NO: 5284 - DNA, 6227 bp, Emericella nidulans
ggactatacgaaacgttgggggtggatcctgagcctggttccggaatgccgttggactgggtggaaggatgtgccatttgtgttgctatagtgattgtggtcatggtcggctcgctcaacgattaccagaaggagagggcgttcgtcaagctcaacaaaaagaaagaggatcgcgaagtcacggttatacgatcaggaaaggcagtcagattatccgtacacgaggtgttggtcggcgatattttacatttggaacctggagacttggttcctgtggatggaatattcatcgacgggcacaacgttaagtgcgacgagtcttcagctactggcgagtcagaccagctcaagaagacaggtggggagcaagtgatgcgattactggagcaaggacataccaaacaacaggatatggacccgtttattatctccggtagcaaagtcctcgaaggtgtcgggacttgtctcgtcacatctgtcggggtgaattcgagctatggcaaaatccttatggcaatgcgtcaagatatggagccgaccccgttgcagaaaaagctggatcggcttgcgagcgcgattgcaaagctaggagcaagctctgccatctttcttttcctgatccttctcttccgctttcttggaggattgtccggcaacgatcgtagcggtacggaaaaggcatcccaggttactgatattctcatcgttgccattacggtaattgtcgttgctgtccctgaaggcctgccattggcagtcactcttgcgctagcattcgccacgacgaggatggtgaaactcaacaaccttgttcgcgtgctaaaatcctgtgagacaatgggcaacgcaacgacagtgtgttctgacaaaactggtaccttgacaacaaacaaaatgacagtggtgaccggcacattcggagacgaggacttcgacgacaagaaccagaccggaaaaacacgccggtcagctgcatttgccagttcgcttagcccacaacagaaatgcatgatcatcgagtcagtcgcgatcaactctactgcatttgagggcgaggagaacggggttccaggatttgttggctcaaagactgagacagctttgctagggtttgcccgcaatgtcctaggtatgggcccactagctgaagtacgagccaacgcgacagtcgtgcagttaatgccttttgactctggaaggaaatgcatgggcgctgttatcaggttgtcagataacaagtacaggttcctcgtcaaaggtgcctcggaaattctcctgagatacagctcgtttgtttggaggccgagcggtccggttgacttggtgtcgagtgagcgggaacgcctcgaacaagtgatccttgactacgcgaagcagtcacttcgcactattgctctggtctcccgggagttttcagaatggccaccgagacatgcggttgaccctgatgatccatctcaggctgatctcggtctgcttttgcaggacatgtccttcattggcgttgttggtatccaggatcccatccggcctggagttccggaagctgtcgccaagtgtcatcatgctggtgtcgctgttaggatggtgacaggtgataatatggttaccgcaaaagccattgcaactgactgtggcatctacactggaggaattgtcatggagggtccgcactttcgtacgctgtctgatgccgagttcgatgaggtcctcccgcagttgcaggtattggcccgttcctccccagaggacaagagaatccttgtcaccaaattaagggctttaggtgaaatcgttgcagtgacaggagatggaacgaacgacggtcctgcgctcaaagctgccaacatcggattttccatgggtatcgcagggacggaggtggctaaggaggcttcagctattgtgcttatggacgacaacttctccagtattctcacggctttgatgtggggacgtgccgtaaatgatgccgtgcgcaagtttctccagtttcaaatcactgtcaacattacggccgtgcttttaaccttcatctcctctgtggcggacagtgagatgcggtcggttctgaccgcggtgcaactcctttggatcaaccttattatgtaagtctcttcggtattccttataacaagtattattaacccgatcagggactctctcgccgctcttgcgttggcgacggatccgcccacagaggagattctcaatcgtaagcccatcaaaggtggcgccccgctaatttcaatcacaatgtggaagatgatcattgggcaatccatcttccagctcattgtaacacttactctgcactttgggcctcgccaaaacttcctcgactattccgatgacgtccgccgctcaatcgtcttcaacacctttgtgtggatgcagatcttcaacgagtttaacaaccgtcgccttgacaacaggttcaatatttttaccggcctgcaccggaactggttttttatcgggatcaactgtatcatggttggttgtcagatagtgattgccttttatggtggtgcggcattcagcattgttcaaatccatgatgaacaatgggctatctgcattcttgtggctgccatttcgctgccgtgggctgtcgttgttaggctcttcccggatgcttggttccatgctattgcaaattttgttgggaagccggttgtgatggttcatcggccggcgagtagaggggcaaggagactgggagcgaagatcagggttttgcggcggaaggatggcaacgacgatgacgatgcctgtgaatcagaagaagagcttgagcctgagcgtgctaatactgcacagagccctgcgattgagagatctggtgaaaataatgcttaatggtgctacgtcgcttattgcctgtttttgcttgttatgcaagtaagtacgtgacaaccgttctatcagagaccccaggggacatgattcttcagacttcttagcataactcatgcttgattgactgactgagcatcctcgattctgtggcagctcgaggggacgcgctcgcatgtgggaacgacacgggctcccgtcagcccttagcagtgagcggtgacatcactgtgtcaattatctcttagtctttgcgtcctttcattgtgtggtagtatctactcgatgcactgcttggcatctgctgacgaaaggattttatgaaaaagcagcacgaccaacctgttttctcagtcgtcgtcctccaaatttgcattgtcacatcccattcctcctcccatccagccaacaaagctgtcataaccttgggatcgaccctttcatgacctttaccgcgacgtcccaggggtccactccccagggctttagcctctgcgcgaaaaagagccgaggtcagaactcgaaccaaattctcacgcatccaaatacagcgaaccttgacccgaaagctgtttgtctgatgattgagcacagtagctcttgagcctctaagctcttaatactatattatatgtgctgggttggacagtctctagtagacttgggcctaacgaatgtcgaatgtgaaccaggaggtaaaactccacatgcccatgaaatagttaacgtattcaaagcgcaatagtaggcaaggcaatgatggaaagacgatgccagccgatgttgaacagaggctgtcgagcttggtaaaacctatttaattaaggcaaatccctttgatgtgaagagtgaagaatatagaaaacttcgatcctttcaggtgacagctgcacgccatcgatatattgcatctgcaaaatgccatgttgattcagaacactattctttgatatctgaaggcgctcatgtatgatttactccagataggggacggttgagcaggagtatcccgcatctgcatcccacgccaaatggtcacgccgaatcatctacttacgttagagcttgctgcaactattgtgacagtggtagctatgatctacgcgaaatccttgtctacatatgtaacagttaagaaatgacacttctgtctgaagttgctcactcatagtatctgaattggggatagatattctcacatagatattctcaatctagcataccctgtctgggccctagccctaattggcatgaattattctcacacttacagtcgtcaaacgccatgctgcaattgggaaatctttgcatgggctatgaccaaattgctattccaatctaggatttgctttgcatgccgggaatctattttccattatctgccctcgccatgggaagcttagctatccctaggagttgataaagacttcttttgtgtgttacttcattaagcccatctagtccagtattccggattcataggtttaggtctgtccattcctctgggctagggctacacctctcaccatggctgcgatcctctctctggacctgagcaccgtctcggcgattttgattctttacctgcccagcgtgattctattgcgacgatatcactccttgctgaggagtatcccagggccttttcatggcatcgtacactcggctgtggcatatcatccgcatattcgttggagacattaacacccgaagtatctaggaacatgaaagacacggtatatgcaaagtcatcaggctgtctgaaccacctctaacgatgctaggtccgttttttcgtatcgcacatgatgaagccagcgtttgtcgtcccgacgctatacggactttgttactgaatctgattccgaaggtacgcttttggccatcctctctgcagctcatatccaactgttctagacaggcatcgtggtaaaaaggtcttagccttgcctggtcatagattccaaacactgatgtccacgactgatcccagacgacgagtagaactagcgaagaatgttgcttctgcatatactctgtcaaacgtcatcaagtctgagggatatatgaacgagacgatcagtttaatgctagacaagttcaacaattctctgacaaagagcagtccgtcgagttcgaccactgcttcaactatctaaccttcgacgttgtcggcgaagtcgttttctcccagcgcttcggcttcatcatgggtgtaaaagatataggcgactcaatagctaactcgcgcagtctgaatgcttatatcacggcagcaggatgtttccagtgattgcacaatctcacccttggcaatcttccgtccaaactgaatctgctgcccaataaccacgtcttcgataccgccatggagctctccaccggcgtgagacaaaatccccatgtgcgcaacgatatggtagagcactggaagcggacattgaaggaacattcagaccgaatgatgatcactcacctccaagccgtggctactgggacggttggtgctggggctgacactgttagtgctgactgccgtcatttgtgtaccatatgatttgcaagccacagtatctgaaaaagctgcgcgcagagatcgccgcagagagcccagagacgatgaaatgaccctgtgcttcctttgcgcatgcgcagaacatagagtatcttcaggcctgcgtatgccatccctcttttctcaaggcgaaagcttatcacctatagatcaaagagtccatacgcgtatttggcccagttccatttggccttgcgccggtagcactcaagggtggattgagtatcggcgagcgtcattttcctgaaggcgtaggctctttctgctccagatgctggttcagctcactgactagaagaagacaaagctgagtgtcaacctgtaggtcgtccattacagcaaagagctctttggctagaatgctgcagagtacaatccggatcgttggataggagagcgggcgaaacggatcgagaagtccttcataccggtgcgcttgtcatcttggatctacccatggatgaactaacggctgtattgtttgagcacgggtatattcctctcctgggcgtcacctggcgacgattggactctcgaaggtcatcggttcgtgactacgatatccgtcagcagaaccctggccagccttggaagtatacggcgtacttcactaccgtaccgtatggatggccttgttatatttctataagagagaagatggtcttcgctagaggtgctggggtcgcattataaatgcttgacaatggatttgcactagtcaggaatgaatagatattgtaccctgtgactattgcctgtcattagaagcctctgtatcagccaaattggctac

SEQ ID NO: 5285 - DNA, 4450 bp, Emericella nidulans
  unsure (1)..(4450): unsure at all n locations
aaaaaagggtatataagttccaggtggtcaggacttcgttctctcttaaaaccggcccaagggttgatgttccgatcaaggggtgcgacatgaggtttcaactgaaacgggcgtcccaaaatatgatcgaagcacccgtggggttcagattaaagatcacgtcaaccgaccacaaatcacactatgcctcaatctcttgctagatacgcatttatgactacgctttgcgggatatacctttgctggtgtgggttttcaaaaagccaggttaagaaaaaaaatgcatcgacgactgtgctaaacagctacaaccaaactactaatgattactggtaggcatcaattcgtctcctccaacttttagatacgcaactatgaatgttgcctcctaatgaacacatttatggcgctttgtttattgattctgtcagatactagctcccagctgatctgaagaaaagctcattctagtcgtgctctgtactctgatgtcacatacggaactccatacgccttttaagcaaccccagaaggattgcctcttctgatgttatcaaccctgcgagtgcccattagcaaataaacagtcatagacagagtggttgagtctcataagacatacatgctgctcgaggcaccgccgccttcaacatttaccttctccgtgcttgccttctccctttcttgcagagcgggcgccttgtttcgatcgtagtgtactccttcagctaatcgtgactcattattgtggtgtgaattttcgagatcttcccctttagccctgtagttgtctacgagagtatctgcggtgaatcttcattagtggactgttttattcgacgaatccaggtcggcggtaacttactagcagaaggctcctgcttggatagttccggcagatgaggcatattgaatgtacgaactgactcacttaatgtgctaatttagaagaaggtatccaagttccagtgatttatatactctcccaggttgatgagatcgaactaggtcgccacatctgcaaagcgacaagtaccaaaccaaaccggtgctctgtagtgagaacagaaccgtgctcagtgtataccgtgtgttgaaccttggaaccgatgaagtaccaaatttattcaacgaggtttctggtgtgctggccgatatactccgtagccgtatactataggatccgtctggtccagtaggtaacacgcctgtcacacacatctatatcaacaacgtctatccctagagatacaaaagcgttgagcgtctgggtcgatgtaggcgcaatgtatcggccttggtagaattgtcagcctctaccccgggccgcgatttcctgaatatgtctgttagtagatatatgccttctttcagataccacatgtcccgcgtagtagagcttccgcttgtcgaatgcggcaattcccataggctcatttgtggtacgagctggaaaacaccctataagattacaggctgagaaactcctgtgtagtcgatattctgctatggtcgctgttgtttcacaatcgcttgatcaacgggagcaaacaagatcagtaataccggataattttttggactatgaaatgatatatatccgccgtgatacggtcagcaaacgactcgctatgcccaatggcgatttctgtcttcgattagcattgcaaagtactatccagaagccaagagatattcatatttctgtggagcacgtcagcccggatctggtattgccatcgggcgacaaggcccggtgtttcacttctatgcttgagagacagaaccccacagtccacagcccgcatattttacaggcaaacgtatttatagttttcagtttcaggggaacctggagtataaaatcacaataaagttcaagaatgaaatcataccaagcacaaaatcatgaagcgaaatcgtggctgcttcggctccacagggctggaggccgccgaccactcacagaagaaattggccggctccggcaactgagcacacgactccgagtttccgactccagtagcaaggcttggaccttgcgagttggggcagcgccaggcttgcgtattgtctctgcctattaataacgtatcatcccgtactgattaatcttctcttatcaatatacagcacttccgacattcttttccttattattcttacctttctgtttcgatactcggcgcaccgtgtaaccgcgtgttccgtatgaaatcgcagagatcttggccgcaaagttaaggctagaacgtgttggtttaccgcaatgcggttgtcgacatatcccatcctcttcgccttttgcgggctggcgtcagttcgcggtgaaggcgaaatcacattcgaggatgtgagagacaaattacccaaaacttacagcgggcagggaggggagcccggcccgaaatatttcagtgagttcctccgggaccttcgcgtcgagtggcactcgattgctacgcaggaaccatgttactgatgagatttaatagaggaatcttcgtatgttgtcttttagatcccggggtttcaacagctaacgtcaatttcgaccagcttccattatcactatgacgggcggtgtgtaccccctatctcacctcctggccatcatctgactgatccccattgcagctttgcagagagtgtccttcccgaagaagaaaccctcccgcatctgtccgcgctcattcagacgtacttgtcaacgatggccgatcttggtgccgaaacatggataatgcacggctcgcttctggcttggtggtggaatcagaaggtgatataattcgaatgtgtgaatatgggaaagtttttgctgatccggtccagatcttcccgtgggacaacgatcttgatgttcagatcaacgagcccacgatccactttcttgccgactactataacatgacagagcatncattttgatctccctgacgttgaaggcgggcgtacctatcttctcgaaatcaatcccattatgtcgttcggtcgaagctggataagcgaacgtgatcacgggagatggattgatacttccttcgggtatttattgactcacggctgtggggcagataataagcgccaacgaaacggtcaacctggcgctcttatgtgcaaggatcgtcacaactttatgtaagtgcttgttaaatcaaatcgactggaacgacactgatcccttttaggagtctgaaatctaccctctgcgaaacagctatttcgaaaaacgtacctgcgaagatcccgtacgcatataccaaacttcttcaagacgagtacggcgccaaagccttgaccaaaacaaattatcaggggtgtgtcattcttcaagaagtcgagttcgttgtctcgacataacatgctaacatctttacagtcatgagttcaacgagcagacaaacctttgggagaaaatcaagtatgttgtccatctcgaaatatccatggtacctctactaacagttttttttttgaagaaaccataaactgctagcgcggcgacgaaacgtttccaagattccggttcgaactacgcctcttcatcgtttatacagcccaccagataactagggcattgtctaacctctcgctcccttaaaactcgaccatatataatgaggtcttgcatatacccggcgttgtgtattgttcaaattttgcaagttatgttggcgttgtcctttttaagacgcatgcattgtggcctattgcagcccttctaaatctcactatatctttgctggcaataccctgtggtcttgatataatggccgactcgcttattctatgtctatatttagcataattgtacttctcaatgcataagctcttccatttaagttctttgccattagatcagcgtacggtgtagcctggcctagtttctcagtaaaagccaaacaaaacataggaaacgccgtactctagccttttcagtctatgtgtgcagtgtgattcaatccctcatacaatgactagggacattccgttaatcagactcagtctcttgatcttgggacctcaggctatggcaacccattgtagcatatcgtaatatctgagagaaattgggttgaaatttgagcataaacttagcgtttctgtcttcaaactcacagcttgacaggtgtcatttctataattcaaggatgtctatattagtcaacagattaagcgtgcggggaactgtatttcgccaatgatgattgtctccactctgatttgatgcgaagatcaatccactttcactctccagcctttgttccaaagcttgccgggaatcattgtgcagaccctcgagctatcaggttcatctacctgagcgagggtggcagcaaaggatgcagctgcagtgttgagtgtgatttgttgcgctcgatctcgccgtcgctctttcttcgttgtcgtctaacgcgcctcttcccaaatacctggaagctttccc

SEQ ID NO: 5286 - DNA, 4536 bp, Emericella nidulans
gttttgcacgtctccttgacccccctgacgaagccacacgacaggaagcacggattttggctgctcaccttaatgctgggcgagaaggacgggtcctgacgagacgtcaatatcaggcacagattgaacggcagagggcgcaggtgctgctaggtccgcatcgctctcgcctagcagcaggctcgcgtgacgggaatcaaaagcccagcgcacaggaggagtccgagatcttagagaaacttatactggacaagcgctctgcaactttggcgagcgcggccaacacagaacaaacatgggagaccggcgcgtctggcttagggtccagcggccctccatgtgttgtctgccaaacaaattcccgctccattatcgtctggccctgccggtgtctttgtatatgcgaggattgcagggtaagcctggcgatgaacaactttggaagctgcgtgacttgccggcaggaggtgggcgggtttgtacgattatgggtgccgtagggttattatagtagccctgcggtcacttgtttcctgttcttgtatctgatatccctattcactacttttcggtcataatatatcactgcggggcttactgaagttaattgttatctttggaaacatgcactattctatccttaccttcaggttcaaatcttttgagccatccaggacaggcatctcggcctatacgaaaaaacgtctaatataaacgtgggtatgtcagaacccaagatcttctacatcaccatattgccgatgttcaaactttgtcctgcaactgaagggtgaactctgacatttagccacactagttgtgttatgccgtctggtgatgaatcttctagacctggtgtgttcagtgttaagaggtgtggtggtcattcaccaagcaagcatacatatgtacttgcattcttttaccctagtatgcattgtcaatcagtattagttttgtcttcgttgtctttcaggcaatcctcttgaattaaatcctcctgaatgttccattttgctaatcattatattgtttctagtataaaagataccctgttgttaggaccttgacacgcccctccgcacagttccctgcacccactatgtcttccatcaatcgcggagagagtgaccctcactcctcggggtatgagggcgatatcagcgaccaggtctctgagactcgcgccgttgccaatcctgacactgtcgacgagggtagcagcgagaccagcgagaccaatgagcttgagactggaaccatctggataggctgcgatgtgcgcgacgccggtccaggagttcaaagcgatgaggatgccgagtttggaaccattgtgatcggctgttctattcgtgacatgggcttcgagagctaccaggcatatctgaacgcagatgaccaagcaacggttgagcacatcgagaacatcgacgagatagcggacgtggaacactcaagtactgcggccattgacgccaacaacaagaaattgataagctgtaagcaacaatcttgtcatttatttcttccccacctctttttcattttcttctctttgtccttgtctttgcttttcttcttggtcttcttcttgttagctttcttaagtggactagatggtctttgttcgactaatgcgtttcctatctctgcattgttgtctcgcgccccttcgccacgggcttctttatgcttctcatgatttggaatgggatcgttgccttcctctttggagttcgctcgctcaggtgtgtctcgagacgatgcaacatcctacacattccagcatgtcagagcccatccgcattacgtattcatggcagcatactgatagtgaaacctcacagaaaccggacacttaccgagtccgatccttctcctgtcaatcccgcagcctgaaccagacccgcccaatatccaaacatccaatgaccccaggcccagggacggacgcgttttctcaaaaatccgtaggccagcattcccagtcttgctgtcatctaagcacgttgtcagcaccgattacaatacaatcataatattggaaaactcacaaccagaatagccgagaaaagaatgaaactcaccaaagccgacaagacaagatcccatttggaaaacaagatttgaagaggtccgtctcccccaaggacgagattgtcaagatattgatacaaaatccaaccagtatgcacaacgtaaaatacccatgaaaccaagtctgacaccatgacgagggtgacaaagataaccatgaggtacgcttggaggccgtggccagaattgggctgtggtgctggttgtctgaacctttggaacacgggagacatcttggatttcctgtttctttttggctgggctcgtttaaacggccggccttgtttcgggaagttgaatgtcattttatgttggaggccgggcttggaatcttggcttgctggctcgttgatgggttgaggaaggcgcgatgagactcagtgtaaaaaaggaaggaacaaggaagtgatagagagaggccaaaatcatcatggtgatagtgttctcggcgacgactaattgagtgagaaatgagtgaataggcccctccaaatggggtagattcataatagctgcgtgaaactgaatctctagcctaacaatgacttatgctgatctaggggtaaggatgtgcaggtagaagcttggattgtgtcagtcttctagctcaagtatgagtgagggctttcatacagagaagtaagtaatgtgcagacatgcctccaacaaaggcattttcttttcattaggcatagatgggctttcaccttccatttcatttcctaaaattactgaatgggatggttaatgtttgataagtgcagaatatttgatattgagccaaactcctccatcagcaagcatacatttccgccattatcagaattttaactcaaataccaccaatttgattctcttatcttgtcgcccggcaatcactcgctcgatcgaaaaaaaaaaagccagtatcatgaccttttacatcaaataaccagctgcaatggcagccgccgccccagctaacctccctccggtgcggaaagactcagctcctccaaggaacggtggcgaagtactaatgacattcggcgtactcagctggctcgaaacactaggggaacttggagacaacgtcggcggagtcgtatcggtcgaagtaggaagcgtcatcatcggaccggatgggctcacagagcctcctggaggaatcatagtctcatgctcaccacctgttggtgacggggcaaggccgctttctgtgattgtagttgtgccaccgtcgacaggtgggaccgagaaaaggacgccggcactggaacatgcagtcatcacgatgttggagacggctttgagttgagttggtcagtacatcgagaggaacgggtatgtacagttattttaagatgaatttttggacactgagactaacaggactggtcttgctcgctgcaagattgttcgacacaaggggccacttcggaaacgagcgcaggttggcggcagtggcaggcgaaatcggttagagaggggcagccatcattggacatggcgctgagaaagcattgcagctattgtgatgattagcatcggccagatgaaagaggtcgtatgcgtttgaagactcacagagcaggaaggtaagtcaggtagatcctgggctaaaataatgctagcccttagaagtagtgtggctgcaacgtaaagcttcattctggtaaggctctgaaagaattttctgacctggatttggggcaataaggatacaggacgtgatatatggcgtgatcgaagaacgacccgtcctgcgagtatcaactcactttatacgcctattgacggccatacggcttgccccttagagttggaatcacatgcgacgtaaagaaggcgttccgtataaggccggttattgggtaccatattcaagaattatccctggggatcatgaactagagttacgcgctgagcagtgacacaggccgatagctcggaagaggcgtggtgacatgcgctatgatggcgcaagaggtgggcttgactccgaactgttgagctatgatggagcaatagaggaaatgccattcagtccatgcaaagaggggagcagctgtgtggatgtgacgtgacataaagtccgtgctgacggttcacaaccaggagaaggttgctaccactcgtataataagaaactggaaagagcaggtcttgtccgtatgtagctgggagacagagctgggaacagggtatgacgagccaatatgagataaaaaagggcgataaaacatggcaagtggcaagaaatgcggcacatttgcaggtcattgagatccagactttgagagacctccggctcttttcccttgtgcgataatagccaaagaaagccattttgtctgctattatgcaagttacgggcattactctatcagaccaaattagtggtcacggatgcttttcggtaccaaaaatagtgctcatggttgaagaaagtagggt

SEQ ID NO: 5287 - DNA, 564 bp, Emericella nidulans
  unsure (1)..(564): unsure at all n locations
tttttatataccatactattgtaggcgatctctatataacttactagcgtatgagtaatagagaaaggagagagaagttgatggaggagggtcagggtcaagaacaaggctaagagggcgaggcagcgggtgttggcgggtgtcggggcgcagccatgacccagtcacgtagcgcatcagagcagattgtactgagagtgcaccatatgcggtgtgaaataccgcacagatgcgtaaggagaaaataccgtatcagactctagaggatcgatccccgggcgagctcgaattagcccgcttaatgagcgggctttttttgaattctagagatcttgcatacctaccagttctgcctgcgggngaggggtgagacggggttactgcgcgtttgcagaatgagctgaatataaaccaagagatcaacatacctcgcttgctctggtctatagttcctggtatactcctcgatctcatcgacttctggaaagaggtntattccctaggctttgaaccgaattcgggggtgattttcaccgaggatattacaggaagaccccatctttg

SEQ ID NO: 5288 - DNA, 2918 bp, Emericella nidulans
taattgttgaggagctacagagtaagtgcatctcataccttctgtttcgattgctctgacttttatcaggcaagaaaggaggtcaattagtgtccctgatccatggcttttccacatcacacggagatccttttgtgtgtaattttgcagaaaaacttctcacgcacgtaacgaagccgttctacggtatgttgcggctctggatttacgatggcgagctctcagacccgtacaaagagttcttcgtcgtggaaccggaggtcaggcctagtacagatccacgacgcattgcaactagtgtatgggaggacaaatacaaactcgaagacgatatggtgccttcgatcattaccaaggaattcgctaaaaaagtattccttattggaaagtctcttaacttcatccgatatggctgtggcgattctggttgggtggaggcgtactcgaaggaggcctccaaagagctgcgttatggtgacacggccagtctcgagacctcaattgatgaagcatataagacaacaatggcacgattaatccacctaatggacgaaaaattcaagctatttgatcaccttcatgcgctaaagaagtatttgctgctgggccaaggcgacttcatcgctttactcatggaatcattggcatcaaatcttgatcgtcccgcaaactcacaataccgtcacacgctgactgcacagttggaacatgctatccgcgcttctaatgcacaatatgactcgcaagatgtccttcgacgtttggacgcccgtatgctcgagctcagtcatggcgagatcggttggggattgtttcactcttgaatacaagatcgacgcaccagtggatgtggtgattacaccatggggctctacgcaatatctcaaagtcttcaatttcctatggcgcgtgaagcgcgtcgagttctccttgggcagcacatggcgacgttgcatgactggcgccagaggggtcctaggcagcgttgacgacaaagttggcgctgattggaagcgtgcacgatgcgtcattgcggagatgattcattttgtctgccaattacagtactatatcctcttcgaagtcattgagtccagttgggatcaactgcaggcgtctatttgcaagccggggtgtacgcttgacgacctaatagaagctcataccaagtacctcaactctatcacacacaagggtcttctaggctcatcctcaacaaagactactggcaagcaggaagaaggcttcctagctcagctacatcacattttaaaaataatgctggcctacaaggacgcggttgacggattgtactcgttttctgtcgcagaattcactcgacggcaagagctaagcgcaaagattgagacgcgcactgcccagggtcagtggggagtctcagagcgcgacctcctttcttcccgacacagccaggcacaaaggctcgcctccgcatcctcgtcattttctatcacaccaaatgtcggatctggagccgatggagtcgctacgccttcttctcttgcaaaccacgacctctccgcggacgaccatatgcttccatccctccgaactcgcctccgtgacctctcagtggagtttcgttcacggttgaacgtcctcctcggcgacctcgcctaccagcctgacgtagatatgcgatttttgggtgtcgttatgaactttaacgaagtctatgagcctgtgcggagactaagagccacaggtactagctctcgagataaagagcgggagccggagcgagcaaggcggaaagcaccaccacaatcaggaggcacagagacgcaatctcaagcgaaaaaggaaaagaaggattcgactgagcaatagcatacatgcagtacatttctcgaagcatgcggtgaatagtgtattggtttgcggcttcaattggggtcatgggagcaaatccagctagtaatgtcaaatgatgattgtacggttcattcaaacatatatatggttgctactatgtatattgctatgtgatcgatctctctcttctgtagttcgtcttggtacgtcttagtccatcgctcgtgagctgctcttatcaggtttatcgattacagcaccgtatctatctgatcacgtggaaaatttctcaagcgtccgaataatttctagaaaacaacgacagacacaaccacacctcgtctccacccttcgttattcttgaattcctgtttgtggttgtaagagcacgtgcgactcgggaagcctccttctagcacccttcttacagaaacacctcctcaatggccgaagagaaatcaagctcgaagcggccccgttccaagagctccaaattcaagcgcactaaggacgccgaacccgatgccgacgccgatgtaaatatgaagacattggaaacaaaccaagaagatgatagcaaggaaaacgccgtagagaggggcgagaagggcgctgtcgctgataaaagaaatcatcgtgataacaagaagcggagacttgctgagcaggatgagcaagctcatgtacctgtgagcgaggagaagaaggaggatatcggcgaacccaagacaaagaagaagagagtctcgttctcggcggaggctaaggtcaagtccccgtcgccggtggagggggatgaggaagcagaagcggatgacgagaatggggaatcaagcaaaaaagaaaagaaggagaagaaggagaagaaggagaagaaggagaagaaggagaagaaggagaggaaggagaacaagaaggagaagggggaggaagtgaaaggggacatggactcaacgagtacaatgcaaaattcgggcgagtcccctgtcctcgcctaccttagtcagtactacaacgaccggaaaatacatggaagttccagaaaatccgcgagattcaactcttcaaacagatgctttcgc

SEQ ID NO: 5289 - DNA, 5874 bp, Emericella nidulans
cagggcatgttatactttttgagcccttggtccgctgtcccaactatcagatctccttccctgaaggaagcctggcgtcagcctcatgcgttgcaatgtgcctctatatactatgtgataatcggattatgcttatctccgtcaaggaaactaataatatctaggatcttaagccataatacctactaggttaagcttaatacgagctagtttgtaggtcccccgaaatagaccaaatctatcaccatgttggatgacaagattagatatcagcaacgattccgagtaaatacttcccttagcaaatatcaaacaacgtggccgaccaccggaaggctatgcagctcttcatgtgcgagccgcagtatctagggtgaaggaggagcctgccttagtttctatggtcaatgtgatacttaaccctagcctagtgcagtctcgcatatcacgaaatgcaccttggaataatgagctatggaattgataaatatcgcatcaagagttacttgctttgttctgaacaagcgattgatgatcagttcactttctgttatcctggcatcactttcttgaaccatagtctgtatacaagctgctgcatcaaaacagcaccagcctaatctcgaaggtagactagaagactgccagaacggcatgtgcagttgagagaaactgcagccacctgggatgtaatggtccttcaaagtgcgacaatatcagagcaatatggacatgggtgagcgggcccgagactgattgatggaagctttcgaaagatactagttagcgcaaatctcattagttatatgagcagatcttaggttgtttatgctttggcgtgaggttagcttatgtttcgagagcttcggcgatgtccaaatctgtgcaaaatgctcgagttggagacggacgatcgtgatgtggtaatcgacgatgcttgagctaggctcgtttgcggtcgtgctgttgaagtccgtagtcatcgtgtcttttgcagatctaggaagataagtgcaatgaataaagtaaagctgactgctggatcaactgcaagacaaaatgcgctataccagcgctccacggttgaggctatatcctggcacggctcgataatccgcccccagcctgccaaccattcgtcggcaccttgctgttggctacaacgtacaattgcgaggagtaactgcgccatgcggagatgaagcactgtcagcatgcgcacatggtagtcgttatgtgactcgttggcaaatgcattacgtcgggtattgagccaacccggaggcagagcgatacgaatggtagctagtagctgctcaacagtggcctgtgatgagcgaactaagtgcatacggacaacctgcccgacttgtcgtagggtagcagtcatgattgtgtttacgtttttcagaaatgtatcgggctgagaaggaacaattcgaaggatcttggttattttttctgcgctaagaggagaaagaagtgtcggggtaagctctccatggggtcctggggagagtgttgcttcccataaaagaggctccgatgcatccatgatcaatcaggtatggcataccggaagacagattggtgtactagtctagactaaaaatgcaccaccaaatccatctccattctcacatatcctcgctgctgacggttccccagtctgagtagaccgcacggacatgttcgagacggtcaagcccgatacggtagtccatgcatgttaccctacctacaatgcttatctttgtctaatcgagcttttaccaggtcaagcttgaagcgtcggaagagaatccagttctatgaaagagttccagtcagacaggaacagagccacaggcgtcagcgctgcaaaggaccacttacgaatagctgcaacggaaggaacgtaacgagcaaacgaagccatttcgccaaagcgccttcccagatttcagggctcacccgtggctgcatgagctgtgtgaccacagaggtagcatacgcctgtggagacatgccatttttgttccctcggtacttgataacctctattgtgcttttgattggaaggtagattgaatcctctggagcatgtagtccatgatggaggatgttgctttgcacgaacccggtcactatctcaatcacctcaattccaagaggcttcagctcctaaagatcagttagcgatgagtagatttgaccacgtcatgcgtggcgctcttgcctgtcataccagtcgaagagtcttggaatactgactaagagccgccttcgatgcattatacggcgcttgccaaacaaccggtacgctccgagtcacactaccaatttgcacgattcgcgcacgaggtgcgcggcgaaggagtggcacgaagatctgacacaggcgcatgacagcaaagacgttaacttcgaagagcttcgcgacttcttcaatctccagatccaccgcggtcgatgcgtagtgcgttccggcattgttgaccaagaaatcgagacgaccgtctgtgcgcttcaatacggcgtcccttaacttttcaatgctgcctgggttgccgagctcaagggaaagagcttcaatgttgtcatattggctcgttaagtcgctgagagattcggtacgtcgtgcagtagcaagcacggtgacgcctttggctgcaaaagcaattgcgaggtccttcccaattccgctgctgcagccggtgattagagcgaacatgagtagaccgagctgttgtgctatggagagaaagaacagaaattatgaatatggtgtttgaacggggaccaagcttggctttgggcgtatattcaaaagctgataccgaagagatctaagctagaccgggtcactgcagagcaaagatgagccgacagaagcgaaatgggccgaaaagtctctttaatacttaaaacattggcatgggtaagcctcgaatccaaatggcagaagcccgctgagccccggcatgcggccttgggccgctccagtaattccaaaactagtaaagcgcttatcgcgcaaagattagtagctcttagtagtactaggttgaaggctcgaactagtttccagcaattacatctagtcactaaagttggtttcgccccacaagtggaactaataaagtgcttgacgttggtggtaacatgtgtccttgtacagatccgctgaggaacaacgactgatcctacaaattgccgctacattcctagttcctccggcgccggttacccatggcgatccgttgcctcatacacatgaagcaaaatgcgattaccgaggaagaaatgatcagacatcactcttgcataaggtgcagcctacaaccgagggctttgtgaaatcatacaagcaaatacccgggaaatgtaggtctgagtttctggtagtcaatctgtttcggtctgcagacgccacaaatgaacacaaaatagggcttcatgagatttgatatagcataaaactgttatatatagcacatatatttcagcagattactaaagaagagtaataacgaattacccgtcacgttgaatgagctcacctacgtaccttaaagcagtacagtaacaggggatagcagaaggcagagccgtcatttcaccttattgtccccaagatcactaggtaactcacgaccccaaacagacaatgggcgaacaagttctctcgtcgtcggattatcccgattcaccacatctccatcggcataatgctcgatcttgaacttggaactatcattctagtaatcgaagatctggctcctaagatatgccactaagctcccaacacgctcttccattccttcttcgcaagataaatggtgccccattagctgcgtatcaaagtcggccacctcaaacggtgtatgatggacataggtcttgcgcaccgtcgccggagcctgctgcaagaaaacgtatggtgatcggtatactcttcgccgctccaaatttatgaaggtcatgacttccttgtcaggaaactggggcaggtataagatatcagaaaggacaaagttgaagttcccagaggagaactccaactcggtttgaaaatcctttgcacacgtagccgtagtgtccgagtttgtgtatcaggacagggccttcgcggtagcgttagaactggccctttacgaggcttgtcaaagggttagttgaacggaccttccgtttcatgtgttgccgttggtggttctctcttactgtctatctcccgcatggcttggccgtgtaccacgtacaggaaggttccgttgggacgcgcaaacgtgatcatctctccccctccgggagcatcatctagggctttgcggatagccccgggtaattttgcggccttgtcgaaattttcctggtcctttgcaatgaaggctgcaccgttgaaccgggattttgaattgaggctctaagaggtgacgtatatgtaggggtctttgccatagccacggtagtagattgtcgtccccttgcgcgctaaatcaacaaatccgaagtctttggcaaatctgtcaaagcgtccagatcactgtgctcaaaataaacatgcgcgatacggcttaactggaccttcgatgggttattttggacagttggaatgtttgatggcggaaagatccagtcttgcaagttctttggaagcaaagaaatcacgtctagcatcgaaagagacattgggaacgcttaatctggggggttatcacagctgtggtaggagatgaaataagtacaacaagcaaagaaagtctgagttttgccttggttgttcgaggaaggagagtctcatgaagtagattggcccttccgagcccttgcttattacatgtgaggatgcccggacgaaatgattctggtggatcatccgccatgttcagatgtcaagttgagtttagggttatagaaaatgaagccattccgcggggtgactctccgctagtgccccagaactcactcgcccttcaggaccaggagaaggcttttttttctctttaacaaagtcttattcacagctagttaagtattcgtctggtggaaaatcttgccagtctccaaaattgcgcttttttgtctcacaactcagcgacactccagggtcacgcacaatggccacattcgaatacctctttcactttggtacagaggaaggcgaagagtacttcacaaaatgtaactcgactaatcctgacattggaaccttagtcaactcattctttactcttgaggacttgttgggggataagaacccaaagcaggcgactgtagccaaggtatagaccacatgcaatatttcattctgagagtttcaacaatcattaacttagaacagcttctgccgcccattccacagacaaattttccaatctactgtatgggcctcaactacaagagccgcgcgaaagaggccaaggcatgatatccagcgtccatgaccatagccagtagctgattacaaggaaacagcttaatatccattccaatcccccgttatggaccaagccttcggcacactatcagcaccaaacgaaacgatcctcgtgagccgcttttgcgcctcacatcttcccaactatgaagtgcgtcaccggccgcatccattgacaaaaaccgtactaacatcagagtcacagggagagcttgtattcgttacttcacgcgggtttcgagacatcacatctgaagatttatatcctcggatacaccaccggcaatgacccctcctgccgcttcttccaactccctgaacagtccggcggccaatttttctacgccaaagcattcgataagttcgcaccgatagggccagttcttgcgagcccacatatctacaacgaggcaaaggcagcggctaccctgataacccggatcaacagagaa

SEQ ID NO: 5290 - DNA, 4242 bp, Emericella nidulans
gtcatccaccttgcgacctctccaatccattttccatatgatctcggcaacctttcagggaataaaaccaagcccacattactactgccgcacttgaagcaaagacagcagagtctgcgaggtccaggaataaccgggattgccttactccagccatggccacctctccgcttatgttgaacccagctccaaacgatgcaggccatggaatctagtgcgcgagtgaacgtgaagagggtaaggtccatggttctcccaccgaattgagtctggcgatgcggatatagctggggcgttggctgaagagcagttgtttcctgaccaatgccatcctggggctttccggacactgtctgtaaagtgacaggccgccgattcagaatctggaaactgaaccaggcagatacaaatgcagcagcaaattggatcaattgagatacactcttgaagtttaagctcttgaagtccgagccaagtctacgacaagccgtttgtaagactctcaaagccaggattgggagcagagttgagcccccaacaagcgctgcacagaaagttgggaaactttccaagcgtaaaggtcccgctagaactcggagtagctgtatacgtagtatatggttattacttgaccaaacgataaaggtaagggcagcgtggtagcttggcaggaccggcaggacatttattctccaagacttcatcgaatccgaacaaggacggaaggggtacctacctcgtagaatctctgtcggtagctcaagtcattattgatccaaagtcgccgtacgacgatatgattttgggtgtggccgaagacagataacccagcgcataagcccgcagaacgctaaatgaagattccaataccaatcaataacgctctggcaccggtaacatggtcgcatgccctcaaagtcgaatgaaagtagcacaatggccacagagaggtagtacttacggctggagtagttgcgtggttctatggcgcctgcgaatgagcgcagcagaatccatcgcgtcacgaatcctctagttcatgacagctgccgggtcgaagtacaatcgcaatagaactgcctatctctggaatcagtaggcttgccctgacaccaggatcactccaggatccacccgtcatacaatactgaatcgtacggtcgaggttggtactttgtgcttttcgcaacgatgccaacaaccagaaggtctcagaacacctattggccggtaagttcctcgggagagagcacaaatcctcaatatccggaagatttaccctgtacgtttgtacgtagaccccggaaatttaactggagttggccctagtttctaggttgcttgggggaatccttcggtatgatctgccgtgctgccgtgcgacgcgagccgacggcgcctcggtacctggctagatgctggcgacgggcgttgatatagattggttcaggggtagctctccgccaatatccctacagcggacggcaagcggcacgcccagtaaagtcccttggggtgcagtagtggggcaaaaacagctggaggcgtggtacggagtacggagtagtcctagagagaacgaaccaagcccaatctgacggcggaccgttggaccagggatagcgcctgcggcgattcaagcggactgaatagcaatagcaaatagcagaaagcaaaaaaaaacagaaagcaagaaatcagggaagaagcctaaaggagaattgaattgatgggagggccacagaactgacagcagtgttattggacggaaggtgatgagaacagggcggcgctcgccgctcgcaagcgaagaagttccgttttttgcatgtgattccttcccggcagcaccataagccgaagggccatgctccctccaccatcaactcttctactatattcagctctccgtcatcttttctctggccgatatcgaatgcgggggatgtgcgcttgctaggttgatcttacttttgctataattccgtagccctgacttccgcaccggccactgggtcactttctcgattttctactttcctatacccacgaccccgaggcgccccgtctttttcttgggatacacaaaagagggacttattgcgcagcgcactgtccaacgggcgacgtcgaccttgaacttcgagtcatctcaacctgtcgaggcctttctcactgcgcataagcaagcatcgagatagcatctacgataacctgcgggtcaagttatgttgagcctgggtcatctactctgctcgctacctgcacgactggatgctggtacacgataattgagatcctcttcaaaacacatcgattttcttctttctatcgaatttgcaatgatgagcatcaatcccccaaatggcacacaaggccgacatgcacgcaataactcagcgctgccgtttggctgtgagttttcctctggattcaaataaacgtttctgacttgggtctatcatcgcagattctttccctgaagacacgccttatgaacctgctccagcttcacctgtcggcccaccgctccttgatgataccgaaacgaatatgcttgataacttccttacgacgataaattccaatcctttcgcaaacgactactggttttcagactcccaaaatgacgctaacaactctcttggcttgccggggtttgactggtcgaccgaactgccgccaacattccaaggctctacgtcgtctctacccccttttcacccgccgtcgtcatcgcatcgaagcgttgaaaagtcccttggaattgcgcccgagcatgcgaactcagaagtgatggctgcggcttctatgctctaccagaatggaatgaacgggcccgagattagcacggcttttgggaatcaaccgctcgcattttccaatgtcgattactcacagctcaaggggagcggtaaggagcggaaacaggacggccgtatgccggagaaagggactggtatatctcgaacacatctacccgctgggtaccatacaacgaagatgttcttcgacgtgcctgagccgatttcaacagagcaacaattaatcaccaaagctcaacctctccactggggctccgattctagtttcatggataggggatatttggcgccccctgatcagcctgatgaggaacaacggacaaaggaaatgatggagaaattggaatgccttgaacgacaaagtagcgccaccaatacacgagcacctacgcctgatcgacacgtaaatcaacaaccggttcccttgtttgagcctgacgctatcaatcatcttaacggactgaggaaagattacggcgacagtatcgaagatttatcatatccgaagaagaaacagcgactgctgatcaaagaagaagacgatgagaactcggacgggaatacttccaggcaacgctgcaaacgctcgaagggtccgggaaggcgaccttccactgatggtgtgcggaagtcgaaaccatcgcaaggctcaaaaccacgagagaacttgacggaggagcaaaagcgaagcaatcatatacactcggagcagaagcggagaaatcttatcaaacaaggatttgatgatctgtgcacgcttgttcctgggttaagaggtggcgggttcagcaagagcgccgttctcactcaagccgccgactggttggaagatatcattaagggcaaccaggccctgaggttacaactagcacaacttccggatctgagtaccatggacaactcgatgatgcggccacgaacatgataatcgataatgatgatgattcctctacctttccttacttttcttcactggaggtctcctttttagcattgatcaaagcgatttaccgttcttgtcggacgcaggatgtactgtctgaactacaggcttgatattgacctccaatcgtggtttggggtaggaacccgttcatttgactttgattgaaaacgggcttcaaagcccaggggatgctaatggcttcacggccctaagaaaaaaaaacggctggaggataagacaaatgctctgcctcagcggtttggggcggtgccaactttccccgcctttggacttgtttccacacttgctaattcgtctttctaacctgggctttgcaccaacagatacccatattcttcacggaatttgcgttctttgtgcctgcctatcaagttctcttttatctaattgctgtccccctgttctggatgcgtacacttttgtattcactcctctcaatctctgacttcc

SEQ ID NO: 5291 - DNA, 3256 bp, Emericella nidulans
actggagggccagtggatgtgcaagccggactcggggcagtgatgaaggagcgatggagcagaatatgaagtgagtggtagggtgtcagcagtatgatccggtttgcgaacgatgggtgcggactggcaaggaccgcgtgcaggtgggaggcgtcaacaagcctgtaggactcggccaggtccacgtcgctccgagaagcctggtggttgcggacgcgaacggcgatttgatcttgcctcgagagcgagtgcgcgaagtgactaaggtggctcgagcgatagaggaggccgaggctcgcgtgaaagaatcaacaagggggccagtattgctgaggcccgcaaggcgctcggctaccttaccctacagcgtagggcttgagtctaaggcattaggctgggatttggggttctcgtagccaattgccaatacagttgagttcatatacatcccccatgaggaaagttctgatagatcaatagttgttacatacattgtaatgaagatgtaatctatatgtggtctataggtagtctagtagcctaagtagcctgcccgctgctaatatcgaatggaacaagttaaaccttctggaaaggggaaaaatgctcctaaagggtaaaaaagccctccaattgacgtcgccaattttccacactctataccccacaattaatctccaataatggcaggttgcgccgcttcatgctccagccgccagcctgaagcctttccaggtaggagacagcgacttcccttcatttgaatactatcatatcctcagacaaaggagatggcgacgtcaaaattcccttgttcaaactgtcgcggtaccgctgcacttctcccgttatatgaacaatggcgctaacatgaaaaacactagcaaggcacattaaatgtaattcgacactagaaaacgaactcgcaaaggtgtaataattgccctgactttactattactgactttacctgctaggcgataggcaaaaccccaaatgcggccgctgccaatctcgaaacatagaatgcatgcccgtagagcgcaaagctgtcttccggcgcggccgggtgtcgaggaaacacgatctacatgaaaacatgtttgcggtcaatcagacatgggtaaatagccggccgaggaagtggaagggggctaaatcagccgtcgacggcgctcagcagggtgcgagccctaacccgggtgggtcgaatcgggagcaggcgtaggtgtcagagggagcagatgcagtcgaactgaacctcgattatttccccaggcagacatgtatggacccgagtctagaccatcttccggtccaggaatgcattggcgaagggagtaccggtgtacgggccaggactgaggactctgggctcgaggacgctatcctaccacaaacggctgttgaggggcatacatcactgacgcggctcaatgtgcttgtctctgctgcagtgggtaaccagacacagcatgaatccccggtaactgttcaaggagtgagctatagcatcagtgcaagccctcagggccccgtactccagcatcaacagtccggtctcctcctatcaaccgctcgcctccgtccaagaatcctgcctgctccgctactttatagaggagctgtccccctgggtgtgtctgactcgctaaatttcccttcgtttccctttattttatttctggtcttgcaccggccctacgttgtctaacagtcggcagttcgatcactgcgaccctcaatcccatttccgacaactcgtccctcaccgagcccagagaagccggtatccatctctactcaatgccatattcgctgtctctgcacgtcatcttagcaggctccctcagtacagaacgctagaggggaatatcaattaccacggtcagtctctgccgggcctctcgacctcatccgcggtagagtacatgctcaaatgcattccggggctgtcttcatttcacgatattggcaatctgaccgaacaggagaatctcatgtgcgccgcgatcatattacggcagtacgaagagatggaggaggagatggaagaaatggggacggatcccatctccttcctcactgatagcagcttcggtggtgaaaatacaggtgagggagatagtccaatagaaaaacaggtgaatttcctcgccatcacccagacaatcatccaggccatgatatcggtctcgtcccccctgcagcgctctcctttagccgtggcagcatactggatcgccatccgccaagaggtatactacgcacttacaagaaagagtgctccctgccttacatttacggcgcaggattgggagagcgcggccattgcgaacaagatgattatgcatgcaggggaggtgactaagtggtgctggggagataggactcttagtgaatacggtacatcgcctttcctgcttgccttgctatacgccctttcccgtcagtattttgtcttttgctctttgatacctgactcgaagctacactgatgggctgagaaatggctaacatacatgttcttgggcggcagaacgcctgagacaccaccagcagcagctcataaccgcgtactcgtctcaactgaccccgatccttcacaggctcgccgacagaaccaaaggcgatatattcccgaccatctggtatgccacgatgcacaagtgaccggcgtgcacatctagagctggcacggatgatattgattgctgagaatccgggtgggctgtaccaccagtttttccccaagccattctatcactaactcagtcaatgtgaagagaaaatagcgtgtcttacagcatgcaccgcagaaccgagtgtcattgtgcggaacattgtgctcaatctctgtggtatcgcagtcgacgtctcaaggcggatgccggcacttgttaatgcagtcatttccattttgctctacggcgagtacttcaccgatctggcggaacggaatgcgctgctgaatatcattgagcggatgaaggatatgcgtgcttggcctctgagaaggggggttgagaggttacggagggcctggagggaggcagacaatgttgagttctaggctgtgatttctatcagtcttcataagagcatgtcagcagcggcaggtaaattggcgccagtttcgctgtattggggtgctgacggctagcttgtagctttatagttaaatggacggatttcgccgagccacgccccttcgtattcttccctgatctctctttttctctgactcacaacacca

SEQ ID NO: 5292 - DNA, 2747 bp, Emericella nidulans
cttcattccttgcgtcgtctccccgcgaaaccccgcgccgtcacccgaacacaagtatccaccaacgccagaaccctctggtcgaatcctttctcagcagccatattctgcgctttcttcgtcgtagcaagaaggttccgggcgatcgtacaaagatcattcaggcgttcgatgtccttcaccagcgaaaagtaattgtaggctatcaagttcgaagacgagtgttcgtaattggcagccggcgggcttttccagatgaacgactgtgattctagaaccggaattgccttcgtaaatacgtctgtaaggccctgccaaatgtcgggagacaatcctaagccatgtctagtgtgaaggaaagtttagtggtctgccgacatacgccctgacggagtagattcttacctgacatcgctttcttgatgcgtcttatatagaatctgctttccagcagagagcatatggtccaagcgtttgtcgtcaatcataccccgggtctcgtaatggctcagtgtgcccatcaggatgaccttcaacatgcactccgcgggggtgcactttggcttcatttctgctgaggctctttccgccatcttgaagtgcctcctgggcgaatgggcaggggataaagtagggttcagacgatattaaatccgttaaagaatcttagatgcatctgaaggtgaaatgagttggcgggacagaagaatcattgatgaggtaaatttttccgcggccgagtcgccttaactactcttttttggtaagtctcgtgatctaccctggtgcaacgaagtatactctacggtgaacctatacttattaaattaataactaaagagtcggtaatgcagccaatacttcataaatgagactaagcacggtgagtttgcccgcagcgtagtatccaaatacatgacaaaggttattccaaaagcccagatcgtaaatattgtcaatttccttcatgcttctaacacgagcatacctccgatcaataggcgcatcaggattagttggttgtataacatcgttagagcttttgtgaacctgatgcccttctttcggagggtctccctctgtaagcacaagtatttgatcgctgtacccaggccaggaatccgcagtttcggcggattcaagaagaggagaatcgcttcttttatggtcgccaataaacttgaatgccattccgtcggttatgtcgtctttccagtcagaccatttggcgctctcattcgtcgtcattcctgcccagatgagatagacatggtagacgagaaaagcgaacgccagtggtgccgtcataaacatcagcatcgtaactcccccgatccgagtatcataggctactaccgccgcccacatgttgagaaacgttggccagctttgttttctcaagcgcacgggcgagctgggagggatgagtctgtctaatgtctgagacaagagggagtagccaagccatgagccgtaagtcagcatgacgcttagtgacagcaagagatacaaaaagtaatggtaattgttcagaccgacgcagttggtgagccatatgcaatgatggtcttgccgggagacgcagcgcttgcagtagctgcaatgtttacttctcgctggtttgagaaagtggcacgtttcacagctgtggcctgggtggaatatgaccttgtcgtaaggatagcgcttcatctcctccgcgtgattgtccggcgtgatgtatgattttgtaacaacactcacatacaagaagtagtaaggcagggctatgatgatgggaatgtagagttgatgcatcaccgagatcctgggccaagcactgggaatgaatatgagttccccaatgacaaggattgtcgtaaagaatatctataaaaccaatcaataatttgaagcatcatgacgaaaatgcatactgacaagcacgaggggatgattttcgtagaggatatagttgccagcttggccccaggatctcaggatccgtccattaaacaaacgagcatcaatgtatgatattccatgcgggatatgtaaccagataatcctatggagtaggccgatcggcgttttcctgggtacgtcagaatgccgtgacagctcagcaaagactcccacataccgaaatacaggaagtctcccgaaaagaacagtaaaaataaaagctgaaaaccccaggatcacgagggcgatcgtccgtagaagccccatcgcgcttccaagatagtgacatacaggagaccttggcttgaaaaaatgatcctagaaggccaggacagacatttttttatgccgctaggaggatgtaagataccagaatcttcttgttgtcctagtttatatgaccacggcatccaagcctcgtcggtgagtcccctgactagaccttacggtatcgcgggcacgtgatccggtgccgtatattcggatagcgaaggttatttcccgctaccaatctgctacctttacctagctccagggactgtacttcttgttaatcagtcatcttgcacggagacgtagcaacgatgacctttcgtggccaggtttaactctcacatgcgcgtttccgcgacgcgacgcgtaaccacgtgatccaactacaaactggaagcccaaatatcaaggacgactgcgacattgggacaggcaccagcgcttagaaaaggctgggagacagcagatgatggaggtgaaaggagtggagagtggaatggccggggagtcggggcaaggcggactcttca

SEQ ID NO: 5293 - DNA, 2142 bp, Emericella nidulans
aagcattaaaataaaatcccccgacggaaaaagaaaaggcttaaaagaatgaaaccttgccgccgaaggtggctccgcaaccggtgcgataatagaaaacgggaaccttcgaaatcttctttaggacaccccattagcttacgaggccgtttcagagacattctccaacacttggacctggcaacttaacgcagcgctgaagggtttcatcggccaatgggggtccaaggcggcattcggtaccgggaaaagcagttgcgaaaaggggatcttgtattggataagcactacaatcagccggtttggcggaaggttggggcatatgtgaaagtttggtaggtcgacactccgtagcaagggtattatactgggccccagacgtaattctgctctttgttcctcagtcatattgaatattgcgagatgtgtcgtaacaaaggtatatactcctccaggaagaagatgaattacaaacaagctggattatgaataacttcacatattcccaatcgggtataagatgtggagttgcagtaaatcactctatcttatcgctccaactccacccccgcatttccgataacaatacttcagttttggcatcagtcggccgtagaaaagacaccctaataagatacctcaagccattatcatattcaaactctattacttttgacctactttctcggtatctttcagcacagattgtcgccatacggtgggtctgtatatttgatatagaattcctatttggcgcctacaaaaatatactgccgtagctttcactgacgtgaagatctcatactttgagaaagattgtcttgactccatcgggctcaattataagcgcgtaaggtctgggtagaaagaatcccatcactctgtcgattggtgatcaacattccgtccctacgcaggtcgctgtcgctgctttgacaagtagtggtctggaccgcgctgtgccctgcgggcacggacacagcacatatttttgactgtccagatgacctccaccactatgacttactccttattgtttgttgtctcactctgaaagtttgcggcggtgaatcgactgtcacgagacccttgtcgtagattgctagacaagaaacgaggtttgatccatgttactcgatcgatttgacaatcaatgactggaccaggccgcccggctgcaaacggagtcgcggaggacgccgacagtgcagttttcgctggagttagatggatttagatggagtcagatcgattggcagcgtccttagtgttgtccagaccaagcctcatcgtcctgcaatcgaatcacactttcagcgccttattcgcactcgtctctctctcggtggaggatcggatctagttactgtagcatttgcaaagagcggtcttttgctgctgactgctttggtctcacattgggtatacgcgtcaacgtcagaatttgggaaataaaattttgcgcaagacgctgtggtttcgatcgagtaattatatctcggcacgagacgaaaggcgccccgatcacggctgacggatagcggaggcgccgatgggcccgtggaaatgggggatgtgggtatttagggataaactgggtcgaagtgaaagaggcgagtcggaagaactcgtggtccgatctcggggcaaattcggttttgtcccaataaggcaatggtgagggtatacccagaacgggatttcttcgctgtccttcgcgagggtctggtgtcgccacggtcaggaccgaatttcttgcgcgccgagtaaaatccacgtcagggccacgaatgtatgatttagcagcggcaaacgatgaccgcaaaatggaggcagagcccgctgggtcagtggaaccgcgttgggtcccgaattcccgagggttgaagttttacgttttttgttattttcgttactcgatcaaataagggtttggctgcggtgccagtggattcctttgcctttatcgggctatataaagacacaatggcttatctggagttatcggtcttgaccagcagagcacgcctccttacctgggtcttatctttatcctcttcctctcgcaacaaatctttatctgtgctatcttgagccagatcttcccctcgtttcttcctctctctgccctcttttttcttt

SEQ ID NO: 5294 - DNA, 3562 bp, Emericella nidulans
ccggcgattgtcgccactgagcccacgacggtcgaggaatcagatgaaaatacaaatgcggatgagaatgcggcagaaggccaggagacggagaactttgaggtgtccgctcaacccgctgtgacagaggttgaaccgaagcaacttccacgagacgacgaggctgtcaggttacctcctccgccgccgttaggcaaacagccagaaacttccgtgcaggagagagcgcagcaatggttactgcccccggctttaccacatctacgagatcgcaagtgcttggttctggatctcgacgagacattggtgcatagtagctttaaggttagaattcttctgtttttttctctagttctcagctgacagtgtgatttgaaggttcttgaacgtgctgatttcaccattcctgtggagattgaaggccagtaccataacatttacgtgattaaacggccaggagttgatcagttcatgaagcgagttggagaactgtatgaggtagttgtgttcacagcatctgtttcaaaagtaagtctttgctgcagcgcaggtcaggatgatattaattcccttagtatggcgatcctttgttggaccaattggacattcatggtgtcgtccaccacaggctgttccgggatagttgctacaaccaccaagggaactacgtcaaggtcagcacaaacggcacgcacacattcaagaataattattgactgtatattaggatctctcccaggttggccgtgacctccgggacactattatcattgataactccccaacgtcctatatatttcaccctcaacatgcgatacccatcagcagctggttctctgacgcccacgataacgagcttcttgaccttattcctgttctcgaagatcttgccggtacccaggtgagagacgttagcctggttctcgacatcacactatgacaattgtaacttcattgcgcgcgacatacctcaagcggctgactctcctcttgttcgcttcctacgtccggctactgctttactttgacaagctgcacggggctgaagacgttcctctaccttcttatccctgcctagatgcattgggagtttcagcactttggctttcgaacctgtcaaggcaagtggaagcgctgcctgtttatatatgctggcgtgctctttttatttattcccctaacagccggttatttcctgtactcgctcctagcgagctgataccttacccgttgtttctttatgtatctgtccccaaagaaagttacccctttttgggttgaattttccaaggcgtttgttttggctatcagctgaatttttgctgatctcatgtatacgctgttcgatttacattcccctgtgcttggctttttttccccccttataacagtcttttgtcccattttgtctaacccacgccccaagagggctcgacttgatcatctcatcgaattccttactacctctgtatctgtgatctctcactctcccgcaaccgaccgttgtcatcttattggccatgatttttatttcccctcgattttgattttggaggcttcacaagcgactagcatctgcatccatgtctcccatacccgtgtcacagttttgatacttttccatagtatcccatcaacgcagacttctcgatcatggtggcttgcatgtatgtgtaccctagcagggcgtgctgtacataagaagcgttcatcgtttacaatacagctttatatctcttattagtgtagataggcctgcattgtttgttactgcaaaaacagtaagcagtggtcgattatttgaggccgagcatgatgcgcgcatgattcgacgagcctcgtcccgccttccaggtagttccgacaggagctcttccttcccctgtcacctccccgaactttgtcaaatactcgtctttgtctaattttcaaagtgaatttcttttctaagaagtgaaacttcagtgaataacccgccgttagattcgtgctctagcagttactcactctccaaccatcccacctgcccctcccccaccgaatcgtaccaccatgaaagacagcaaaggctgggatgggaagctacgcgttgaacccaaagcgacaataacaaacccagaggccctggaggacccggattactcagattcggatgcgcctcctgtcgaggagattgaggcggacgaaggtgagctattatttgaattaggtcgcattctggcgcggagaaaagaaaacctcaaaactaacatgtgctcctttacatcagatttattagaggatgaggataaggacgtcgaagtatgctgcgctccccaaaacaataatacgaacctcagaagctgatgggcccctaggacatcgatctggtacattgtcgaatacactctatcctggctttgcggttggagcgattcacgaagcttcaggtgcgacctacaacataccttgcttgggcgatatatgttactgattattccttggggattagcgattatgcctgcggcaaaatcaaatatcacggattgaattaccctctagcctcggcgaaacactacaagagttggatctttacgacaatctcatatcacaccttaaagggcttgatgatttccataacttaactagcttggatttgagcttcaataagctcaagcacatcaagaatatctcgcacctagtcaagctgaaggacctctattttgtgcagaataagatctcgaagattgaagggcttgaggggttgacggaaataaagaacttggaattaggggctaataagattcgagtgagctaccttagtacgttcatgatatcggctttttttaacatcactataggaaatcgagaaccttgagacattgagcgccctagaggagctttggcttgggaagaacaaaatcacagaaatgaagaacctcgacgctctaacgaaccttcgcatactttcaatccaatctaatagactcaccagcctaaaaggtctctcatcgctcaagaacctggaagaactgtacgtgtcgcataacgctattacggatcttgcgggcttagaatcgaacaatgcccttcgcgtgctagacttctcgaacaaccaagtttcaaaattggagcacttgtcccatttgaaagaactggaagagctctgggcatccaataaccagctctcaagctttaacgaggtggagcgcgagctaaaagataaggaaaacttaaaaacagtgtattttgaagggaatccgctgcagacaaatgggccggtcgtgtaccggaacaaggtgcgcttagccataccgcaaattatgcagattgatgctagtaagtgttctaccactgtttttgccgttaccactcccaccgacaaatggctaaacttcaacagcgtttgtacgagttgcttgatcagtgctgtcaatgataggataacgtttgataatgcctattttaggaagactatctataaagtggacgctctttattctggtgtgctataaaataccacttgcgttattctatcataaatctgggatctcaaccacaaatcctcgcttattcgtaatcc

SEQ ID NO: 5295 - DNA, 4314 bp, Emericella nidulans
tcaatctggggcaacgagatgtttcctgctgaagatgatcccaaaggaggcacgtgtccgcatccgttcggagggcccaagctaactgagccagatcccgcgaactggacactcgaagagatgcgccgatggctccgtgctgtaggatccaccccccgagttcttggcgcgcacgttctctaacaatagcagcgaggcttgatgcctgatcgaaaggcgacacgcgaagagctccttgagcgaatcagggcaaatctccggaacccaccaaagacggcagagtgatctgtggtaaaagggtgtagggccgatagcgtaatgatataatggcgtatcggcaatcgtctttcgactcgaaataagtggtcgttcagtaaatgtcctgtcatcttcaaagcgcgttgtatgattcccatcgctatctctaggaaccaactggataatttgtttgcctccaaacttcttccaacactgttgccagacatccgcggctcaaacaacgagacggaagttctgggtctgaatgagccagtcccgtctacgtttccccttccccccttcgctagaagggttcggcacgagaacaaatgtctcgctgaacccgcgctgaggaaggtcgcgagactctccgaaccggacgtagccgctaacaaccaccaatatcgaaatgtctttccgtgggtctatttgccgaccgattgtggctgtaggatattgtttgtttataatttgacagtcaaacgactggacctcgtagtgcgtcggaggcatctggctgacgaagatctcttgcactgcatttccatccgcgacggggtttccgttgaacacaatcgttgatgggggggagctatagaaggaggctatcgttgcgcggttagattggagcgcggggtagaacgattgaacgaattcggtagccgctatgacgagtaagttagattttccctacatgctgtatagtctgggtaccataccttctgttgagacctttgcgtaggcatcttcggtaggggccatgatgcgagtcaaaattaggaagtggctgcctgctgaaaatcgtaaatttgagctgcactcaataaggctgctgatatatacctagaaggtattgaaaacagaaaacctgtaaagacttataaagacgagtcaggaatgaagtgagagatgaggctccggcaccgcaaagaaaaaaagaagcttggaccacgcggagaaaacaaaacctccgaggacagtccgaatcattcgatcgcacccagactacaacaacgccaacatacgcgcaataccgccaatggcaagtttgagagggggctctcgtgctctttcttgggcgaatcagctattatcccgtcagcgcctttcgtcgaaatgtgcttctcagagagtcgctcctccggcaaccgcctactctctccgtcagtatgcgaccaccgccaaagaagcttctaagccctactatgtcacgacgcctatcttttatgtcaatgccggtatgatcggaaagcagactgtataatatatagatagctaactcacttccgtggtagctccccatgtcggtcacttatacaccatggtcctcgcggacatcctgaaacgatggcggacacttaccggcgacaatgaggcacaattgctgactggaacggatgagcatggcatgaaggtctgtcagaccttgtctatgggcaacccgttgctgactctgtgttagatccagcaagccgcgaacgcggcgggtatagatacccaggcgttttgcgacaggaactgcttaacattcaaagtcagatgcaccggtctgcccgatagtcactctggtaattcaagctaatacgacttaggctttggctgaggcagctaatgtggactacaattactttattcggacgacggaacctgcgcataaagaggccgttcaatacttttgggtaagtcacagggactacttggcgagatcgttacttacgcggagcaggaaatgctacaacatcgaggctacatttacacatctaaacatgaaggatggtattctgttagcgacgagacattctatccccagtcacaagtcaatctctcgttggaccctgccaccgggcggaagagaatggtacgactcttggctttcaccgtgatacaagctgaccagactaggtttctacggagacgggcaaagaagtcgagtggtcttccgaaacgaactatcactttcgtctgtctgcgttccaggaccgcttattagaattgtacaagacggatttcatcacgccaacccactatactgagcaagtggtcaaatcggttgcatccgggctgtcagacttatccatctcccggccggtggagcggttgacatggggcatccctgttccaaatgacaatacgcagacgatctatgtctggctggacgcgcttgtcaactatctcacgaaagcaggatacccttttccgcctggcgagggaagccgcctcgggtggcctgcggatgtccacgttgttggcaaggacattgtcaggtaggtgttatcccagaacgcaagtggacagtacttacgcgttcagattccactgtgtttactggccagcgtttctcatggctctggatcttcccctccctcggaatgtccttgttcacgctcattggacgatgaaccgtgagaaaatgtcaaagtcgaccggaaacgtggtcaaaccctttcttcgcaattgaccgattcggaatggacacaatgcgcttcttcctagctcaccgtggcggccttgcatccgactctgactacgacaacagatacatcatccgcgattataagaaatacctccaacagggacttggcaacattgcccaccgcacaattggttgtgcgaaaggaaaattgcgggactatatcatcaatgctacatctggcaattcccccgcaaccgctgacgatcaggcataccagaagactctggagcagctctcccacaaggtagcaaagtgtatggaggcacttgacccacgtgcggcactagaggagatcgtggaagtaatccttctggtaaaatccctcaccgagtcgtagaagctcagtctactgacgcccttcttagacaaacaagtattttcacaactcggagccatggcagaatccggaggagaagcaacgcgtgattttcaatgctgcggagtcaatgcgtatcatgggcatcttactgcagcctttcatgccgaacaaagccaaaaagctccttgacatattgaaggtcgatccttcaaagcgggatctctctgatgctggctatgcacgagactcgacctacggcgaggatgttaagaaaaaaatcctcttccctccccttgccctcgagaactaagccggcctagatatctatctatttggcgagtcgggatgatgagctcgcctaacccgccccttatagtgatcggatcgacacatactgcctcagaagggtattagcagcccgttttcgtggtcgggaagtcctcattcctgtttgtcgcgggccattgcggctgtggttcaccgtctccacgataagctcttctcgccctagtagcaaggttccgtgtttgcgtcatgagacatgctcttcgtgttctagactagaagggtatcaacggaaaaccagggtgtggctctgatatgcgacgttgttacatgatggatatcggggcgggaaacgggtggtctggtttcccgcggcaaactggtgcagtgactgcagtggctctcggaaagaacattcgattgtataacagaatatttaggataggaggcttgatgtaataataatattatattaataggctacgcgtatgggtttgcttgttattattcgtggtctgtatctctcgcttatggtttagatatatactacggggttcgcttgttgcttaggctctactatacagctcacaacaaggacatcttcttatactcatttacaacgcaatttgattaaactatacaaacaatatctgacctcttccaattgtgttttcgaatcaacctattcacgataccaccagcaccatgggcagcatcggttcgccaccgcaacaaccacacagatgacgtccacggggtcccaacatgattcccaatcccaaaccctgccaacctacaaatcaccctggataagaacacctctcgtcgaatcccgctccctcatccccttgcgggtgccgcatcctcctcaagctcgaaaacacacagccaagcggctccttcaagtcccgcgcaatgggcaatcagatcctctcacacctgcataacccctcgaactttgggaagagcatccatttct

SEQ ID NO: 5296 - DNA, 7027 bp, Emericella nidulans
gtgatccgcgacaatagggaccagatcgcaggaaccctgtcaagcagagccacagggaaatgagtagggactatacagcgtataatgaatgatcccaagttactggtgatgtcccaactagattttacctaagggcgggtggctgtcggatggctgtcgatggcttgacgcggtgcattataaggcacccagtgccgggcggggcttattagggcacaatcctatttaggccggccatgatcgacataagattaccctgaaaggcaccagcgtgacgcgagcatgaagaaaattgacgtgtacattctgcaaccagagggtttctggttgccctgcagacaaagatctggagactgctgaggacgcccgttattttcggcgtaaatggtcgagtcagggaagagcttcgggaagacgcgggatttggcacgcagagaagctgagaaaaaccgctgttggcatggtggtatcatctgtgacggaattggcatagcactatagtaaataatgacaatatatgcaggatttcaaggacttttggcttctccaagggatccgggaagatgttgaaagcgatactggagaggtcgatgagaagccgaacatggcggaacgctcatgccaattacaagagccctacagcagcttggcgagtgtccctaacggactgcttcaggtgtttcaatcaaggagataatgacgacagttttgattacggaagtcacctcatcgcgcgtcttgtctccaatggctggaattatccctaggcttggctgacagatctcccacgatcagttcagctttgcaattattaggaaacttgtcagtctgctgcggcatggtcgactcgtacctacgaacagcctcatgacaggaccccgagaaaatgcggcgttctgcttggtcggtagccaagtgccgatttgtatagcagacaggcgcccaagctgcctgtgactccggtgagaaggccaacacaaactcaaaagcgatgctctaaagtcttctgatggcacgacaggttccataacgcttgggccaaggctaggttgcaggcgacatactattcatgaatgaaggaacctaattactctaccaaaatcaggggatggaacagtaaaggagcaattgcaatcaacatcgcgcacaaaaagagcttgagggtgcagaagttgcatgagttattagcgaaaatctatcaagaggaactgtgcacacaggtccgaggatacagagcacaggagcagttttgcgagcaccgactgtgtattatccggcaatcagactgccatcaggacgccttataccgggtaccactccaagaactagtctcagtgtgttacgcatttagtgtagtcaccatggatgcatctggccgctgccatgctcaatggcgattgagttatggggctttattcgacaattcaacgggggattgcagcgtgttctggctttattacgagcgatattccgtataatggtagatatcagtgcccgctgcgaatgcacgctcagagagaaaagcgcgactgtgttgagtattgtgtaatataacttgttgggtgttcaatttcgaggggccttgacaacaaaggagaaaactgtcgacctcaactatttcataccacggctgtgaagacagcccggcggaagaatcatcagcttggtcggcacaagtgaccaaatggagacaaatggagagaccgtggttgaagtagattggctgtccagtttggtggaacctcaggcgaccaaacaatcgtttgtctcagcttccacagccatgacggagaagaaacccggatgcttttttccaattgctattgtttgcacggctgcaaggtggctagcggaatgcataccaatcggccatgtaccagtagttcttccttcgttggagaaatgatggcgtatgtgctgcgcctgtaccaaaatttaaacatcaagagttccgtaatgacggagatttctggctggattggccctcctagctttatgaaagtagtttttggctacctagctcactgtcccatgatctagataaatgtccaattcagcataagcatttttgtcagccaacaaacatgacaagccaactcgaatcaacgtggacaacttggatgaatcccaaaagatcacaatactgttaatgaattagagcttcgtggtcaactcttcgacatcccgctcaagtaattatcattgtgttgagtgccgcgaactgaaccctaggttcttgctgaattggatcccgtgatgcctgataacttgaacgtctagaaacatgcagcctatgcgcgagtagaagaaaaaacaagaacggagtgcgcgacaggctgcctttagtgataacaagtactggcgtcaaccggttgatgaagaatgcatcgcattatttatcattgggcgaaaaaggttgtggtgtgggctggtaggtagggagtggaagggccaaagtaggttattaggtgtccacgaagcatgggctgggcggacccgaggctatagaatcatctaaagagttgtatgagagcatggcgtgtttgatatttaagagataggaatacagattctgaatgtttcagctactcttttgctgatcctccctaacatgaccctcagtctcagccaagccctggtacggatctaccgcagtcttcttgaacctccatgccggaactctctgctcaaacaggagatccagctcttcatacgtgcggccctttggctccgggacacgcatcgctgaccagcacagacaaagaaggcaggtgccggcccagaagtacgctgagcgcgcgccccaggcccaagcagagtcgttgagctggtagttcgtcagcacgttgacgactatgttgctgatattgtaccctgcgcgggccaggttgatggttttcgcctttagacgcgtcgacgagagctccgagacgagggaatatgtcacgggcccgatgctgatatcgtagactaatgtgaaaaccatgagcatggccccgattgcccatttcgcgggcgttgttggagtccggcgcaaaggaaagactgcccctgataatgaggagagtgaagagcaacgacaagcccaggaggtgggattgtgcggcggcccatctcggacctcatgaaccaagagccgatggtgcccaggacaccaagggcctactggccaagcgagaggttgaaggaatggatctcgggtaggccagcctgcacgcagaagtatgcgaagtagcccattatgttctggccgctgagtgtctgcccgatgcaaatgccacagacgatctcggtgcggcggcggttaacgccgcggaagcagtcgaggtagcttgtaccggcagacagggatttttcgagttcgttggtgtgctgaatcatggcgattgtagcgtccgcgtcgaaggaggcatcttgcggagaggtgaggcgttgcagggcgtgcttcgccctcgcgatatcgccgcgacggacgtgccaccagggggactctggagcgaagaggatgccggtaaggatggggaggggccaggcccattgcacagcgaaagggacgcggtaggaccattggtccatgcgctgaaaggagccgcgattgacgccggcggcgataaattggcccatgacccagcacatattgatgtaggtggtaaggtaggggcggaggacgacggggcaaacctcgcttgcgtaggcagctggaagggtctgaaagatgccccaaggtataccggccaggatctctgcggagagaagcatttggacgttgacggcgaagaagaagaggaagatgacagcattcatggcgatgagggcgtatatcatcgtccaccgatagccgaggcgctcagagacgaaaccgctgatgatcagaccgatcacctcgccgacgcgagcaccgttggatagcgccgattgccaggaggcagggacgccccaatcgccattggcggcctggacaccgtacctttggttgaatgccggggacgcgtacagggaaccgagcagggcgagatcgtagccttccatgatcagggtcgaggataacagaacggaccaggcaacggccttgggataaagacggagaccctgccagaggctcattccctgttcctggcgagcaccctgctggccgtgggccagctcctgcttgggttgagggtcatggttctccatggtgcaggcaagggaactgacggaaggcgtgggattgatgagaggaactcgcgcagagcccgcagtttaaataccctgagactgtgctagacgcctcatgcaaggtctggggatgcgtaccccagctcggggcacaaactgcgcagggtctggggtcggaaatccccgcgaataattcttgatcaatctttgatcggcagtcaaccgtcgtcctggttggttgagcggggccaagtcggtcgttagtcggagactttgcggtgggatcacgtagggcatgcggagtcaatgcggagactaagagcaatccagacttccaccgggtataaaacagcctgctattcgaaggaaggagagctaaccaggttcttttcacgttagctatgtctcccacagccattgagaccgtcccgacggggaagaacaactggtggaaagaagccaccatctaccaggtaagacgcctacccctgacaacggagaatgctaaagcaaacaggtctacccggcatctttcaaagactctaatggcgatggatggggcgatattcctggggtcattgaaaaagtgccctacttacattcactcggcgtggacgtcgtctggctctcgcccatgtacgattcgccgatgctcgacatgggttacgacgtctccgactacgagaatgttctaccagcgtatggcacggtcgtagatgttgagaagctggtagaggaatgccacaagtatgggatgagactcatacttgaccttgtgatcaaccacaccagcgaccagcacaagtggtttctggaaagccgcagcagcaaggacaaccctaaacgcgactggtatttctgcggccgccacggtacgataaacagggcaatcggatgcctccgagcaactatcagggggtattctgcagggagtacatgttcgttcactctttccgactgctggacacgcgctgattcgcacagggacgtgggatgagcacacgcaggagtattacctccatctatacgctaaagaacaacctgacctcaactgggataatctagaaacccgcaaggcgatctatgacagcgctgtccggttctggctcgaccgcggcgtcgacggcttccgggtcgacactgtaaacaagtacagcaagtatactgactttccggacgccccgatcacagacccaaagagctacatccagccagccatcggtatgtggtgcaacggtccccgcatccacgagttcattcgtgagatgtacgatgaagctctcgagccctacggagacgtcgtcaccgtcggcgagctcgccaataccccggatccggctcacgtcttgagatacgtgggcgcttcagccaagcaactaagcatggtatttcacctcgacatcggacacatcggcatgggtagcctggaggacaaatacgtcctgcagccatggaagctgacggaaatgaagtccattgtggccaaatggcagaccttcattgaaggcaccgacggctggaccacagctttctgcgagaaccatgataacggccggtccgtttcgcggtttgcgtccgacgcgccagaacaccgcgagcgttcggccaagatgctcgcgctgatgatggtcgccatgaccggcacgctcttcctctaccaggggcaggagatcggcatgatcaacgcgccccgtgactggccgatcgacgagtacaaggacatcgagggtctggggtactaccgcgaggcgcaggctcaggtcgccagcggtgttgacccaatgcgggaagagcgtatcatggacgggttgcgcgttcttgcgcgcgatcattcgcggctcccaatgcagtgggatgattctcctgaagcgggctttaccactggggtgccgtggatgcgcacgcatgatctgtaccgggaaattaatgtgaagaagcaagagggagatccagacagcgtgctgtccttctggaagaaggtgctgcttctgcggaagagataccgtcatctgttcatccacggggcgtttgaggttctcgatttcgacaacctggacacattttgttttatcaagtccagaggagaggagcgggcgctcgtggtgctgaacttttcggcgggggagcagccctttacacaggcagagatggcagccgacatggaattgctggtggggaattatgctgaagctgaattgtgtgagaagctgaggccatatgaaggacgaatatatatcagaagtgaatagtacgagattatttgcgtgtttatatagacttttctgtttattctttctggggccccagatagaacatgcacataatgaaatgacatgaaagactatcttttctgacttcgacacgtcactgggactagatacataaaccctatgaactagctatatagtcccccatccctgtgctggaatctcatagtcagtgttaaagtcaagaccagccccatcactggctccagtcgagttctctggcccgtactgtctggcttgtgtctgattatggttcgctgtccttttatctaattttaaggggtaataacatatattttagctatagcgacaggtggatcttggttacaagattcatagccgagggcttggcatttgccctacttcactgcaatcgattcagtctcacctcaatctttcgtctgtgtggcatcgcaccgaatggcatccaacaaaccgataacaacagcttgtgacgcctgtcgccggcgcaaggttaaatgcgacggccagcagccatgtggacgatgcccggatgctgaaatcttctgtcggacgacaagtgttcgccgcaaaaaagatcgccaaggggccaccgtgaccgttcttcatgaacttcgcaa

SEQ ID NO: 5297 - DNA, 3034 bp, Emericella nidulans
gagagcgttcattcccacgtcgagcatggtgatcgcgaaagcccattcagctacgagtacggcagatgaatcggagaggataatctgcagaagaaatacctggacggtggaatgcagctcgctcacccatctgggaaacctgttgatgtcctacttagcccgacgatgccacatgttgccgtgcctcaccggagcgtgcgctgggttgggtataccaagatctgaaatctccttgattacccggccatcactttccctgtggacagagttagggcagataaggatgtccttccgccagactatcggccgagaaatgaccttgatgcatggaattggagtctttatgacgccgaggctatggagggtcaacccgttaacctgcaggtaattgggaaacggctagaggaagagagcttactgggggctgctacagtgattgagcggatttggcggagttagtcactttcctgattgagaagagaaatgaacctctctggccccctaccccatctttaaacccttaatccccacttctggggccttcttgttgctgtatggatcgtgagcggtaagctctttacgcaccaaaatcccatatattctgtggaccagaatagtcatactgctgcagtggtttcggggattgtgtataaaaataaggccgcatttatgatatatgatacaaaactcagagtccatgacgagcccttggttcattgtactgcatgataacgataaggaagccaacccctcacgccgcgataagcctgcggggagctctccaccgaaaaccttcaaggagtcctccatggtctcccaagatgccgaattttagtccgacggcgcattggtcgaatcgcaggcacagaagttgctccatctcgggtttaccccgcggctgccctgcttatcattgcgtaactgattcctacagtacctgcaaccttttatcggcttttgaagcaaaccccacccttgaacagttaagaagctcaggaggacggcgtcaggatgaagacataaaagtctgactacctacaccgccacctaaacaaagcaagtacaacatgggaaagaagcgagttctcgtatcctacggtgtcgatatcgatgccgtctccggatggctaggctcatatggcggcgaagacagcgccagtgatatcagtcgaggtatggcacgtaatgccataatcctgttccattaatctcacaatcgcaggtctcttcgccggccacgtgggaaccccgcgtctccttaagctttttgagaaatacggcatcaaagccacctggttcatccccggtcactcactcgagactttccccgatgaatgcgccatggtccgcgacgcgggccacgaaatcggcttgcacgggtacagccacgagaacccaacagacatgacaattgagcagcaaaaaattatcctcgacaagacctaccgcatgattacagacttttgtgggaaaccaccgcgcggcacggttgcgccgtggtgggagacatcccaggagatgacggaattgctgctcgactatgggatcgagtacgatcattccatgctgcatcatgattgtcagatgtactggcttcggacgggcgatagctggacgaagatcaattatagccagaagccagagacttggatgaagcctttggagaggggtaaggagacagggctagtggagataccgggaaattggtaccttgatgacttgccaccgatgatgtttatcaagaaggcgccaaatagtcatggttgggtgaatccgagagatgtggaggatatttggaaggttggttcatctctgtttccttttcccctgctctttgagaatttgatgttgacctccgtctcttaggatcatttcgattatttctatcgtgagtatgatgagtttgtctttcctatgaccattcatccagatgtttccggtcgtccgcatgttcttcttatgcatgaaaggttggtcattgcttaaagatgttcactaagaggttctggtatactaacagggttaggatcatcgaacacatcaataaacacgagggcgtggagtgggtgactatggagcagatgtgcgatgagtttaagagcaagaacaaacctcctgctggtgctagaatgcccgctcctccttcatcagtgctgaaatagtcagcattaagcaatcatcatacgaaacttccgatagccttcttttgttaacgactccggtacgaagaatatatagtgagaaggccacgactcagtgaattacccagtgtaattgcagcccggaaagtgatttagatgtttacagatactcaaaagagtctatgatatcaaggcttatagtccgagattggtggctttagatgatggctcccttagcgcgtggctattttttctgaaaatgtatgtagtatctctcgaaaatagcttctattatcaaatcacttcattagctgcgattgactcccgcaacaccgtgccaaataatcatcgcttcatgactttgggggctcgaatagttgtggcttcatattcactttgctgatttttgctattagtccactcaattgcagtaggctttgtacaccgtcgaggatcctcatatgcgtgaagccaatctcgcggataaattccaatttcgaatgttcggaaagcgttggaatcgtcttcgtcaccttgaacatagtgctaataatgtcatgagcggagtacccaaggtcccttagaggaggattagctattttcgagtaaccgctggaaaggctcttataccatagctcatttagcgtctccagagcggaatccacttttccctcccagcacgctttgatcatcgcctgaactttgattggatgagggctatcaaccacacggaagacgttatccccgctgaccaaaccgaatccagaccaggtactttgtaaattgttgagagcctggcgcatatctccctcagcgctgaaaaccagcgctgcgagtccatcctccgtgtatttgacctgttctgcgtcgcaaacctgcttcaatcgtttcac

SEQ ID NO: 5298 - DNA, 3552 bp, Emericella nidulans
ctctaccagcccaagcaggtttcagtaaacacccgccagaagccggctgttatttatgggtccttgctaacaaggccaccggccttccgactttgtcgggccctactcctacctttaagctcaccagtgccgatgttcctaagcccagcttcgtgaaagccctcgcgaagactcttatgctttccaatgaccttgcccagcgaacctggatcgttcccaatgcagacccagagcgcctttacttacctcccgtccaggagggttcacccatgtccttctttgcactggccgagggtcgccgagtcggatcccccaattaagcttccagtcggtacccttgtcctctgtcctacgaattggactgaatattctgtccacgagatcaagacgctgcaaaagattcagccaattgagggactggatttgggccacttcctcggtgcgctggggatgacggctgtcactgcatactatgggatcaaggaggtggctggcacgaccaaggatgatacagttgttgtctcaggggccgcgggtgccactggaagcatggttgtccagatcgcgaagaagatcattggctgcaagcgggtgagtctcttaacccggataacacgtatacgccgaacggaagctgattgatgcacgagtaggtcatcggtattgccggtacagacgacaagtgccgctgggttgagacgctgggtgcggacgtctgcatcaactacaagaaggactcgtttgagcaggatctcatcaaggagaccgagggcttcgtcgaggtttacttcggtgtgtaccctgctgaactgactgtgtttgaacgttgctgatagcgaatagacaatgttggtggcaacatcctagatctgatgctgacccgtatgaagcgccacggccgcattgctgcttggtaggcttcccccccgatatcccggtgttgtgactccactaacaatttcatcagcggcactatctccgactacaaccgccccgaccctataggccttaagaatttctttgtactgttccctaacccaacttcttctggaatgcaagtgctgacgacaagcaggaagtgatctcaatgcgcctgcatatccgcggcttcatcgtgctcgactactatcacaaattctctgacgttattgctgagctgacccaggcctggaaagaaggcaagatcgtggttgacgagtcgatgcagacggttgtcgaggccaagtttgaggacatcccgaatgtgtggatgaaactctttgaaggcggtaacacgggcaaactttgcacgaagattgtctcgtaaatcacttgtatatatccctgggtggaagctaaaacgaattacgaagctcaaatgtatacagaaatctaatcaatgaagtaatgaccaagtttcttccagctctgtcctgggtcaacatttctcaacattctggggtagtgctggaaaaggagtccaacattgaatgaagtgaacgctgaactaatccaggaatcagttatgctgggctttgcaagtcctcagattatccataaaacggatttctgagataatctccttgtcaacccctgcattccacaaacgtagacgcagacaccgtgtgagacggggaaaagagagtgagtcatcggctatacaaccacgcgggagcctcctgtacattcataaacgttctatggtgtcgataccgctctccaaatctgacggatagctatatataggggagatcatgtgatggcattacatgccaatggcttataagatcctaggggcgtgacttatataataatccttatacaccatggtaacaaaaatgctctggtgctcagttcgcctaggtataactcattaccccaacagaaaggcaagtgcttattatcattgctgcaactggttgtctaaacctctggtctccgataaatgtcaagtccatggcttaattactggtcttgctactggccacggcctgacgctgcatccactgcatttttgccctgagttaacaaaattcctttcccgcagttgcatgtgaacgatcttaattcaacctccatcatgcccatcttatacgggtggtagatgagcaggcgaacgtgtctttcagctattgacagggtatgctccttgttcgttcatgcaaaaaccaaaccgcggaccatacactgcgggcctcccattctgagagtgagttagggctccagaatagaatacgaacttatattatgagcatattgaggtttgtgggaggagagttatttacgtggcttagatgggtataatgcctttttagatacagcgagtcattccttgcacaaaatcgccccgagctgcagaatctatattacttaaacatctttattgtcctgctcggtcttttttccactttttttcacattaacccactgcataaacaccactccaaagatcccgatgcaggacaagcccacgccgacatagaacgtccccgtcagagccttgttgtacgccctcaaaactgcctggtagaccgtctcatcagtcaccaaatttcttacctccgtcgcacccccatcgatcaaccgcgctgtgtcaacgctcggtgcataaatctggacattggtcttgagctgattcgagaaaacattctgcccgacagacacaaagatagccgcactcaaattctcaagaaacataacaatcgccgtcccgattgcgatatcttcaatcgggagagtgcactggggcgccgcaaacgccgtctgaagaccaagaccaacgcccgcgccaaagaggaattggtagcctatccattctggcgatccagaggagacggtaaatgtggaaagcagaccggaaccgactgacatgaaaataactgtgagataggcgaaggggacgtagtagcctagcagcgaggtgaggaagcctccagagagcgagaaggtcacgtaggcgaggaccatgggcagattcatcacgccagagcgaactgcagatgcgcctttcacggcttggaaccagatggggatctaggagagttgtcagtggatttcgtcttgcaaaaagagtcggcacgtacatagtacagcattaagaagaagccagcagtaacacccgaaccaaacagggccgcgccccagacattcctgttcccgaagactctcggcggcaccgttgcgcggtctccgctgaagtactggatgatcgtgaagccgctaagtagcacgcctgcaaggaaaaagagcgcaatgatacgttcattcccccagttgtactttgtccctccccactgcagcgcaagaagcagacagatgacaccgggcagtaaacacagcgagccaggaacatccatttggcggatctgattcccgatcccggactcgcggttctcactccccgcaaaagccgggatcaaaaacaaaatcacaagcgatggtactgcccccagcggcagattgatatagaagcaccacctccacgtcaacgccccgttatccgtaaaagcaccccccataacgtggtcccgcaatcgcgcaagcccatacatagaccccagcagtcccaccaac

SEQ ID NO: 5299 - DNA, 3147 bp, Emericella nidulans
cgaattgtagctccaccgcgccggcgggcggtctagaactagcgaatcccccgctctgcaggaattagttatttttcaaatcgataccgaccacctagatcagggaaagagatctgagagcgagagccaacggcatagtatccatactcatattagcttctgccaacaggagctcaacgtgttgatgtactgcctctataaatgcttggcgggcttcgttttcataattagacctctatacagacccgactgcaggtagtagactatatttgcgattcagcgtgcctaattaagtaacagagtcagttatctaagatcatcaagccaaaagtctcataccggcgaattttgctcaatgcagtgaaagcgtagccttgagacatcaaataaagcacctagaagaaacaaacgagttcgaataggtccagggatcgtcttctagaccccaggccatgacttggacagagctcttatgttgtaatgtaacttgtcagtatgccccggttatgtgagacggcgcgaaacacaccttcccacgcggagttattgtcttttgtagaaactcattcgcactatgattatacccgttagcatgacattcaagcgtggcaagagcctccttgtccgtagttgggaaacttgactttttgcagacatgcgtctcctgaaccgcaccacagcttcccttttaacacgggtgtggtcactggtggacccttctgtagaagccggatctcgaaggaaacgaaagttggcttgtaggaggcgttcttttgcagtcagagacgccttagtagaaatcttcagggctttctctagtcctatgcactcatcgtccaaaccctggcattttcgctatggaaaagacgttaactgaccgtggcttgcataccaaatgtctcgcttggatagattacgttcaattccaggagccataccagaaagccataacatagctatgtgggcttatcgcagtctgcaacgtccagccttccctctgcgtctttaagttgcataaccaagactgacaagcttcaagtatgccaagcaatttctgatgtaagatgagtataaacttggttgttaagtcctaagcttactgcggtagttgattgcgacggcgtgcctcatgacaaggaacgctttcatactgaagagagagaggagagagatactgtgtgcaataaagtgaaatggtatgctacatggaaaacaacgtgaacacggataagtggatgtgcacctatgctgtcccttcattgagatgtataaagtaagtaatggaataagtgctacctaggaagtgtacagggcccaaccatgccccatgggcacgaggaaccagccatatgactggcaaatctatcctttatcttaacgcatttcgaactggagcaagtcggtcactattatgctgggatttaccgcccggctggcgccaacacgacgctggcaccgacttttgggtaactgtgacaggacatattggcacgaatagggacgaaccaaatcccgggtctcgaacaggaagtttgggaaaatcatccgtacaggcatgcagtgcacggacatacccacagccctgcgttctgtaccgtcgatcgggagatcattgatctgtgcgtcgacggctgcagtaacggtagcatttccaggtttctggctcactgtcatgccagggggctgaataagcaaggcaaggcatggcaggtagaatattgacttccggtagctcgtgatggattgccgccttagttcaaaggccacgattgtttatttgggttggatatcttggggctatctgggtcggctcaaggaagacaagtcaaacaagacgagctcttgtttacgtggagggtattactgcatagcctgataaataggccgcccctgcctgattcgttgggtctccaggacagcaaagagtgccctcgtgttgaaactttgtttgaactcaattccgccctgtcaatgccgggattgaaccttgaagttccaaaccaagtcccaatcaaggctccgccgcagcatagcagacaacacatcgtccttgcgccaatagtgacaatgatcttcacggccaaacctgccgcatatgctatcatacctatccggcagcccgtaggtcgtgctactcgggcagattcagccactccaatccacccaagcctacgcttgaatgcccatcttcagaccagatcgagattggcggatggcataccagtcaaaggaaccacccgtccaattctatgatccattcagtaatcccttgcgtcatgcagcgatcgaatgcacgttcaggccccggaaccagcaaagcccgagacgcgagccaaggcggatttcaagttcccgtcaaccttagtgctgactgcgggctgctgacaacgaactttggggagccagagggtgtaaggaaggaaaagtacggagtaaggtatcagaccgttgacctgcggtcatgcaagcaagcgtatcgatcctgtgtgtgccactatcccacatattcacacgacgtgtacatatacatgcacattctttctgacagtcaatactcaggctccaagcggtgatacaccctggccagaaggaggtccattgcgagactgaaacgcagagcgcagacctagtgaagcttgtccgtcagttggcattatgcaaacacgccaaagcgcagtagcggtctaccaggcaagcaaaccaagagaaagaaaaattgaactttattcaaaagccttcacaacgtccactcactgtctaggaccaagactcgaagctgcccgaggccaagtccatgtcggggtgcagcgcccgtgcatatggctgcgggctgggttggcagccgtgccacgccccgcccgccacatgcgcgcctggatggcacggtcatcttctgagtttggtcgaatcgatccttcggccggtggaaagcctgggctcagtgcagtgcgaggacaaagaaagccacctggctgttgtagcagggagtcgtgatctgtgctaatgagctcggcgtgtcgatccgatgggttggatcgatggtctagccgttctaggaaggagttctctaccgccgaggttcaggttcaagacttggtttactcacattcttcatgacagtggcggtctggattggcgggttgggac

SEQ ID NO: 5300 - DNA, 5071 bp, Emericella nidulans
ttgatcgtaaccaaaaagggtcatgtcagtagcacatgccactgtgagccaaaaggtgagccagcctccacgaagcccgaaaaatggctttttagcgtctggtgagcccatggtaattggaatgccaatactaaggcttgaccacggcggacgccttccataaggacgagacggctcgcccccaatatttattcttacctccccacactcgcgctagagcgtgggggattctgcggggtatatagccggaatacgggatttaaccggctccaagatagcgggctgttgatgacaatacgggtaattcggcggggaagagcatgccgatcccattcaaaaactttggaaaccaatcattgttgactttcgttcccgacgttgaggtatttttccgaactcgggtatatccacgagcatgccagctggataaggaacaaaaacgcacatgttgggattagtcttgatgacaccctggaagcgtttctcattgaatcattctgttgatgtaactcgaatactaaagaatctcgttaccaggttcatattttcagaactgaccgacgtaagagtgtacggtaggatgtggatatgggtgtgagttgcgttgttttgactgacgaatctccacctgtgaccattacttagtacatctcttacgaatagcagtatcgaactcgaatacaggaaattattcagcacgaagaagtaacaggctttggacgatacagtacactttaacgagttatcaatctttcttcggatatttttcgaacggtccaatccaatgatcgaacaatgggtcggaatttactaaatatgcaggtaaatgaggcctttcaacctcaaaaaggtatcatggatcagcaaactctaagctaggaagtaaagcactataaatgcactcttctataaaaattgatgaaaaatggccgaatagggacagtggctgcgtacatcgtaaatctgcaacagctctcattaataatcaaagtcaatgatcaccaactgttcagcttctaattgatgctagatatgtatatttatattttctatccggatttatacttcatatactgtatatatctcgtgctatgtacatagtggtcacatatctatccatttttaggccgtgttcgtgttagtggtcttcgttttgatcccattcatttcttgtcgtgtttcaaagaaatcttaagtggtaagttatgatgtgtaagctatgatgtcgtgtatgtatgttgtgtggtagattgtgtgtcatcccgaggacttgggatggaataaaagcaccagcttctccccaacggagaactcaagctcggtgccgtcgcgagctattttcacttctcgattcgcattccacgggttgcgtaacgctcgtgtgcggtggaagggaactctttcggtggagagccaccggattcgaaatggctttccgattagctgaagctcagcgggggcttgactctgctgctcattcggaggatgataggcgttcttatgctgtcgggggaggccctcctcatcctccgacgtatctgcttcccagaaaattgtgccccgcgcgacgtcgtttatgatgcgaccgttcggcgctgatcttgatgcaggcgccggggtgacatcggggctatctggttcgttggaggaatgatgctccgaccgtggcggcatctcaagggttaggctttcgtcgtcctttatcgttgacatcatccgagcgtaaccgtaatattcacccgacttgtttgcggaaaagaaaaggtaaacgttatctgcgttctgttgcttcccgttagcctcccaacttacgaaaaatgaaaactactgtggagatttctggggaaccctcacctcgaacgcccggttgaggctctcttcgttgtgggtctgggtagcccaaataccactctgccaactgagttcgagatcttcaaccgtcaagcttttcaaaataaagtatctgttaggcacgcgcatggagtatgaaccttcccgtccgtcatcttcggtgccggtagtctttaccatctcctccgcctccttcatcgaagattggtctgctagaccggtgagctcgctgtgcggcccaggggacatcaaaccccgacgtacccgacaaacgagccgcgccccccgtaacctggtgtcgtgaaaccttgataaagctttgatgcaagcctcttccgttttgtaattcacaaacgcacagttgcttctcgaaataagaaacacgctctctaggtcctttgtagcatcttgcgaaaaatggtctttgagctcgacgatatttgtacccggtgcgagattcccaacccaaagggcattgccggattgcttcggtttcctcgacggtcctttcggcaggttcgacctaggagcagctgatccaaccaccactgttagttttttgcccttttcctcttcttctttttcttctcccattaccgcagacagtttgcagcatggtgtgcgcttacctgctgatggaccctgtgtgacgaatgatttcatctgggccgatccatcaacaattgtgatccgctttttatcctcttttgatcgaccgtcgtttgctattcgcgtgttcggatcggtttgattatacagttgtggagacgggcgtaagacattcgcttgtcttgaatgatgcccctgcgtcgcatacacatttggatgaaggtagccatgcccgtacgcgcccatcggattctggggtgaaccagagtttgggttattggcgaccgaaattgtggcatccggatgttgctgctgttgctgaacatagggcatatacatctgaggatacggagcgtggaacatcatgcttgggttgggtgcggacgcagggaacgactgaaattgcggcatgccgtacatggaggctggattgggacagacagggacaaactgctgctgctgaatactttgctgctcatattggatcggaccggacggatagctaggcagcgcggacgccatattccccataacaaagacagattgtggatgtgcataattgcctgtcggggtcatgtagttcagcgcttgcgaaaattgctgtacattgtcggaatgggatatctgacgagaggatgctacttctagacattagttttagcgcgaatgcgctcaccatcatggatatgctatggcgaatatagcacgaggcgatgacttacttgtttgtcgatgagccccgctagggttggttgacctccctggctctgaaggcgctctgtttttccccttggcctctcgagctactgtaggtcggttttgaggagtaccgccgtccatcgattgggttccgtcaatgctcgagggcgatagtacatgcaaacgactgtacgtataattacggatgcccttggcaacgttagcaagcagaaatgacacctggtctcacaaacgtacgtaccttattgaagcttggtgtgatcaagtaattctgacaggatgtattctataatacgtatataagctgacggcagatgtgtaaaagagtctcggggaaggtcagaatgattccagaatgctcagcacagagaaatgaaaagaaagaaagaaaaaaaaaaaagtattgacgctatccagacatgcggctgccagagtgggtgagtcaggaggcggaaattggcttctctcacactcacacacgttcacaacgttcgcttcgatatttcaaatgtattcaaatcccttcaggagagcaagggtaggattgaaagacgagaggactggggtgatggtatagagccacatagtaagacgctcgcacaaatgggagcgaaggaactgtaaaaagagtggagaatagaaatatcacacaggagcaataggaaacaacgggctatatggggaactcttcatggagattggggcatggctgctgctttggctagagaagccacggaacagagctggagccggggtcataaggggcgggagaagaacccggatggtagtggaatgggaggaagaaatctcccacaaaccaccagcccagctgcatacaagatgtcaaggcaagctgagcggattgtcaatagagaagacgagaatgtcgggagccccaacgaggtaaaagcccacgaaaacttggctccccagcttctttctgagcacgccagcacccaagacctcataatccaataggacctccatgcaaaggagaagggaaagactggagaggaaagagttgggggattggacggaaagcagaaccaagaacgccccttattcaggcatgaagcccaaagtcacgtctcaaagaaaatatgtgcgcatgtatgacaaggttgttgaaaaggaacaaaaaatatgaagcagccagaaatggaaaaggaaataatgtactcacctctgtctactaaaacaaattgcaagcaacaaaaaaaagcgggctagatccgatgcactaaataggagaggaaatcaatcaatctgcgctctggccatgatttaccaagcatcagtatatgccaacgtgacttacatacagtctagttacagtttggcgcaagcgacagttaaaaagatgtcggtcaaaagctgggaatcgatctcacttcggccggttgaggttgaagggtgggactgcttgcgtttccttggcctgtaagcgcgccccgtctaggactgaaagggtagagatatggagatgggaccttgagctttgtgaagggccttcctcctgctagtagtaggaggcgttctgccgtcgggtccagccccagtcaatgcagcgggcccttagggatgagatcccagcaaatcaagccctgtacacccggtgtggataaggctactccgtagaggggacggcagcggatagtgaaactaatggagtgaaatagcagaaaaaggctactggggaacgcggccttcttagaagaggtgccccggcgacggtgctgaccgggcggcgaatgtcactagtcacaagcaccgcccatagactagatgctccatgctcccatagacaacaggtcagttgggaactgacattgagggctgggacttcctttgagctttggttccgtccttgaatggagaaaaaattcactct

SEQ ID NO: 5301 - DNA, 4230 bp, Emericella nidulans
tcctatccgggggacccccggaaaaactccctgtatggggggcgcccccaggggcccaaaagaagttttcccggggagggggaaattcaagggaccttttccggggggttaccacggtgttggtacgggctcaacaaaggggcttttttaaacagggggggtttgtccaacccggcaaaaacccccacacccagaatcaaggttggtgggcccgtattgtttaagacccaacggaaaactaggtccatccatctgattcccctaggtggcccgatgaatctgggctcaaaaggcaatttaagatttagcgccttaaaaaaaggttgggctgccggtgttagcaatgagaatgggaactatggatatctctggattgcaagggttgaccactccgcccgaggccagagataatgtgctcgactggaactattgaatcaccagtgagctacctctctggtttgaggctagtagtaaagcactattcgaccgcaattcagatgagcttcgcagaagaactccgaagccgcttaggggaaaggtttctgtcatgagagaataatacgaggtcctataaagaacgtgaataaactggcactttcttacacccttttgcttaaccgcttttccattcgcgtattaggggagaagacatgcggcagatattcggacagactcttgtgcaaaagaaccccgagcacccaactgtaaaatctcatagctcctagccgattgattgctgacgatcgattacaggcttcgtcgcgaaccataacatggtagaaactatgtatttaggacttcccagggttcacaattacgcttctctttgctgagttgcccgttgcttgcggagtggatgatctgatgcagaaaggtggattaaagataagaatagatcgtacctgtatgcttagcaaaagagataataaactgcaccttcgtactgcagatgaacataatgcccaatatcttcgttgccttaggttctacgtagtgtgaaatcggggactgtggcttggcactgatctccattaataatccgctatgacagccccggaacagccacgttctccccacagcagcttacaacaaccacagttctttctcgattctacgatggaagcgggatcaacagtccgcagtgcaagttagtcagccgcggttgagggttgcgatctcatcgtccattcttttctctcctaatgatttgatttcgtctctcgccatgtctccgtactttgggctccaagccctccctttccttctatccctccttttcgcggtctttgcctcagcggagcatacgtccaactgggctgtcctcgtcgcaacctctcgcttttggtttaactaccgccatctagcaaatgtcctctctctctatcgaaccgtgaagcggttgggtatccctgattcccagataatcctcatgcttccggatgacatggcctgcaaccctcgaaatgcctttcccggaacggtttacagtaacgcggaccgtgcggtggatttatacggtgataatatcgaggtagattatcgcggatatgaggttacagtggagaatttcattcgtctgttgactgatcgtttggacgaagacgttcctcgcagcaaacgcctgggatcagacgccgggagcaacgtgctcgtttatatgaccggccatgggggcgatcaatttctcaagtttcaggacgccgaggagattggcgcctgggatctggcggatgcgttcggtcagatgtgggaaaagaagcgctaccatgagctgctattcatgatcgacacttgccaggcgaacacgatgtacactcatttttactcgcccaatatcattgcgacagggtccagcgagctcgaccagtcgtcttactctcaccatgctgataatgatgtgggtgttgcggtgattgaccgttggacctattacgtgctcgagttcctcgagaatcgggtgacgagcctggattcgaagcaaacgctcggcgacctatttgactcgtatgatgaaacgaagattcactcgaaccccggggtgcgatgggacctgttccctggcggtgagcaggagggccgtcttcggactgtggtggactttttcgggaacgtccagagcgtcgaaattgagaaggctgatgccgatgagccgggttcgttgaaggaggaccttatcgagattgcgcagcttgtcgagaagtggcgaacattttcccaggactatgctgtcgccaacagtacgtcccagcaggaagaaacaagaagtgcgcctgcatatgaagtgaagaaaaggaacgtcggtcctgcgagattgaccgatgagactccttgggaaaagcgcttgatcgggctgtcaatcctaggagcgtgtgctgccgtctggttcaccggttctaccttaggcaagaccatggcctgatccgactggacttattttttcgtctcatagattcttgaaaaattgaaaaatcatctctagcccactattcatgacttctaccctgtacagcatacctatgtatcgcctggcattcgcgcgcccggctaaaacatatttagagaggcattctagtaatacccttttttaaactaccacatcaggaaattcaggaaattcgtcaacactaatgaaacagcgacatatgaggagaatggaatcgcataccctaccttgttgtcgctctatggagaaggcttggcgccggactccgcacgtgcggcgcgccctgaacgcgtctaactgcgcgaccaaattgggcttcccgtacagtaaaccgagccaccaaaagcaacattcgccctctacaggcccgctccgatcttggagcgaaacatattgcgtcatatcaaagtatgaaatgcaacactcctcccctgcagcgatgtcccgtccagccgtaaagaccatccgaccaactttatctggtttgtggattatctaaaaaaaaaggtatcagcggtgataactatcactgtcgacagaggtaaaggctaggagtgaattgaagcacaagaaacatacattcggacaacaagaatggttcgcgatcgaagcacgcggatacactgccgctgcaaattgttctcctctgctgaccggcggatttgggggcggaaagacccccgtttctcgcggatagagaccgaatgagtttgcttcttctttacaaattagcgctagaacgtcggaatttgataagtcgtgtgggagtgtcgagctgccgaggtacttcttaacgagaacggtccactcgcggacttgagcatgagaccaagtctccggagtgccgcaaagggaatcaatagcgggccagccgaatttgaagcgggatagtgatgggtgtgagtcgtgagctggtggtttgtcctcgatattatggggataggaggactccgtgtatcgtctggataggattcgaacgattaaccagagcatgccgaagttgtactcgccccattttgagagtagggacgtggtgtattttgctagccaggtgcattcgaaatcatgtcttgctttgtctgtttcctcacaggagtcattgcaccagaatacgtcattgttgcagcggtttggacagcgcgaggcggtgtctcgggagacaggtttattgcattggggattgctgcatattgcctttcgaagactggttgttgcgtctacgtcggaaattgggataatagcatagggcgggtcgatgagaagaacctcacctcgttgaattgattgcgccgcttgcagttgacggcccttgtcagggttcacgctctgtgctaaatgggggtggacccaaggcagcatagtcaagcagacactgtctagttgtatcagcggttactttgccgactgtcttggtggttgcagtccgtgattctttgggtaaattgtgtgtgtcttttttttttttgcgccgcagaatgtcggcggcgacgtgcgaaattctccatcacgagttggaccggcccacttgattctgtggaagtggaatcaatcatggctctcaatctgtgtctagacccgaaggacgaagccaattggccattctttactggtgttccgtaaacccgcgtggccgaaccaagcaatctgataggagtacaaaggaatgcagagtgctctaatggatcccgctagccggattgacctacgataagctttgctacaaacgttagcttatatcgaaccagggtcggcgcaagggaagtgctagtattgagaccgttaacaat

SEQ ID NO: 5302 - DNA, 4083 bp, Emericella nidulans
atattatatatgaccacaactaactcatgcattgaatgacctactatttacacagcatgtgtaatgtgatgaaatatgctccgagtgactataaaccagtgctgctgagtcatctgcgctacgccgttttcgactccgtcctgttctctatgttgacattttcggcctctctgttcttctctcccactcctctcttcaccagtattttatgccaatattggctacttgggtgcattgtattttggcagaacttatcttggttttttttttcttcttttagttttctatccgtgtttttggagttggagagtcttcgtactttgcatatgctaaggccctgtcgcagccgaatcgaggcatgaaatggactattcatgagtcctactaaggagatacaaatggaacatcttattctacgcgagataatatggtatccgatgttatcgcgcgaagatcctaccgaacgaagccctcgactagactaaaatagccggcgcaacatggaagacgtccggccgacggcgaaatgggcgaatcgaatgctgcgccctttggcgtccatatatcatcgattagaaaagcatcatgagattgttaccagtgtgttgacttccaagacaagggagaagatcggcgccgcgcccgcgcccgataccgaacaacggacgcgtcccccgagaagaacgaagagtaccgagcgcggactcaatcactccgacgatgacgatgagctgaacgatcccgcgtggataccaggaaaatccatggacaaaaggaggataagacataattattcaagccgcgggcgcggagctggattagggccgcggagacgcagtcgattgttgatacgaagtcctgaggcgccgaagactctccctggggcaatagagatcgcaacgcctttgataacggggaagcttcgcggtagtcccctgacagagacttcaccttctctaaagatgcagcttttccagaaccgtctatcggaaagcagcggcggagggtcaacagagcatcggaggagtggaaggacgcataaagctgtttttcggccgtatcaagggtcctggaaggaaatcttggatcaatctggtgaccccaggcttgtggatattgcacatctattggatcgcatctttctgaagtttttggggaacactcgggttgcgttcgaccgcggaggagctcgatcgttattatcaacagccgtgcggcgacttccggatttcattgctgaagaacagcggatacaggatgaactggaggagggctgtgatatagatatgtgcgacgcctatttcaccgagttggaggctgtatatgcacccggtggagatgggtggcaaccgctacgagaagctgtgcgtgctcaagggatctacctggtatcgtgcatgatacagaacaaatggataacgtcactagcggcttgtcggttgcttgaggaatgtttaaaacatcaggagcttgatgctttcgagtccttagaaacaaaactgctcgcgaatgttgatacctaccagcacccctcagcattagatccgccacgaccatccggccagcgagaccctatccaattactgggaagctattatctgcgacatccagctcggcatgtatacgtatttgaagaacttacaaaacttctaacccgtggagcagttccgcccgagtggatggtcactacgctatggaagaaatgcgtggataaagcgatcaggtcggtgtcaacggaggaccgtggctacgcagctgcgagacgattgattgaagccgtgattctctcatcggccggcatttactcgtcagcaagcccaaagatgcctcccctggcaaatcaccgtggccaagcgctccggccggtgcgtcctcgagaaactcgagcatcaacgacgacctcaaatttgtcgaatgaccaaagcctgtgccctattccagtccaagacgctcttagcaatctcgtttccagccttctcgcagatttttgtggaatatgcattgcacggtctcaagcggtagatgctgtcgcgagatccgccgggctgaaagcgcgagagatggttggtgacctaacttttaccgttcagcgagcagttgggaatgagacagttatactggagttggagcaagctgcattccgtcctctgcggtgcggctatgtcctgttggcagactgcactctacaatgcggccagagcggaacgcccgaagtcatctaccactgcgactacggttcaaggcgcaatatcgagtcattcttcaaggcatcagcttcccgacaagatgtattcagagaacttgcaaggcttgtattgcaggtgttgcaccattttggccacacgcaggatcagggccctgtccgtacgccataccaaatccgagcccgggtctcgcagcttgctcagttgaccagcactacaggggtcgctttgctgctaggcaaagtcgctgcagagaccgcgatggagctcgcagagaggacccttgacacagatgatcacacctgggccgtcgaagttcaagagatcgtcgcttcatctcaacaaggcgaaacctctcaacggtcgccctccaactcccactcaatcactagtctatatcggtgggaggataccattggcgagtgggtggcaaggacgccggcggccaggccccgcgccgtcactacagcggtagcggggaaagctcaactcaagaaacaccggcgcccacgaatggttgcttgttcaacgagcagttcatccgcgagctcgatttgttcagaagaaagcgtttcaagtgttacatcgtctgcgccgtctcctgaaccgcagacacctgttaccgcttatgccgagaaaccacaggcgagaaggagggggcggcctcggatcgtatcacgcacagcaagtacctcccgcgcgagttcaacgtgttcggaggagggcgtctcaactgagatatcgtccatgtcctttgagaaaccacaggtacttaacactggacaaaggagaagaagaggacggccccggcttattgcgagcccggcgaatagtttacctgcgaagtcgtgcctggaggacacctctagtgttgcgtcatcgccggcatccgtctcgagaaagcggccatgtgtggatcgagattctaggtcctggccgttcaagaaaacctaccacacgcggtcatcggagcgagtggtcagtaaaggcgataacccaaccaacgatcccgactgttcttcatatcagccttcatctggagcaacgcatgttccagcagccgcccagacaaacactgggctcagggacgtgctgcagaagaatccggtgggtcagggggatgccacgacaagaaacactcgcatggttccagtcccaactctggaggttgtcatagtcaataagagtccgtcgtcaaattgcgcagcggcatctaaacatcctatgcaaccagttaagcgacgcacccgtcattcatctattactcccaggctgagtcccaggctccctcggagaaggcaatcagttccagcgcgagttacgcgaagaagtctcgaaactgtcatcccgggtccggaagacgacagcgacgatgagcttagttttctctaggcgcttggcccgtgttttcatttgtttgcgcttggatttcagttaagtgcttgggttaaggagtcttggaaggatttggtctggttcagcgtgataccctgggcattcatttatgttttctggttgattttgtttaatttccatagtctacgagtccttatctgctggtcacgattctacggatcctgcccaaccggggcgaacttcaacttcagagatgattatctcttggtcacgccgtcacgctccgctatcgctttccaataaaatgtggcggctcagatggaactcgcatgtcacacgcagtaggctgtttgagttctccagtgcagtcaacccgccacatatttttttgtccaaagaatccttgacagctcgactcccttgactgctggcgacccatacttaatataattcccagtcgatatattaatatgtacttctattgctggagccgagtctcagtccggtgttggcagtagatgag

SEQ ID NO: 5303 - DNA, 8112 bp, Emericella nidulans
ttagttgtggaatagtatgtcaatgaagggtacctttcactcaccaattcggtgtcctctaactcttgtcacgctccttctcaatgttcgagcttctatttgtatacagacggctcgtgtgaggtcgctgaccaggtcgaaatacttgccccgacgagtcaattgttctggcaggcctgttttttcagtttcaatatcagcgagccgcggcatccaagctctgttaaggtttctactttatttaatttcttccattctgttctatggtagtattaggttatattcttattttttttattttttattttaattttaatttttggtgagtttactatattctcgcgcacacccttaccttcaatgtgcctcagatacggctctgttcccactatacgaacaacttcctctagctggatttataacagtaggttggtgccagccagagtgctgtgataccatgtatgctagagacttgctctatttgatttgattctgttaggtactttacataatagttaacgaactgttctatacaagatcagccacaaattatgaggctgcccagcgattactctgttaagtggttaatgcctagtaaactaacttatattggatcaattagtaatgcctggactagtcaaatcagctatgtatcgcatttcagctccgtaatcccagcctctccgtcagcaaccgccagatcgttcccatcacaatgtctttacgacgcaaatcatgcaacgcgtgcttcaaaggccggcgaaggtgtaaccttgcctatccgacatgcgaatattgtcgaaagactaggaaaaactgtcagtatgcgtatccgcctgtcagcgtctcaggtagtcagccgcactccgagtcagacaatagccctacggctccagctatgtgtgacgactctttcgccgcgctaccgggtgcgtccggcagccctggtctggactttttagagacaagcactattccagagattttcgatcaaattcagcagttccagtacccaccacttcgccgcagatctacaccaacctggaccccgccaagtcaatcaagcctaacccggttcctcggcaccctcggcgaggtcctgcccatccaaggaagcagtcaaagctggcaatggcttattgaggagctgaaaattcacccttcgcagttcgccaaacaaggcgaaacgatcttcatacatcggcggctctatcgcgagttgatgccacggtctatccgaatggcatttggcatctcgtcttcgtcgtgtcttctatccgacacaaaccgcaacacgttgttcaaagcaatcgataacgaagttaatgagctgctgaacaatactgagccagcgacccttcttgatgatcttgcaaggttacaggcgcttcttctctaccagactatccggttcttccaggggaccctcgaacaaaggtcaaccgcagaacaacaacaaagcctcctgacggcgcgggctcttcgactcgtctcccgctcacaaagtgagctcactggaaatgcagcggatcggcgtgcgtgggttcttgctgaatgcatccgtcgcactgccatagtggtgtacatgctctacggtgtgagttcgatatcccgagaaggcgtttgtgtgggactgcatacgctagcgaaactgccagtatcaacagcagcaacggcttggaatgctactgaagaattagatcgcgagggtgccgtagacaggacaatatcatcatgaggatttcctggcatgctggctatgtctctacgccgcgacgcctggatccgtacgagcggttgttgaatgttccttgtcaaggcgtagatgcagttgaggcttacgatagtctggctttagttgggagtggcgatctggctatcacttgaaatggaaatggtatgctacatatggacctttacctgacaccagcctttcagtggttcccgtagcagtggttttcctggagcgcctctctagacagtcaatgcgatccactcgtatgactatatctaggagtatttcatggccggtgagttcctggaggataccggccacatcctcattcgctcttgcctgctcgtagttctaaagcacgatcctattagcacaatgaagaaaccaaaattgggataccactcatacctgcagactctgctagccgatcatccctagaaaatagcccttttgatcttcgattccgcccgcactggagaaggccgtggccccggtacgctgcgacaccacagcggcctggagtttctttaatgtccgccccgtctcgtgtttctcaacaattttgataatctgcgtgactctcgactccgtacatggaactgaagagatcctggtctcaaataattccggggtattctggggctttgacaaactgtcttgcgacggccaggaattcttggaatgtgcgggaattggggtagaacgcatgaaaagaaggcagttgcatccactctaaaatacacgagctttagcttcaggttccattctcatagagctgtctatctgtgcagaaaggaatttgcgtcagtatgaagcgcacctataacaaggataccgcgcccgccgctctcgtcaacaggctcgcccgcctcagctaaaatcctcccgcgaaagaaagacctgaaaccgggcatgccacggaaaggggaaaatagcgatgccacttgaatctgtagcagagactgtgtctcagggtctgttttgaatgttggaaggaggagttctgtaatggccatattcaatcgatgggatggcgggatggttgcttattaaacggataatgctggggtactatgttctataatgagctagatgccaagttacccgggacatttggttactgtgtcctagaccggctttatatgtgatgctgtgcgtcgcatttcattgtcatgcctggggagacaatcattgccgacggaattagggcaagttgcggggatccacatctgcccgcaccgcagcccgcagtccgcaatatcccgagtaagcccgcatccatatcagatatcagtttcatgaatttgtcaggcccgcattgtatgacaaatttctaacgaaagcccataggtttgcggccactgagtgccaatggctacagtttcgagcaacgcgaaggactacttaaggacccaatgtcccgtcaaaactatgggcgcagagcatcatccttcaacagtgaatcataggaaagtcaattcacactttcatttactgccatgtccaaagttatcaccgtagtcggcgcaacagggacccaaggtggctccgtggtaaccgccctccacgaccttgttgaccgaacgtacatcgtccgcgcaataacccgcaatccctccagcgccgcagcccaaacccttctcgacaaaaatattgaagtcatagaagcagacctgcacgatctttcatcactgatatccgctttcaaaggaagttcccgcggtctttgccgtcacgaatttcttcgaaaaccttcccactcatggcatcgagggcgcgatggagcttgaaacgaacgccgggattaatcttgcaaaggctgctgctgcaactgagacactgaagcattatgtatggtcaacgctgccagattcgaagacgaactcggagggacggatcgcgtgccgtactatgaaagtaagaacgccgtcgaccggtatatacgctctgttccggagctgttgcagaagacgacgttcgtctggcttgggtggtatgctggaaacatggctgttccgctgtatcatccaaacagggtttgcgcctttggtgggattggggtaaggaactacgtgacttttctgggcgtggacccggcaacgaaagttcctcttctgggcgacgagaaggtgaattctgggttatttgtcaaggcaattcttgaccagccggagaagacgctgtcaggaaagactgtttctgctgtgctcgagcagcggtctattggtgacgtagtggaggcgtttggaaaggcaaagggagtgcaggcgaggtgtgtgaagattgatagggaagtgtatagggtgctgtggccggtatggggggatgtcctcgatatttcacatgcttatcttgaggatgctggcgggaaggcgtttagtgctaaggatgaagaagtgctgacaaaggaggatttgggagtggatgggctggcggggattgaggaggcgtttgagaaggtgcccttgcttggctaacgatgctatatagccttccatctcctcctgtctagccatatactacttgttaaggacctctatggataaatcacctgatttctcttccttggcgtccttctactggtgcttgtaatagcccggagtgaatatgcttagatagccgtagccctagtaatccatggtgacagttcaaaaacagcgctcaatcggtgtccttggctgtaaaagtcaataaagcctggatgagctcaatatcctcttcactaacaccacagcagttcttcaggtactgcaccatcccaccaaaccgttccaccatcaactgcagcataagcagcatcgcctccttcctagaacatcattagtacaactctgggagcacagaagctatgtaccttgtctgaataacaaccctcgctctcttcagcgcctccacgtcagtaaccgtcgggatagccttcttgatcgcggctgcaatcttaggcaacgctgcttccagtgctagctcgcttcgactatactcgtctgctatggcatcatctgagaccccggctaaggagagaaggaccgcgaatacgactcctgttcggtctttacccatcgcacaatgaacaagaaatacatcgtcagggttgtcgcgaatcaaaaagagaatgtcccggacgacttggtgtccttcaatgaggagcttgaggtagccctctgcaatagcctaggcatatcagaccacatactactctaatgttccagtgactcactttctccccctcctcaagatacctcttatacttgtccgcgagttgctggactgtgaatccatgcttcactagaggaaggttcagcaccctgcattggctgaggctcgacgtgcccgtaaagagcgccttcgtttcacccgagttggtgaggtcaatcaccatcgagatgcccagatcgcggatttgtatagttcctcgtgaggtgatgtctttcaggtggccggatcggtagatgaagctatcccgggtgaagcagttgggcctgagactgctgggataaccgccgaaacttcggacgttgaagacaccgtctatatcaatagatgctcctcttttagcaagaaaagtgctctgcggtgatgattcagccatcctgcaatggttaagggcgaatcagccggtggcggtcacggtaaaaaggggctttctcctgcagcaaattccaggctggcccccatccttcatacgacacggaacttcagatttcccgtcagctgctgcaggtgcctgccagaatgcatctgtgacttagctgtaagacgcaacagtccgtcatttgtcatgtagagagccctgtactccgggaaaagcggcgaccagtacgtcgtgcgtctcgtttagttgaagtaataatacctccaatattatgatcgctccagattgcaaatctttccttttaagaaactgaggcccctggtctcattctttcactcggcaagtacattgcaaatatggcgcctaaagcaccatggtctatcggattctataagcaggctttgtcaacctttatctgaatctacaacttcgccttcactttcccatcccccacacctaacccacgaacatcaacagcaggtgtaacccctcttactaaatccgcaacaacactgcccgttcccagagccaatgagatgccccatggcccatggcccgccgcaacaaacacgccgccgttctgagcagtcttaataccacccagagtagagtcatccaccttgctcacaaacggcacgccgcgttccgtaacgggccggagacaaagacctttgtggaggatatacagatcatttgaggtgggaatttcaacagctgtttcggtcttcccgacgggagtttgcccataagtctcacggtgacatctttaagcttctgcatctccttctcatcatagtagcgctccttcaaatcctccacacgctccggaaccggaatttcgcgactgttcagacccgcgatgtaaatctcgcttccttcacgggagaagatttcaggactgaatccgcaagagggcgggtgcgtcgtgaaaactgcgtgactttcaccgttgagttccttttcgtgtctttctgtgtaccgtggagagcggatgaccagggagtatcctgctaacgggtagattggaaatgttgttgtcgaagaggggaagagagatgagaatacgctaggggtccaggagcgcgccgcaatgattatgttggtgcagggaaggattgattcggtttttgtggcgtggttagagatcttgatggcagtgaccatccttgaagagtctgttactaagaaggttgctctgctgggttggtgcagcttcacgccgtgtgacacggcttgttcgagcagaaagtgtgagaggcgaagggggtcactgtgttcgtcagctttaatctgagttaagagggctgaaaggtcacatacacttgcgccacacttccaccctcgctgatcttctcgatcgccgtcgccttctgcttcgtcaaccactccggcccctcttcaaggacaaccggcttcgtcgttgccgtctcagcgcggcttgtgccagaccgtagccaatcgtccccccttgcacctcccgaccctgcatccgtactccccaaactcagcgccatccccttcatatacccccacttcttgtttccgtcatgttcagcagctagagactcatggagtgcgaaagagtactcgccgagcgggaggagagacggctcaaaccagtcttttgccaggaagcctgcggcgtacccggaggcggatgagaaaagagtgtcgctggattcaatgatgtggatttgcgaggccctgcacggatcttgttgggagaggtagtaggcgattgaggagccgattatgccgccgacgaggattatggtaggcatcttgcttgatttttttccggtatgatccaaacttccttggtaaacaggtgttgttgctattgagtttcttcagttcccatagaaccgaggaattggcaccctaatataccgcagcgcaacgccgaaccgagatcgtataggaatatgtatgtgtcaaggcgtcaaaatgtggtgtggtgtggattgcagactgtggggatagcgcgccctccgcatgacagacgcggattctttgacctgtttcgttttaggcgccttcatcgtcggcctcgtcccggttttaggggtcccgagcctggaggtggaccgggacagttgccggtctcgctgccttaggagtgactcgggaaactgctgtttgccgccgggataagtaggcatagtgagtctggactggggcccgagaggaagcatctagatcgaccattgtcaatgatatgatcaaggagatcgttagctatactttccttgccaagtcatcgagttggctccatacggccgtctagtgcaataggaatgttgccggctctagcgaaaactttggtgactcttgagggcaatgccctgcgacgctgacggcactaccacacaaactacgcagtcataatcattggttgattgcgcgtttttgagccacatccatttcagaacgtcaactttgacgcgtttaaagcggaggagaacgcaaattggtcaggtgactatgctgatgaattctaaattctgttccttccaatactatcatcctcacctctctctcgatgcagccgagtgggattgttatccataagggctgccagatctttgatgtaactttttggaggggggatgtcctagttgcttgacccgtcgcattaattcattgatcagccaaatggtggccgagttgcgcgataaagagggtaagacaagacattgatatatagtagacatcagtcttctaatttgctgcgattgggtcgatgtctaagctatagacatgaccactgttaggagattcatct

SEQ ID NO: 5304 - DNA, 2123 bp, Emericella nidulans
gcctcacagttgaataggtccgcggcggccgtgggccgtttgggtagccggtcgccggccccgtgctcattctgatttctgacaatgaaccgcgatcgcttggtagttgaaaggcagattagattgccgcagcagtaccagtatgtactcggatagcctcggcggcggataaagtagctgtacccagaaatatagtcgtgatcaaagtcggtggcggcgggaagcaactttgcacccaggtcgggatagttgcccatagagtacagaaacatcttgcccgagaccgaatcaaaggctgggtcaacgtcgtgtgccgtgtgaggacatatcgccgtgcccaagaaggcgacgttctcaggactctctttgatctgcaggacccagagctttggggccagtcgctcgatgtccactggtgtcaaggttgcggtcgcagaaccaacgctcgggacggtcagtgacttgccgatattgtcttgtaagatgcggaagagggtgtcggcagtgtttcgatcgggggagaggactacccagacaaaatgaggcatgttggtccccgagttggcgggcctggacgcgatatagtgcatgtaaaccatctctgttcttcgtggttcgatagacgcagaacggaactctggcagcgccagcgatactcctgatgtcgagatacgcatgatctatgtgagcatcagagtgatgcaaggtctacacgctgctggtaccatggaacgctggaggggaagatgaactacgcttgggttaccatggaaccctgtggttgctactgccgaagagacgaacgctttatttctaagactgaactaggtatattctgatcgcgcacagttacattcgtctctataagctcttttcccttccgtctatcctgttgtttgatttgtccatttcgtgattagcccttctgtcctagtttttggccgctggcatcgtactgagttgccgattaggtattaactgtcaatgatgaaacatccctgatcaatgcggtcgctaatagcagcaactataaagcttgcatgggtcccatagttctgagaagcgggtcatgtccacaacaatccccaatgccttcttgacgctgctgacaaaactgtggcgaagatgacaactgccagatatttgtggctgcgatacaagtctataagataggacgaaagagtctagtgtctaataaacccagcggataactcaaagagaaagagcgtccacaacgcgcgggcaccgcgcggcaacgatggttagccgggtggaacaagatcatgaactttcctagtagatcatccatggcgttcatgagattactgattgtcgtccagagatagaatggtgcaccgggtcgcggaattgaaaagcctggccatcttaatcgcttgatggtacaaacttcaagtctgaacagcgttgcgtgtgacgacagactagatctgatctgactggaagaacgtgaacgtctgaaccttctattgtactacaataacctgagagaggactatcgtagctgactgggcgatcgagtcttgattttgggctgctctgccttggagggtctgatttctgagaacgcgaggcgggacgcgattgtagactggcggaagatggaggaaggagtaaaacttatataccccaaaatcactgcccagaaatgcaaattcatttataaaatatagatagaaggccttgttatagcggccagctgagccatgcgttacctagagaaaagaaaacagggctatctctaggtaggttccttgttgagcatacttccaggccatttccgagaggagaatattctgggtagattctgtccttacctacgctgatcatataagtggaagtctcaggactggaactggctcaatatttgtagttcgtcaggtctcagactaatcgacctagccaggagactgcctgggcctccattcagatataccttagggcagacaaacgaacggggtcaatcctcgctgttgtccagcggctgaccaagaagcgtgactcctctctggaccctcctcctcttctttgaatgttttctgaggtcatcatcgacgagagcacgatggagttggggatcaactctgtgacactggcgggacctt

SEQ ID NO: 5305 - DNA, 4069 bp, Emericella nidulans
cgatcaccttctggccaggcttgatagcatcggactgcatctggaagaagtcctgaccatattccttctcgtagccctgcgtctcgcatggacccggaagcttgccccgcttgcgaacagggacaaaaccggcgccgagttttagagcgaggctagggcccatgaggaatcctcgggcctctaggcgacgataacatcgggcttctcatccgcaagagtttctaggatgtggagctcaaggcagcgaacgagggcttcgtgggtggagtgatcggagaagatgggaaggatatcttcgaagaggatgccgggggacgggaagtcaggaaactggcgcacgcaccgccgagcgtttaccttaagactggcgagttcggcggcgcgggaggtagcggaggaggggtgtccggcgacttgggtggtggaggaggcatcgggggatgtggaagcggtatgttgggacatggtgaaaggaaggggagaagaagaagaagaagaaaagaaaaggagagagaaaatagagctgagggtgcgggaagattgggaaagtagaaatagtttgtgataagcagaggggaagagaaaagaagatctgaataattccgcatccaagatacatacagatacttacagactattacacaacgcgattacatctccgtctggtgtcactattcattttcctctgcttcgtttcatctacttattgacttgatagaataatactccggaatgcacttcctaacctggtatcatcatatgagggtattctcgcaactgctttcagaatcgcagtacgaaccagtccctgtaagaagtatacagccccgccagacttcgcaatcgagtctagaatcctatcatcagcccaccgccgctgtttctccctcgtcaactctccgactcgtgcttccgtcagtaaccagccatagtagttagacttggtcttcatttcaatcaaacccaacctcggtcgtgtcctcctggttggcctttctttgccgaaccctcgaggggtagcggtggatttaacttccttagctgctcacattgattgcagatacgactcccttcaccgtctgcctgtggatcattaacaccaccactgatcgtccatgcaaggtgaaatggtgcaaatcacttatcctacagcgtactagcggataattctcctcttgccgctcgccacttgtctcgagttgtttgccgtccaagtgagttctagtgtctaagaggcacgctttgctgcagcctcgcgccatgtttcaggccatctcactttctcactcggtgagctgcattcgactcgtctagaaaagtctcccgcttccccgtgcgaaagagactcgcgggccgagctaacataagtacgtgctaagactacggattgggagctgctatattgtgccgtctgtattgaccagtcacgttacagtctaacatttccagggcactccaggcctccagctcatcggggatagtcttttgccattctgactcgccgcatttccatatgttgtcactaaattgaccgttcctacggtgctgtttgcaccgacttgactccttgtgatacagaagttccggggaactgttttacgacacacgaacgaatatttgaccgattgccctgcggggtcctcgcgggagccatgcaggctcattgcttccgttgtctacaagcatgcacgacgtatgcaggctcaaacctggtagacgaatctgctagcttaatgatatggcattcttttgcttaaccaaagacagctcaagtacctaaacactgttactacacagatttgcagtacaaagattcccttacaccatcgtggacctacaacaagcatgtgcccttgctatggatggagtatggaatgtatcctgttcctatgctcagctcatgatttccatgttccacatcgtgctacagcccaccgccttttgtgcatgctttctttctaaccattttcaatattcaagttgaaattcagtttagaccattacagagatgatgcgttaccatgaataaatgctcgaagttctcaggcgacttcgtcgataaggacagccataggtgctgagttggccgcgactggcgcctggatatagagtctgtccgcccaatatttatagaaaaacagagccaggcacaacaattaacagcatatccactacatttccaggcttccccaaagggtttcgtaactagaacttcctctgcacagccacttcggctttcaggttacggaaattgagccttggccgttgaaggattgtcacttcgttatgatcctgtctgtcactaaacttagtccttccgtcaacagaacgactgatgtcttatgtaagtctccacctatttcaatcgcatcgtttcaatgtaggttcattttctatacctcctacctggtacacattagtatgtgcatgagatacacaagttcgacaaactctgctgcagaagcccaaaaaaggttaagatggcgggtgctaggaccgtactattacttcctgtatctgattctgtagtcttttgttcagccgagcttctcgaaatgacgaaacaaaaattatcgagataagtagagtactatcacgtgaatgcacggaccacctcgcttacagaaggtgagtatttaaggcaccaaaagattgaagcttctcccgcatctcactattaccgtcgtacgacggcttgcttcatgtctctttgtacttctgctcttctgcagaagtactcttattctcagcagatgcatcagtctctgcctttgtagtattactgcctcttttgcataatgtgtcttgctcctcacgctgccgattcgcagccagaccgacagttgaaaatcctggctcgagctttggaagctctactgctgaccacacaacaagtcagcttcaggcagaaactcttgcgtcaaaggctggcatatgcccatgatgaggtattttctcccttccttcctctccacaccaccagcctgtctcaagtgatgagagaacttgattagctctagatcaggagtccatgtgacgatgacggacataacatgtattatctgatgagactttattaactgcttcgtttcatatcatttatttgatcgctgctgactcttggaaagtatctcaagctagcaggccgaactccgcaaggaatcgatccgcacacgaagattgtcgcagagaagatcctggctcgccatattgaccttgacaatccttcagatcaaagcctaagttcagtggatgtagtaaaagatctttcaaagtctggaaacgtaggagattcaagtcttgctgtcataacagagggggtggggatatacaaatcgttcctcagccctgataatgatggatcaactggcgtggttgcaacaagagctggctcgctagaaagagactttaccaccaagggcacgcgtggaagtctgcgctgccctttttcaaaacctcataatttgtcctctgaaaatggggtcaacgggatcgaaacagcattgccatcccagaacggcgatacatgcggtttccaacagttagatcccatcaaagaggaacagatggagaggcagtcgagtcaagctccttctgcgagtgtgcgctcttcgaatcgctgccctgcctctcgctgtcctattaggttcctagaccagcatagtccggaagaaattgccgactatgttgaacggcacaagcatgagattcccagaagtcatgcgatatgcgtcaaacggtattccaatagctcccgccagctggatgcaaagtatggcgacctcaccaacatgatcccgaggtttgtcagagaaacatcaagccttcctccctggccgtcgcagctcgcaaaccgctagctcctcagcagagtgcgtgcacaaatggtcgcaggaggtcaaacctcagccgccagctgatacagatcaagtcatggagtgccccgagccaccgtgggggcacccggtcggcctcccatgaagtccgagaaggagaaacacttagcaggccatgtggaatttctggccccatgccccctccaatagtgtacgttttcccgcatggtcga

SEQ ID NO: 5306 - DNA, 2999 bp, Emericella nidulans
taaggaaagtaaactgagatgaatgtaatgtaccatgacttcattttaataaatcaagatttgcctgcctgtcttttaaacatatatatacacagaaatctaattttaaaccgttactgcagctacaggccctagactgtgacaatggctacgtttcatttagccacacacacacacatcgcagacatcgctgcgatcactgtagatataactcagataaacattcgcttcaggaataaagcgcatggaatccctcagaatgaagaagtacaagaaagcccgccccattggttgtgccattacagagcactaccatatatcacgcgaggcgcgatagggccatctatttggactagtttcactgcagcctaccctggaagtggtctagggtagggatttgctccttaagttgactgctaccatggggtcttgcttcagatgttatggctgaattggactgacttgtgcgctgcaattggatgtacatgggtgaaagggaaaatgctatcatgtagtattcatattatcatgctcaatctcattgtcaattccatatctatgtgcacggtttcaggatgaggaggcgtcgacttttttaagttcttccctgtatggaagagtcggattaagcacggacttgcagaaacatcagagtgaaatatgccattttgaacatatggggagcagacagaagcataagtacgcaagtgattagattcgcagggcaaaatgaccgctcaggtagtagataagtgacgtcttaactgcttggagaagtcctcggcggcgtcatcatcatcccagctctcctcccacaggtgtacgttattcccgttcgcagtagcctgctcagtttcgttctcgggccagtctgcatgattatagaatgattagtaatttgttgatatgaagtacttgcatagtacatggcgctgtcgccggggaggttggaggaagggaacgaagagcctcagcagaagcgccgttggaaacccaccatcaacaggaaagtcctcaaactcatcatcttcctcaagcacggtaggcttttgttgttgcggttgttgtgaagcttcctgctgctttgtatcctgagattgagtgtttgacattatggcggtgggtgcgcggcagctggcgagatgaggagtaatggcgatcgggtacaatttctcgcaatagagattttagaatgatagatgccaggctgttggtggataaagagttgaagttcgagggagaggcgtactgtgtggaggacaagctgagatgctctgttgagctacaggtcccggtgaggtcccgctctggagttacctttttctgaggcgtcacatgttttgccaagattctttgaaatcgcgtttactcgcagagtacttcgcatgctccagaaatactcgatccactgtagaacaatatgagatacaggcgatcgagacttaaaacagctgtggacagtgctatgatgactagagtctctgctgaaatgcacattttctctgcatgatagaacaagtgttgccatcgtcagatccataatatactgacgtgcctactgtactttcttttctaaaagctacacttataaccctgtaacgaaggcaaacatgctcctgaatcaagacacattgtgggtgaaccctgtagtttgcataaacaactgggagagaacacagctttgtatgatgtcacacgcttgtgtgcccccagaagttggcgcagcggtcagcagcggcagaatccctatacagccagacagcacaaggcttctattaattctagctgacttggaggctctgagtcgttggacaaaagttgactcaaatctgccggagaatttgttgcatccccacatctttgatatacagatccctgaacccaaccttgtcgtctgggatcctagatttgtttcagctttcgattacaagctgacgatgctccgcctccctggtggaccacggccagactcgttttatttgatcgctttcattgctgattagcgcgagccgactctcgctccgagcaatactacgctcttaagtgtaccatattgtcaacctctcgcttcgtcgcctttctgcctcctattctatcacccccgtggccaaggacattctcgtggatgctcacgcgcgcattcttggacagtctcttgtgggagctcagccatttgtccgttcgtcttgcgctttcggaccgtccggcccggtgtcctgattttgtcagttaataaacactcctaacgctacattctgtccgttggccaatttttcccgttatccgagtctgccggcatcctgagacatgttcggcggttggtttgcaggcaaaaagcccagtccgaatggctctactcattcactgagtgcttcgacggaattgcaagactgtgagtgtgcgcttatctctttttgaactttgtatgctgaccatcaccgtctgaggcagtagaggatgcgatcagaggtacgcgaaagcctatcagtgttctcgatttttggatcgtcgacgggctatactcccaaagctgatgtgcgctaatctttcctcttttcgcctttgcgtgcagctgctgagttaattcttaacgatgatgttgatggtgctgaagagggtcttgcaggaacgaaaatcaccgtttcacctgggaaggcccttgtttggtatatcctcaatgacagatgactatcctgtgtataacttacataatggccattagcttaggagggcttgtatgatgttatttagggcacacttggtttgagcagaagttttgccccaggtttgtaacacttttgccggtttttgtcgaacactcttattttgcggggggtctcctaacaaacctcaaacaacttctcgacaaagtgtccaaacctggccggccgggatttcctaaaagtttccctgcccgatttttttaagcaaggccaatagggctgtgtccctaacgggtttaaagaaaggttttcataaaaaattttgtgccttttaag

SEQ ID NO: 5307 - DNA, 880 bp, Emericella nidulans
tagggggccagggtatctatgcgcgtgatattatacccgcgcaccgggggatccactagttctagatcgaccgccaccgcgggggggctccacaactccctatattgagtggtattacacgcgctctctgtgcgcggttttacaccgcgttgactgtgaaaaccctgtggttacccaaattaaacgccttgcagaacatacccctttttccagatgtggtaatatcgaaaaggggcccactgatcgcgcttttcaacagatgtgcacactgaatggcgaaaggaaattgtaagcgcttatattttgttaaaaaactgcgtgaaattttctgttaaataagactattttttaaccaatatggccaaatcgggaaaatccctctataaattaaaagtatagtcctcccaagggtcgcatgctatgccaatttgggacaatagcccactttcacaaacgttgactttaaccttcaaaggggtaaaaacgtttattagggcagaggcccattcgtgaatcttcacctaataaatatttttggggctagtgcctgaagaactaattgaaccttaatggagccccaatttgaacttgagggtaaggcgtccacgttgtcaataagagggtaaataacaatgagtgtccttggccctgcatttatcagttagtttattaacacaaccgtctctaaatttgttacttccgctttgcttttcgaatgcccggcacctttgtttttttaaactgaatattttccctaacaacccataaagctaattaaaagtggtgttttactatcgtccctactttttgcttccttttcttctaaattttatatattcatctaacctggttaaaattatccgtaacttttttcatattt

SEQ ID NO: 5308 - DNA, 3045 bp, Emericella nidulans
ttgcctggacaatccggccgaccgatgacggtcctcatagttctgtacatacatactttggcacaataatggttttgctacgaggggtggtgatagatctactcctgtaccatgtacctgtcgattgttctagaagcgagaaccttgcacgtgatgctctcccaccgctcatgatttgtcccacaatctccagttgcccaaggtcaaaccgttcaaaaggggaaccgtggacattccgaccggaggatttcccctagccggcaaggcatcttgaatccttcccaagacgagattcagctcagcgagtcggctaattcgtcttttaccgaagcgtgagtatcagccgaaatttaccctgcacctgcatcctgccaccacactcaaccaaccttcgcacaagaatcttcagaatgccgggaaatctcgcgttatattctgcatgaaccgattctggccatttgccacactcacccataggcactgcattatcatacggtcgattctccggtcgagtctccagtcgccacgcttctgcaggtctccttcattaacatggggtggacggaacttgtgtgggggagaacattacgggcatcgaatcaccgccagctcccaatttaccgaagctacccccggcttctaacctacacaatataacgtttgtagtctggggactagctcgactatattattatcatgaagagaggttcctccttttggccgtccgttctcggcctgtccactccatgacctggcatgatagctaaaaaaagtttgaacggcggctttaaatcccagctctggcccagtctcgcctgcccctttggcagcttcccgtgtctgagtttgcagcctgaagctatcatttccttcctgacttgctatgcgcatttcctgagattgcttgagaggctacctgcatcgccccaggcagaacagttttctcgaaattacaatgacagaggccagcatgccatgcgatgtcccaaactggggtttcgacctcgcgaattcgaattcagggtcgactttcaattacgagcctggtgttgctggtgacgaggagttgtggtatcgaaaccaattcggtgtgggcagcttcgatgtcccgccgtggcagccgatggaaatgaaccaagggtacgatttcgcatctccagcgtcaggcaagacgcgctaccagcagctgcccccgctttccccggcccaaaacggcggcttttccgcccggtcggagggactttcaccgaggtatgggcacggcgaagtagagctgccaaagcagcggatgctgactctcgacggtcctaacagattcgagaatgtacaaacggagaacagcccatattcgctcgacgaccttctccgcacggcatcgcaagtagcgaccgaacgcgcgctctacatgaacattccttctacgggtgcttcgactgccggtgccaacgctctttctccaacggcggagccaggaatcagctcaccgggcgcgatttcaagccatcactccatcgctagcgacacagacgagcacgacttaccggccttcgatgtcccacaggtgtaccagctcccagacttcagcgccaatagtaacgctaacgcggctgggtccctcgcatcgcgcgatctaaaggaaacaagtctcaccccgctagagatgcccgacggcacgactcgattcaccgctaactggctgcccgtcgaccccgagggcgggttcactatccgccctccatcgcaccacgcgcttggaatggacctcgacccaatgttgatggatcaccaggtgcctttgtatcaagaccacggccagcatcactacaactatcggaatgcatttatctcgctagataatctaggcggcgaagctggagtgtgatggaatcgaccaccgcctttttcctccgctttaaaaagaggggttggcgttagtcacgggcacgggactggctcccgcagccctgactcgcgctggtctcctcacagtctcgactccctactggacacttggacggggaaaatgaagacgccggcttcggctaataatagtactaaattaaaatctccgcttgcccacgaagaccagcgacagcagcaaccaagccacgtcgatggccgcaaattctttgcgccgccgagaacagagcaccaagcgcaagcaccagagctcaagccacctgtgtcgcaccacgcggcaagtcaaatgacccaggaatgattcgattctcgattctctttggccatgacggatacgccgagtcaagaagactcgaaatacctgccactaaatgtaccgaggccgcgcacgttgccaagcacgacagaactataccctctaggcctgtcgagaaatccctgacccttcaacaaaaggcaaacaatggaccgatgctatatttatattaacgagtcatgaggaaatgtgttttacgaggaggaaacaaaatgtattatatactgagatatgcggggaactgtgaaaaataataaacagaataaaaatactattacctattcggaattaaatagaagattggtcctggaaaaagctgtttacaacgcaaatcacagagatgcagacacttaggctcataacgtacaatatactttcgcttctctccacagtgagctctgtagatcggctggtctccccataattccagctacccatatgccgcatagctcaaagtgacgtgaatctccgcacattgagcctcggcttaaccaacacaactaccgtcaacaaacgatccagctcatcctccggttacttcaccattatcttaaattgccaccgaccatccatatcattcatctttccatctatcatccatatattgaaattctgtttcaaacgaaaaccagaagatgcccgccctttcactgcacctgctctccctgcacccatcgataaactccatcgacttcctctctgagctcaaaaaggccgccagcacaaaagtcatggtcgcatccgtccccgtcggaccattatttcgccacaacctcgacaaggatctctcctctcagaaaaatgggata

SEQ ID NO: 5309 - DNA, 2793 bp, Emericella nidulans
gctgagattaatctgactgctgtagtcaattcagccggtcaatctcgactccacgcacaagaatacttcaccatggactcgcaagatcagtcgatcagcccaggtacgatcgattttgaactatactcaaaatccttatgatgaatctttcgtaacagttcaacagatgaaattgcgctgtacgatcgtcaaatccgtctctggggagtcaaggcccaggagaagtgagtggaatcgaacagtttcgtggaccgaatccttgactaacggcgaaatgtacttaggttgcggtctgcgaatatcctcatcatcaccttcaaagcgctggcaaatgaagttgccaaaaatctggtgttagcagggatcggaagcttgactataattgatgatgggatcgtcaccgaagaggatcttggagcgcagtttctcgtgaaccaggattgtattggtcaaaatcgggcccaagctgcggccccagcagtacgagcctacaataaacgagtcaaggctctcgcagatgcaagtggcctttccagcaagccgccagagttcttcgggcagttcgacttaacaattgcaaccgagcttgacttcgccatgtacgatgtcatcaattcggcctgtcgtgtagccggacgaccgttttacgcagctggcctgcatggattctacggttttgttttttctgacctaattgaacatgacttcgtgatcacacgagagaaatcaaacgttccatcgcctataaacgaaacatcaactcggactattttgaacataacttcgaagaaggagaatgacaaaatgattgagatggtcacgaaacgagagaaataccatcctctccttctagcaaacacatcaccgctacccgacgaattgacacgtctaccccgccgccgaaagcaagtgacaccgcttctgagctgtcttcgagccctctgggagtttcagaaaatcaaccatggcagattgccaaccttttcacaccaagatcttgaatcattcacgaaactggctcgggatgcgcaccaggaactcaagcttgacattagcaccctcgattcagcattcttgcgaactttcctgtcaaatctcggaagcgaactaagtccagtggccggtttcttaggaggtgctttagccaagacgtgatgaatgtcctgagcgctcgggagcagcctcttcaaaatctccttctggttgatggcgagagatctgttgcccccatctattcgctacaccctttctactcaatggatacaccaaatgccatggctgccgttcctccggctccgaatccaattccactgaatggtcacccgggtatagaaaatggtcagccgagcataggaaatggccagccgggcgtagggttgtcgtaaccctataactccggtgacctcatactattgcggaatacgccatgaaagagcgtgctgcatagatcagtggagaggttaacgtatatttcggttcgatttagccttcgactttctttctctttccaacttacggccaggattgggtactacctgggttgggagcagattcatgactgtatgataaggtttaaccattgaatatggggtcgataatggatccgggataatcgtccgggcaccttcttttcctgtttacttccaatctacaccacagtgaattgactgcgggatatatgtatgtcgtaacattgaaaacgccaagccacgccagttaaagtacgtatgtggttgtcgataaacaactagcgtccggagtacaaggaaactgtatctactgggtttaccaagactgtggtttcatatgatgcaaatatgtattagttcgcaagcaagcagacaaacaagcaccaagcgcaacgccattcacccaaccttaaaccaaatggaaaagccggacaggtactaaaactaaagatgcaatattagggagtggtcctcacactccaaataaaccaaacaaggggaacccaattccatatattctcacgaaagccgtcatgcgcgttttgaaaaacctctactccctgtccttcctgaaaagtggtgcgctttcttcatcttccgcttttcttggaccagggccatgtcttcttccctcataaggtggaactttatcctcatcttcctcctcatctgagataagaccttggagctcaaaagtctcagcgtcctggatgcgctgtgcttcggagggcgtgcgggcgtggccgttcacgtgcgtgaagcggctgctacctggcccgttaggcagggcgatggagccggaggggccctggtcagagatgtcggtacttatgcgggagtgggaatgggctgccgggtctgcggactcgggccaggcgtgcacggcgtagatatggagtagaatgtttacaactataggaaatcaaaagttaatactgtgtatatggttgagtaaacggaaaggggacatacatagaaagaggatgaatgcgatgctgtagaggatgagtacgtaagatacgtgggtgatgccggcattttcaaggagcatcatctgctcttctgtggcacccatgaagaggaatccagaggcgtacaatagctgtaggacaatcgttagaataatgcctgctttttatgccataggtaagtcaggaaacttacgaaaggcgttaagtattggaagctgttagggtccgacccatccgcgcttacactgctccggtccctcagcacaaaagaaatctcgatgattcgggtcaaaccagccgccatcaacgtgtatccaaagattttatgaatcaggtgcgatacgaaatttgat

SEQ ID NO: 5310 - DNA, 3543 bp, Emericella nidulans
gctagatcgaagggcggaatacccacaagtactgattccttctgatgtgaagcacggagtattgggcatacgaaggatatgcccgcgcatagctctctactatcgcacgttgctgcttattttcgaggtgcaggccccttggagaacaagactgagaaagtgatcttgacagatttgccacctatttatcttcaacatcatggtccgtggcctttcttcgtgtcggaatcgcaacgactaatacaagatacagggcattctatgactattgttggaatcgaagttcgcgagcaaggaaacgctaatatcctggtattcgatccgagtttcaaaacgccctctgtgatcaagcatgccatgggggctaatctaaagacttctgaacctgctcgcatactcaaggggtacaggaagggtgtaaactacttgcagaaatatcaaacttttgagctcctcgagtatgcaccccagtcttaactaaaaaatggcagctcgtctaacaatacaggttgttacctccccatttccccacggaaaattgattttgttgtcggcacggtcttatatttgtggacttcgatgaccgcttttttactccgcaggtcaaatccgtacctattgatactttaaaatgccccactctccgagttgatgccccaggaactaacaccccgccaaaattttctcttggcatatgagctgctggtcactagaatcagattctaacggcggtcattcaaatcctttctctcaatcactttattgataaccataatcgaaaatgcgaacgtcaccaaatatcataatcacaggtactcccggagttgggaagacagtgcactgcgagcagctagcccaagataccggcttgcgacatttatcgataaaccagattgcgaaagaccgagactgtattgaaacctatgacgaagaattgaaaacatgggtagtagatgaggacaaagtatgtctttcttcagctcgcagcatacgcagtcttactttctcctgcttactttcgccggcgacgttagcttctagatgcaattgaggatgaggtactccaaggcggctatctgatagactggcatgcttgtgatctgtttcctaaatcctggatcgaccttgttgtggtactgcgttgcccttctacgtccactctatatgaccgtctcagctcacggtacgtttacccaaatatctttcgatagatggcatttttcttcatggtaaaactgacttctgctgcaggggataccatgaaacgaaactacaagagaatctagatgcagagattttcggggtcctcatcgaggaagcccgcgagggttttgatgaagagattgtggttgaactaaatagtgaagaggacggcgacgtagaagccaattgcgctagaatagcttcctggatagagaactggaaaagcgaccagtcaaagaattcagattaggtactaggaagcctgtaacgttttcatgtcgcggctctgagttatgatagttcgtcaacaaccactgctgtagcttgacgagagctttgtatctgtgagatattttgttctgtttgtacattagctacttgaaaaaaaaatgtgaacagcaccgcgcagaaaaaggtaaagggcagcaccttttcctccttggtcatctctgcgtacgtctggccttcatactcgaatattgggtcccaacctgtgagaaaaagagagttagtaataagcccgtcagaatcagtcgtcggtgatcaggtagggatgtaccaaaatttgccggtcccctggggcttacaataactcccttgagagtcgaaatcagatccttgtttataatataacagttatagagttactgccatacctccgttcgtccctgaaatagaattggctccgatcccgggcctggggagaatgcaaaagtacacacggcttctgctcctctcgactcaaagccgtccagcattttgttcagcccctcatgacccaatgcctcaagaaagaatttgctatgtcggacggtgtcagttcgtagtaaattatatcaaattgcttgacgcgcaaagataatcgtacatgtacggcccaggcaggcctttcagagcatgaaaacctaaagcagtatcttcggtcaatactgggcctcccacctattgtacggttaatatgtcttctccaaagtaggctactttatgccactcactgcgttggcggcatgcctgcacttctcttttgctatttcttcaatagtgccttgtatctcaggtacgtcgactgtttggttctggacgtcaaccacgttgcctattatagctctgacttcagctaatttattcttgttcccggtaatgaaattgatagtcttcattattatccgttgacggtgaggagcagtgtccttggaagtaataattataatgctgtggtggacgacctagtcctatgcggaataatgcacaaatctgcagtaggtatatgtatagagtatgtgtgtgcggcaattgtggatgagtatgacggaacaaagatggcacggtggcattgttgacatggtccacggccccacaacgtctcaaagactacccctcagcatgtggtgatgcaggaaatacatgtaaccttaagtcacataaatttacaacaattgaagcacaaacagaagagatttatgggtcatatcaggcatctaatattttccaaaagtagattgacacggttattctccgtacctagtaatttgattgactcgcggagagccaatcttccacgccagcggtggtagtggacaaactgagagatattactccatcaccccattctcagtattctccggcttgtcctgttgcgccatcgcttgcgctgaaacaatttcagcgagtcgtttcaaccgtggtgtttgaagccctagacagtcagcagagcacgtctaacatgcagtgagggggctcacaagatggggtgtatgtctccaacgcagttataactcgaggctcggcgatttcatacggcccactatcctccatatcaaccggagtaagaaggagcacatcgctcttctcagtaacacgagaggctacagctttcatgatttcgccatttatgggttgttcgtagtcggccacaaggtattggtttagcagcttttggatttggtttggagagagcctaaacatttgttagaaccagagaatgtccaagaagcagaaacatacatccaacaaatgtcctgaatgatttcaatatcatttagggtggccttcttcagctggagaagcttggtcgcttgctactttggtcagtattttatcattcaggatccaaataaacttaccatcagatgctccaattgtaatgtcccttctggcatatcatggctcttgcaccattcctcgatgcgagttatgttgtagttgatctggaggcctcgtttccaggaaaggaaattccgcctcatgaggagatcattaaaagccgtgacaccgacgaggcgtaaaagctccgtaacagtctgagtgataattgagtcctctagatagaaagccttcatc

SEQ ID NO: 5311 - DNA, 1697 bp, Emericella nidulans
cttttcccggtcaaccgacatcacagggatagtgagcatcctctctcacaaagtgtgacggtgagccctacggctagccccgaagaacggcccacatcatatttggcccaggatggcgctcccggatatcactcccctgccaatcgaacacctcgccctgaccatcctgagcgtgcaacgtcgaacttatcgactgccgagtcatcaaaaaccgttagggcgtctgctatgaataagagctactctgtacctttgcgtcccgctacgcctgatctgtcagggtcttcgggaaccacaaacataagcggtgtcattggtggcgcgagccaccggttagcaagggggcttcagccaggagatcggcattttcccaccgacttttcgaccgccgaggaagaccatcattcggaacccagtctcgccttgagcatcgcgtccgcggttgggcagatgcagccgtcagcatggcaaccagatggagagccgttcacaatacgcgagagccgggcatcaactcccgagcaccggcgcaagatatctcacccactcttagctgttgagcccttccatctccccaaggagggttcatggcacatcaaaggtagccgctcagacccacttactgggctctcttcggaccgcgaacatcgttccggcgcggacaatgctagccgcaaggggttggatgccacagcggatactggtgccgcggaatatgtcaaagagggcttgacgacatcaccaacctctgcagctaccatgtcttcctcttctatggatgaagacaccagtggtatgtcgcaaagtacatcccatcctagcattccgtccgtcatgtcaggagcttcgtctttgtcagaaggcgggataaacaaggagaatgattgcgacaaagtggcccaggttccttcaatccttcgtaccggtgaaacggtcaaagcacggcggctcagtacgtcgcgcccgccagaggatgacgaatctcgatactactgcgatgacgaggaggagagcggcgacgattctgaagatgaaggtctagtctttggcaataccagagccgtcaacaaaaaaccagctatcatcatgggcaaagcgaagaaagggcacgatgcaggctaatcctgccccttcgtcatgctctgacaagggctaccagctccgattgtttttcttattcgccgccgtccacgtcaaccttcgcacccccttatcaactctgcttacccagctctgagattcacgtgtatatcatttaattgggaccttctggctgcatcttttatctttcttttgcgcgcatacagggcacctgcagagggttacattgcttgtacatatatttcgcattggtggcaggctatccttctcatttcgttcttctcggatgggcttccaaaagaccggcgtttgttttgctttcaatgtctatcttcatctggccccttttaaggtttatatatcggttcttatttgatgcatggggtccgggacatgtgcgagtttctgtatgtaatgttcgggggaggaggtctgagatttagtgcatttggctttcttatgagtggtgtgcaggatgaacggcaggggagacaattgaaatgaaccagatcatatattgggaacaatggagaacactcgattcttcacgccgttgacgccgtgtctattgtagcctaggtgctatgtatagtaga

SEQ ID NO: 5312 - DNA, 2769 bp, Emericella nidulans
acccaacaaaggcaataatggtatgccgtagctgttaacattcacaagaaagctcgacttcctcacacagatacgtagtacaaaatacagtgtccttggcaattgcgtcaagtgcgaaataagagctgtgtcaatttcatcggtagatccgctggtttaaagtgttgttatcagtgcttcagatctcctctaagcaagactgatgcggtctgcgggttatcaatacaggccgcagtctaccctgcaataccacttgagaacgcgtggtgcttagttctcgggttgtgggtatgcaaaactgggaatcggagcgtgttgacttccttggtctgcatcatgttcaggtgttgtccacgctttctgatcgggctggatgtgcgggcctccggtgcctcatcctatatgtcatggagccagtcatcgcgcccgcaatggatataccaattgatgagagtcaagaccaaatgtaggaaactagtaccgaatatatactgtgtagagtatattgattggaaaggggaagaactaccgggatgcgtccatggttccaggaagcggcgaaaccaagaatagatcatagcagaggcgcgatagtctgacagccgccacagggttattgtttcaggttccggccttgacaaatcactccccggccgtgctgaacaaggaggagtggctgcgatgtatatttcttttaaagactaaacattctgtgaggcacctcctgtgttgctcgagccaatcttcatggaactcagttgctgacgattgccagtcccatccaacaggagcgcccagattgagacagtcacatgatctacctagcccaaagctgaaacaagcccagtggaggtgatcgggcggacagacaggaatcagaaataagacgacgacggcctccttccttcctctatctaataatcactccgcctgtttaaaggcgtcttcagctgttgatcggctgtcttcttcccttcgctatcttctagctcttttgagctcttttgtctttcttcgcgcccctggatctccttgatcgaagggcctgttcattcaacgatagagccgatcgtcagcctagtcccacgcctatagtctaaacaaccgcagaacatacaattgaggataccgtgacctcattaccccataatcactctactttctttctcttttacatgtcccgttcccttagattcaagttcgctggcttgggtgcggggattgctggcttacatttgtgatcccaaccctctttgttctgcgacatggctaaatgatcgtgtccgcggctctagatccctttatcatgcattagacgccctcaaacctgccgggaacgccttcctctacgaatccggatcaatatctctcgctaggggcactctagaattctcgctgtgaagtcgtggccggaagagaccgtttgcgctatacgcccatctactaatcccctgcgatgctcacctccaaagcatacgcgggccccctggggctgccttcgtcgcaaacaccgaccgcatcttatcataccacgacgcagaagtcgtcaacattttcggaatcacaaacgggaacagtgtatacgagtccaaccaaatcggagttttctgaagctgacgacggtcttgatgctgtgaggtgcgccgttatcggaacacataagcggggttttcaagctgattcctctaggtcttgggatgagaatcaagtgatctcatggctccatagtatcaactgtcaacaatatgagccgttattcaggggtacgtgtatacctgtccttcggcggcgatggactatgtgtaactgtttccagcgaacaattttaacggcaacaaccttatcgaatgcgaccagaagattctgcaagagatgggcataaagaaaatcggtgatcgggtgcggattttcgttgctatcaagcagcttcgcaacaagtctgtggtcaacaaaaagcaaaagaacctggtatttcagtaatcatcccttcttagtgacagctactcacgtcttacagagacagttggcagctttggaagccgctcaccaacaagcttcacctgattccgcccgctcgtacagcgcacgtcaacaaacatccagtgccggtcatgcatccaggaccggtgattatagctatggcagacctacgtctcgtccagggtctccgctacgtcctcatcgttacgttgctaatagccctatggattcagggcgaaaggattatttatccgcgggctcaggcgccggacgcaatcccggaaccccggttgagcgaattggaacccattcgaggcagaatcctagccttgatgggatgacaatgggctctttgctaagcaatgctcccgtgatcagagtgatttacagcggtgggcaaacgaaagttctggatattaagcactgcaaaacgccggatgagatcatcctttgtgtgttgaagaaattacaacttcccgagcaccagtatcggaattattgtttctacgtccttgatggcttggaccctgacccatcaaattgtcggaggctctctgaccatgagctcatggagatatgcgaaggtttccacaggtcggaacgcggccggcttattcttcgtaaaatccatgctggggaaccggatgctgaggaggtgcaccgtgcggcccagctcgcactggacgagagccaacaggcgcatatgaatgctctcagcagctcgaatgcacggaaccaaatgaaaatacaacaactgactggtgaatcatggcctaatataaggcggga

SEQ ID NO: 5313 - DNA, 2335 bp, Emericella nidulans
  unsure (1)..(2335): unsure at all n locations
cgcgtctccgatatccccttcgctttctgctctgggttctgcttcagggggctctccaacacttcaatcgccctcgcttattccaactcccacctacgccccgctagactgctgtcctgaattcctacaaccgaaaccgaacacagacccctcacccacctccgcatccgtcacagaccaaatatccatccgcacccgccgccaacacatctctcgtcttcaaggccaatatacgccctcggacatagaatcgatccgacgtgccctccttgccgctgcagacgaggatatgcgccaatcacggtctcaatggaacttcaacccgaattccctcctctcagaattctcggaagcatgtcatccctcctcgttaccgcctacacaaggatcccgccgacgacgaacaatcagcttacagcgctcccgtgtgcgctctcctgttagtccggactcgacttccggccctccattttcaggttctggatctggagatgcacatcaaatgcaaacgcggaggaagagtatgtgcacaaccagcaatactactagtacaagctcccgcattgagaagaactaccaatcctcggcagaccgggaccgggagcgtggccgcggacggaagaagagcgaggctggcttgcgtcgaaagagcctcgtgagtgcagctttggcatcaatgattgagagtggggaatccatatagatatagtgcaacaataaaaacacgatttggtagctcccatttgctttgcttacctcccggacaagggacgtccggggcagctataccctacaccgtaggacctggacctcaggcagcgggggttgtacatcggaattgatactacgaaccaacgcctcacttgaaactgttgttgctataacgaagtgccatattcttaagcaaggtcttacaattccgacattacaaatccggatttcggctccgaattgtttctgcgccagcatataaccgccgtccacgcggttacctccttaccccttcttcaataaagttacttcacgtgccctcgttggcgaccctgccgaccggctctataccgtcagtatccgagcaacctgaaggaacgacaacctccgcctacaactgcgatacttgcgcaactgtctctacctttgacatgatttgcatatgcacgtacattggaactacctgggcgtgacagagccacccatacgtaaagacaattcatctgctttgtatcaccatctccaganaaggcatccgttcacctcgcaacatgttgtaaggtatttaggatctacctgcacatgtaaaggacttgacaaacctacggtaattaccaatatataccgaccacaagcttctccggaaaagacctaccatggaagtatcacagtcacatttgcaggcgcaagaataatttcggttcgagaaggataacgaaggggaagggaaggaccctgtactggtccgagtggactgagtttgtatctagatacatgaaatataggcgagtagaaaccttctagaaattcgagaattaaagaaacctactctaatggttagtgccgaacagccgacccactactccaacactatcccgaagtccgaggtaggcctgtggatcttaattaaccctaactgccttctcccctacccaggtaaagtcgcttggtgcttgatgcctaggcatagcgcgacctaatgtgtcaacaaagaggcattttacgatccttttttgaggactaattataaatatcgtccacaaaagctcgctatacacatgatagtcgggattctagcatgacaaagcacaagcacaaataccgtgctcgctatcctaacacagaactccagtacgttggagcatcgttcaacgatctcttttgttacataatagaaagaaatgaaagggaggatatgaagaggcagtaaatctaacgtttcgcttcttatgtggactagattaccacgtcttcatgcttctcctccctggactcatatcacatttattctcccacttagaatgtattgcgaattactacctggtgctttggagattctcttttatcccaagttctacaacttctctctcatggcttgtttcaacctctctggtttctcaaattgcctcgaaaaagtcccttccaataatagactttgcggctcccaattttgtctacatgtcttgctaaaccctcctcattacctaaatcacgactatcacgtatacatctcttgactcttcctaaattcttttctatcttccactctatagtctctccactgtatatcctattttccttctttcatctcattcttcttctgcgatcttatcatccccttcac

SEQ ID NO: 5314 - DNA, 1955 bp, Emericella nidulans
taccgctgcttggatgaggaaggcctctacctaggcgccagctctgccctcaatgttgttgctgctaaggaagttgccgagaagctgggcaagggcagcaccgtcgtgaccatccttgctgatggtgcgtaccggtatgcggacaggctcttctccaagtcatggcttgagagcaagggtctgcggaacgctatccctaagcatctagagaagtacattgttcttccttgatcagtgcaatttctcactgtaaataatatgctgtcttattatagatctctgcgcaatgctaaaggtcatttaccaataaattccacgcagacaacagctgtcttactccctgtaccggacggtcagattcttcgccctcccataaccgctatacccaacgcccctcaaattccactgcgagtgttcagcctgcatattaccttgcgcatcaattgcccgacttatcacctctttaccctccccagtttcaacctcaacttccaccctccacagaacccagcaccactttctcaccctgccatcagcaccagctgattccgactttccaatctcagcgtcaatccaagtcctacccccgtctcccgacacctgcaccttcaccaccggtccgcccgacccctgaggaaccgcataccccttcacctccagtttgcctacatccgacaggtaaactgtctcattatcctcaggtacggccactactgaattgatggatatctcagatatcgctggtgtctggtcccaaaatggttctgccgcgtcacggttcacagcttcctccggtagaaccttgtagtcgcgtcgctgatagaaatttgtcgattcctgatcttgaactgtgatcctgtctaaccatttcacccacctggcacctgcaatcccaggtaggacaacacggacgggaaagccgtgtctaggttcaaggggagcatcgttcatctggctgacgatcagccatcaagtcatagagtgtgtagaacggaataccagtggaagcatgggtgcaaccaacctccaacgcgagtatcacatcagcctcctcatccaaccctcgctccaactccacactccccccaaaccactcatcctcttcacactgcacctgaaaagacgagaaggcaacatgcagtccaggccgtcccttgcactgatcaacccccgctcgatgtaacacgtctctcagtctcggacccctccatttacaattcataatcgccgcatcgccccaatcaatgccgtcaacttctttcagcatggttcgcatcgtatgccgccgattaccggcgcactcaagcgcgcataggacctcatgttgagggaactcggtggcgagttggtggacgctcagacggaggggagttttaacgaggccgtctacttctattgtatgcgtatcggcggaaaggtggggtatagggccgtggtttcggtcgtaggatgttgagctgggggttatgaagcttgaaacgagctccctgacaggtggttcccggttcaatgggttttccttggtgtattctatgtgctattaacgataaggtctgcatgcagagcgagcagcagatagactcactgtcctgaccgtactgtcgtttattgtgctgttcataggttgatctatagatttgcaccggtagtatcgataaccacggctcgcttgacgtcatgcaacaaatcggctcgtatcgagaatcctcggttcatccagcatggtgattttgtattttcaatgcgtatacgtgtcagatattcacatgtcgtctcgtattatgtagcctctccctgggtgtctctagttatgcactaaacccagcaggtgaatcgcgcccttgaaaaatgttcggcgttcagaaacctgatcaaacatcaacaactgttactagccaggctcacatccctcgcacgacccttgcatgtaggacacagatcacaacccttagcag

SEQ ID NO: 5315 - DNA, 2017 bp, Emericella nidulans
tccttttttttattcgcaacgtttcgaccggtttccaggacatatttactgcaatcaagatgataaagcccaagcgacctcccaattatctgcataagcccgtatctcatgctcatgtttcttgcgaggactggagaatgtcagggccaacatttccttcggtgtaataagccactagcttagcccgcggctcgaaattctctgcctacacgatagacctggaccctatctacgactcctccgctgggtgtcggaattgggcatccagtcgtgaatcggtccagacggaacggccgtcggctcatacttgcgggggtggggttatggttgcggagaatgtctcagctgtcaaatgtttatgtctctactcactaacaggtagacatatgaactacgccacatgttcggctttatgagatttgattgcttaatcagttcccgtaaaatgttctcaaatttctcgtcccggtagcctaacgaagtatatgcgcgtgcaatgatgtgtcgttgctactatgtcctattttcttagtcgctacgtcagtagtgccgtgaatgcacaagctacagaatgacagctggaatgagtagaggattgtccattaattcgctgtccaatacaacaatatataacgaatattcaagatgacgcaaaatcgccaggatgctcatgaccgatgatgtagcagtagaaatgaacacattcttttgatgaagcaatacaagtgtaagaaagaaaggaagagaaaaagggataaatgatatatcttcatatatgttcagaatccgggtgatgacagggatcgtcaccttgagttgccgttcagcccggcacggacggcctctagaatcagatcccttgccttgtcgaggttctctttactacccttgatttcgatcgcctcgcccttggcctggtccttaggcacattgattcgacagcctgtttgtttgcggatagagttgatctggctgccgccctggccgacgacgaatcggtatgtcttggggtcaggaaggatgaggtagccggtcgcggattgttgagaggcagcggcgatggctttttctaaggcagcctttgctttgttgacattgtccgtagatccagccaggacccatgggatggtagcaggttggctagggtcgctagcaacattgttgtctaccaccttccatgagtgagcgtcaagtgcatcactgggttcatcggtgatcaaagggagcgaggaggctccgttaacggcgctgcgcgagtcttccacgtttggtctcggcgggatttgctggcccgcatggtccaccgttacctggtagtcattacgaaggcggcggaagaaggacccattgtcggcgatggcatggtgtagatgactcgggacatcaacattcacaccttgctgatccttgagcatggccagaatgtgctctttagcctgttcaacggcattgctaggccccttgagcttgacatcagagcgcccagaaccttgtctggggatatcgagggtgacgccgaactgcgactcgatgccccgtcgggtgtctcctccacggccgatgagaagacggtgctgcacgggaggtacttcaaggttgatggcaacttggtcttcgcgctcttgcacaaattgttcaatagcggcgataatcttgtccacaattgcaccatttccttccagtctgatggtggtatcgtcgctttcaggacgtgggaatctgacgagtcgagacgcgctcgagtccgtaggaccaccggcttccgcaacaagcttgcgaatattggcacctattactgtcagtgaggtccgacacaatatgtaacaaatttaaacttaccaccaccaccgatcagggatttgtggtgctttttgtcgacgttgatggtctttgtgaccgtagcatcgaactcgcttgaacgctgttgcaggatcttcttagctacctctacctgcttcttggttcccttgatcttgatttccacgcgtccagaggtatccgcagtcagacatctcgt

SEQ ID NO: 5316 - DNA, 2188 bp, Emericella nidulans
acttcttatccctagcgttcttattttagccctgtaactaggaacaaaaagattgacatgtacagaaacttcaagccgtcagtggacctccttataagtatttaaatattctgaacagttgaagagctgcacaatgactgaatgagtgatgaaacatacataaaaggtgtgttttagatgtgctgttttctggcacatcacaacatcatttcctaaaatggtattgcttcactcactcctcaaaatctgctaaacctacttgtatgaaatatgctactttctacttcttctcacactgtgggctgaaagggttagttccctttgtctcattgcttccgtttaattcttatgttgtcctgtcttacaacctactaagaccctaaacagccccgttgaactaaatactaccaaacatttctaaggagtagacatgcccaagaaaacataaagaaacgcacagattatcaggcttccatcctatttagatcacaatatgccacatgcataaatgtgggtttgtctatttgttgtcgatccccggccagtaactccattcgatatcgtttgatttaggcttcgaggcacaatcaacagcaacagaacccttaatcttgaaccattgatattgtgcgtcaataattgcacagcgaatcctgctacggactccaagctatctcgtacactcctagataatgcagagggatgcatcagactgacttaaagatactagacttccgctattgtgacaacgtgataacggttgataaggatcccatcgagctactcgaatttcaattcgaaataaagccatcgacacagtccaagtgaaaggcaatccaccttgagagtagatatgatattttggctcgctggttttcacctctcgagtcgtcagacggaagccacgcattgttagagaaaagggcgcttagctcgccccaggaaagtctctacttcaagctagaagcctaatagaaggtgccgctggtataacctctgcacagtagtgtttgcctatcatgaaatattttgcgagttcgacagatacgagttcggttgcagtcgtccaaacggaagatattgttataactgaaacgcgacgcacgcagaccctggaagcaatagactctcataaagatggcactgaaagtactctctatactctttgtttttttctgggagcctagccgtcggctcgaactgatgggtttacatgtcggagccagagaagtgttcatgtttccagttgcaggtaaacctagcatacttgatgtttgaagcatatagtcatggacacagatgacatataactgttcaagtctcaagatctagtcatatcaggttactaaaagaagggcttgcatttgttgccattgtgcaagggcatacatacggtttgcatctcttaagtatagtgctgataaaagaaaagcactataatcacatttgttcgactataaataaagacctaactggcattcactgtacttatagcagagcacacaggcatactttggaatggtgacgccgagcaaggactgcaaacacctgttctcccaggaacgcttcacaacacactggccatcttctccttctatcctccccttacacttttcctcctactcatccttcagaatatcagaccgccagcttcaaaccgcctctaaggttgcactacattgttaagctaaaattttttcgagcaaggatgtctgaagcaggatgctgttccgaagaaggccacgtcgctgtcactcaatcaaccgttaatggcggtggcagcgcagacactgctagtagccttcacgggcctgcaaaaggtaatcttttgtcttcattttatagccaggactgtagagtacaacgaggacgagaaccggggtgctaacacgctcaatataaagctgcaaatcagcctagtcaacaggcacacacaaccacactttccagctgctcaagtgagcccaaccttatgtctatccattattgcggtcaagagcaaccaagtgagtctctctatcatcccacctgcatagcatgttagttaatctcaggaaagacatgctacaggacagtaacacgtcgctggataccaaagcgtacggtaaccctgacacagaaccaacatcaagaggcgatgaatattgcacgcactcttccattcctcgaggagctagtttaaaccaac

SEQ ID NO: 5317 - DNA, 2249 bp, Emericella nidulans
tcttgtagttcagtttgtaaatcaaagccttggataagagacaagtaacaacacaagcctcaacgggagaccgtggaaaaatttgtcgagagattccggctcgcgatcggcgccaacttttccaaggtcggagtgttttggaaaatttcttaagattctccaagaggcttttgaccttcactgctctacccttctgaaacgtcgaagcgtttgcaaggctatatgagtctttgactgggtattagtatttgctcgatctgctattgatgctactgacgtggtttacgagaccgcaattgtctagcacttccatcggacgataaggcctcggtctccacatcggctttcttacccttcttccccttaattacagcctgcttcttctcgaccttgaacgttctcgcacccgctgacgatgcccttgcctttgcccttgcattgcaagtgtttcgcctcgccagcatgtcaaccacaagtttaatcctctcccgcctcttggacaccgcgcctgtctgcaaccgatgcaacacctgataccattccgaccgattcaacccctcaaacacccttctggcttcttcatgcttctctaatgcctcctccaaatccgcgggaaccccaatgttagccggcccatcatacgccctctcccaccgcccatctttcttcgccgcctccacggccgccaatcccgcatcgcgcattcgtccctcgtcgataagccgctgcacagttgctacattctttgcggaccagagactttttgggcgtcggggtgtgtagcgtactagccagtactgatcgttaagagagcttgcgcgcccgtcgatccagccgtagcagagtgcgatttcaacggcttgggaggcggtgatggatgggatgccggagttctttttggcgaatttgatatacattcccgggagcgagttgtggttttggcttaggaaggtctcgaacgaggagggagtcgggaaagtgtggatggggaggtcggttgggaggggtttggtcgtgtttgttttcgttgctgctggagctggcttcggggtcgtcgctttgggggacatcgtcgagttagatgtggatgtggtttggctctgggagcgtaggtgagaatgggttccgacggaagattgcggctggacgctagtcttgatgatgagatttagttgtctagtgcgcagtgtaggccttattttcaagtgctgtaacatgggaaacgtctagacagctgggagggacaggcctttgaaagagccgggaggtgaatctcgttgcttggtctaggcctctgcgcgactcgatccgcgagtaacgcgaggtgccaagggcggcacgtgggtttcaagatgaggctgagtatcactcgcactggtagatttcattgatcccattatcataaggtaagatacattatttcgtctcgctattcttgttttccggtgccggtgcatttgcactggtagtgccgctgcctccacctccattcgccttggaaccgcctttccctcggccgcgtcgaccacgacctgacgaggagttaccaccaccgctgcctccacctccagttccttcaccagatttcccattgcggcctgagttggaattggcctctccactcgcgcttggattgggtggtttaggttcgccacggccttttccgcgccctttctctgcgcctggattcgcctttctctcgagaaccacgacttgactctgggcgacggtgacagggctagcagagatggctttttgcagcccttcaggctctgcaaagtcgacgtacccaaagcccttcttcttgtcgatttccaccttgacgactttgccaaatggtaagaaggcggcttcgaggagcggctccgttacgccttgagaagggttggcatgcttgagaaatgcttgggtggcggtagatgtgggtgtcgtaggagtagcggccgaggactgcttgcctcttcctgatctgggccctcgtggcgtagacgtagcttgggcaggtgtgctagtgtccgaacgctgagactgtggtgtttcgctaggctgaggggtgttgctccgctttgtcttcgagctggtgtcctgagccggactgccctttggtgacctggtcgagatttccttcttgctggtctctgaagcggcagccgaatctgttttaggctcattctccccggatgtccctcgtccacctcttcgacggtaaaaaaatggtgctagtcccagatcacgttgcaatatcttcc

SEQ ID NO: 5318 - DNA, 4347 bp, Emericella nidulans
ccgtgctcgtctcggtgatcgtgatcgtgatcccggcaaggcatgccttccgtaatgactgaaccaccgctgacgggctccagaagcatactgatgctgctgttcttcccttcgcccagccgcctcgatctctctttccacagaccgccgcggccaatcattcgatcgtcgcctcttgactgaatgcgaagacggagagcaatcggtcgtcacatccacacgggacggctacgcccttgtgctcattaggcaaacattctggctcgtctgcatcgtcaaattggcctgatacttcagagaaggagtcgggctcaatgctgctgtgactagcgctccattcttgttgccgggagtaagatgaatagctggtgctgcgggcattgggcgaacggctgcgtgactggagcgagcgctggagctggtggtctgcatcactgtagttgatgtcgacgcttcggctcgcagctcgagaggctgaagcagaagacatctgattgcttgagtgtcagtcgattcgtttcgaagttgcgcaaggggtgggacagggtcggtttccaagtagtgaggcaatgggcggctgacctccgcagtccgcatcgatcggatgcttctttggctctttttcttctcttcttggctcttttgattctcttcctattcaatgagatgcatccggaaaaattatacgatggagacagagagggctgtctccgcacgggagacgggtgtgggggaggggttttgttgtgctgttgtttgttgttttggtgttgttgtcgcgccaagcaacaaagctcaaagaacagggtacacagtagtcagaaacaaagcgcataggtaaagccaaggacaatgtttctgttattatctgctcaacaacttaaagagtctacattaagtggtgttattcattccatttggccaggttgttgttatcgttggaatgcaggtcggcgaccgctcccaggcacaggcattctacggcatatgcctaagtagatccttatcagaatcggttggaggattatgggtctaccgagtcattagggaaggaagctgaacctgtgaatgacctgttcttattgcacacatctatccagcccagtgtaagaacggaccttattcaaggcagggcatatatctgaattcataggagcgttctaagagacacgtgcgaatgcccagagcccggttcgctatgcttatcgactcgattgaacgatatcaagctcgggatatatgaggaatgagacaggacaaatgaaagaaaagagggtcgaacgtataggcaggatcatatacaactttcgaagagtaagagcaaggtataacgttggacctttaatgtgggagtataaatcaaaggagccttatttcaggccgcaagaaactgattgtcaaaagcatgatcttttcgccagtacgccgttccctataccagaacccgccaagaactatgacaaataaacgccggcagaattcttttaacgcatggtggcaggctttgagaccatccgcccgttggcccgcttataagccatctggtcggggccatcgagaagagaagatctttcataggacggcctgcgctgcattcctccaggataggattcactatcaggctcgattccgttgtacaacggccggtcatcatgaccgaacgactcttcgtacgtccgcttcgacaacatcgagttggtctcccaaagtcggggaccaggttcattcgcagggctagacccaatagcgctcgacggttgggacgtggtcgatgggagctctgagaggctctggatcggcggaagagacgtgatcatattagatggtgttttcgacctagaatttacagatggttcaagtgaatggcgtagaggcggtacggatgttgtttgagatggctgcccgtaactcgggcgctctgctgaaagtcgtgtctgcgaacccggatagcccattgagggctcatactcgcttatggattggtttcggctgtgagatatcgaggaacgaggagagtacgggtgtgtcggggtagttgtctgttgcgggatatgagaaagctgaggagcggggtactgagtctgcgtggcaccgaatgacaagtgcgactgatacgacggtgtgtggagtggaggaggcgcagcgagagggacggacggcggagcgggagcgtgagcagaagcaggtgagggggtggaaggcggcaatgcaaccggaccaggcatcgggatcggagcaggaatcggcgtagaagatggagcgggagtagaggccattgggcgctgataaggctgggcaatcggttgtccatattccactgccgacggacggcgcgatggataggagtacgggtccatgtttgtgctgatgctcgttgagcgagggcgttcaggagcgttggcgtaggcgtctgatcccgcatattgatcagggcgccggttgttataacccctttcattatcatagtcgtagtcctctgttctcttgtctccgcgccgtctcatccgcacatcgcgccggatacggacacggcagccctgctccgcaatcatacggctgatgggggtgctcgtggtcagcccagggaacttcttggcgctgtagacgataaaggggttcgagatgacctccagccggaactccaagaattcttgcggtgacgacagtttcccagggacgggcgacggcatgggctgtgtcccttcggttgcgtctttggggtcctttatttgctcgaacaggtggaagctaaaccgataagagccctcgttccgcaccgaaagatcggggaagatgaagtatccggctcgatttggtttatccaggtatgccacgccagctaccgggacgcctgtcaggaccggcgagccttggtttgtcatgagttttccagttgcgatcggacgctcgggttctagagtggcgaagaggaagaagttggcattgtagacgaacgtgatgtcggtcttattgctgtcgtcatggggatccgattcgaagatgttcaattcaatgactggcggaggatcgacagggcggcggtcggtgtgcgctgttccaactcacattagccttgtctccacgtctgtccagtgctgccaccatacatttcgaaccttgaccacaagctctcgcgcgcttgggctgctgcataatattcaatttataggtaatcttctttccctcgcgagtgatccggctgacggagttcgagttccccgactcgccgagcggaggtggtggtgctgcaagtgtagccatcttgatgggataacacaaaatgctctagaagacttgttgcattccttgttagaaaagtctggctaaggtcgcaattgttggtcctaacttacatcgactagagtatatgactctgttcgacaactcgatgcgggacaacgcacaacaaagcgactacagccgaccgcgagtacgactgagaccttcaaggcgatacttgtcgtccaacgatgattaacgaaaggcaattcaaggaaaggacacggtgtggagaaagataaaagaggacaagatgggctggatgggctggacgggacaaacagcccacgacttgtccctttagggagagaaggaaggggaaggatagtttggacggacagcgaccgcgcggaggaagcgagaggcagcgagatggagagacgggagggggggaagcaggatagaaaagagggtcagaaaatggcaaagtcaggtcagccgtctaggtaaggaagacaaccacctactccgagtacgcagcctatcgtaacaacaccggtgggcgccagataaatttaactaatggatattaagtactttggccggggatggatcgaccagaccgaagacgaggatcaccaagcttcattatggcaactgacatcgtgtaaaccggattattacgagtctacaactctcagggaattccttaaaagcctactgtctttcagttgccaacttgcttctctaattcccgccattttctgctgtctttttgaggggagagacacctgaagaataacaaggacgatagtggatagtggtgtgctcccaaccggcgcagtgggtgcagaaagggagaaagaagtggggacaagcgcctgttgattggatgcaaggtatgcggtagagttcgatgggccgctgtcgtgggcccgtggcttcgtcgctgggaatctgggtctcagacctggagcaattaaattcagggatgattggtataaccccgattgagcaagaatttaattaactgacccatccacggctcggctagtgtcatggcgaggaaacgtgtttccgcccatgacattgacacggctggcatgacgccagagtgagcaccgaaac

SEQ ID NO: 5319 - DNA, 1399 bp, Emericella nidulans
agatcgggtcctctgttacaagcgcaggatcgaagccagccgcctgggctgcggctgcaacagtggcagcgaattcgatgtcctcgttcacgtcctccacgtgggcttcagagggagcaatgtacgagtagccgatatcatcgtcatggacagaagccttaggaaggaaaccgtgttgccgttcgtgcagatcgacggagctgcgctcggaagacgtagacgggacttcatattcatgtgtgtggtgctcgccccaggagacacgggaagcatttggtcgttccaactccttttcagcttcagcagactccgaaggtgtaataacaggcgaaggtgcacctctaacggaaccactggagctatggggcggcgttggctcaatgactctcaaaacaggtacgggccatggaagtctgtcgaagtccttgaaatcggtcggcggctcgtaatcggcatttggatttgggggtggcggctcggctctttcgctggctgggacaatctcaacgatcgttggcattgtaggtgtttcttgtcgagagtgagaatcagggctgtggcggagctcttcggggtagaagaacgtggcatagtcatcatataccgacttcctgcgactgacattacggaaggcagaggttttgacatgatcattcgagggactggttgagctcgcccgttcctccgttatttctcgtggttctgcatgctcaggaagttcgtctgggcgcttaagaggttcttccgcaagtgaagacaaaagctgaagagccgcttgcttggcgccgttctgctcgtcgttgttctcgacgctcgcgccgtctttcgctcctatctgaccgatcattctttgatgatccctcagaaaggatggttgaagcaacggcagcttcgatcgcaccggcgacaaatggaccagccatgtgtgggacatagtctcgacctcgctcttgatgacgctcgcgctcgcgctgacgttcgcgctcatatagatactcacgctcccgttctagctctcgctctcgctcacgttcacgcctccagtcaggctgactgtctctgggcggatcgtatgccgcaggcgcatactggaaatcgccttctcgatcaatcagttcaatacggtccccgctccttaaatcacacttcaaccgttcaagatcttatgcacggcgctctttatcctcctgctcgcgagtcaaatcaaactggacaatggaggtctgatctttagcggtgaagcggtgcttgatgcccagaccgggctcagaagcagattggatgggttcagtgcggatcactggggtagacccgcttagtttatgacttttcaccaccggaacatcactggtgccatcaccatagccatagattagtatagtgtattatcggccgcgaa

SEQ ID NO: 5320 - DNA, 1515 bp, Emericella nidulans
  unsure (1)..(1515): unsure at all n locations
aggttataaagacatgagccttggccggtaatccgggtgactgtcacgggactgcgtcagtggtccttctcgccaacctagatagcttcctaactaggactagtcttccgggtgtcggaagaacagaaacaggagttgaattcgtccacttcccatcatctactgttgaccacctccgccggcgattgaaccccgtggtgataccatcctcgccgtcttgtcgttctatcaccggagatacctttctcttagtcacacggtccattatcgctatgcttacccgcgctgttcgtccggctgtccgggctggtgccgctgcggtcacccggtaagttctcttccggcagtcaacctccccgcagaacccacgatcgtttgcgatgaagcgataggaatcgcttgatagcagatactccgaggtctggcgacggttactgatgttgttgaagcactgcgcctcccaatgccgccaacttcgcgaccctgcgtgaaatcgaaggccgtctcaagtccatcaagaacatcaagaagatcaccaataccatgaaggtcattgcctctacccgtttgacccgcgcccagaaggccatggacgactcccgtgcctacggtcagacctccaacaccctcttcgaacaggctgagaccaaggcccttgaggacaagaagaccctgctcgtggttgctagctccgacaagggtctctgcggtggtattcactccggtcttagcaaggccgctcgccgcgctctcgaggccaaccccaactctgaccttgtggttctcggcgagaaggccaaggcccaactttctcgtaccaaccccaacgccatcgtcctcagctttgccaacgtctgcaaggatatccccaccttcgctgacgcccaggctgttgccgaccaaattgctctgctccctaccgactatgccagcgttaaggtcatctacaacaagttcgtcaacgctcagagctacgagcccgatactgtcgaggcttactctgaggaggccatcactcagtcccgttagttccggtttccattccagaagctcttcagtactgattgttgtagccaacttctctgcgtacgaggctgatgaggaaacactctccaacctccgcgagtacgctcttgctaacagcctgttctgggctatggctgaaggccacgcctgtgaaatctcggtaagtttgtgtttacgatacgtttagccaataatactaattcaataacaggctcgtcgcaatgctatggaggcaagtattctcgaagaacgtgtggtggagatataattaaactaacccttttccagaacgcctccaagaacgctggtgaaatgattgacaagtgagtatcagcaaaattctgcggccgtaacagtgttctaattccattgcaggttccagattctgtacaaccgtcagcgtcaagccgccattaccggtgaattggtcgagattattcaccgtgccgccgncagcgctgaatagatgcttgtatgatatctcttggg

SEQ ID NO: 5321 - DNA, 4851 bp, Emericella nidulans
ggggagctggagtgaggagagtgagaggaggaaattggaaagggataggaaacagtgaggaaagaaagggatacggagaagaaaataagtgaggagaatgaaggtgggaagtaggggaagaagagaaataaggaagaagtatgaaaggtgtaagggagatgtaggtgtgaggagaatatggggggaatatggtaataaaagaaaagaggaggagaagataggaggataggaggaaggagtggatggtagggggaaagccggtggggaagtgtgtaagggagggggatatctggaggaggagagaggaggtaaggagtaggaggtgggtgagaggaaaaagaagtaaagtgggtggatgaaaaagtgagaaagggggttgggtaagtgagggcgacaacgagcaatgaggattctccttgatcagtggcagtcttggaacaccttcagtcgatccaaccattcagcatactccggaatctactgggtctccgttggcacttaagtccgtcgaaggcgaccttgagggacccgtggagacagactacgagataactttcctcttgagacacttttccgaggttctcgggccctggtaagccgctttaacaaccaattctattgtagtttaacgctgacaagctcttaggatggacctctatgacttagggacgtatttctcctctcaagtgcccataagggctctccgtaatcccttgctgaagtatgctgcttgtgcacaagctgcgaagcagcttgggcacgtcaacgtgtcacgatctgtcggggtccgcctaagtcgaactttttcgggactgcagaaagattccaagaatatcgattggtgctggaaaggagccaagtattatgaaaaagccattcagcttttgatgaaggaactacaacccaatggtggcaaccgtgatatgatggctcagggcacaaataggatgagtgacaacactgatggtcagggtgcaaggagttacaccgagtatagactttcacacggtgatcgctcggatgaaattctcgctgctgctgccattctttccgtatatgaactgctggatgctacgggtccggcttggaaccggcatttaagtggtgtcaagtcgctgttggatttggctgaggttggaatgcgaccacttcagcggctaccacctggggatctctccctgcagctcaaaagaccaagtttatctaaagccagaaaggcgactttctggaactttgcgcggcaagactacttatctgcctgtaagtgcattgcttctatagcacctattcgtaccgcttgctgacgttgctagttataaacgggactcgtacaagattacatactgaggatctggcgctgtggacggacgcaggcctgcaagtcgacagtctgggctttgtgcgcgccagtaataagagcacgggtgatcactccggtgaggataccatgaaggaagactccttctcgaatgcgttagtttggatcatctccaagatcataaacttcataagtccgagcagcaatgcacatattgggccttcaggtgctgtcaactctagccccataggccttccgcagcaagtctccctggagcggtggtaccgcctcgaagccgagcttgatatgtggtacaaaggtcttccagaaacgtttcacccatgtgctcgtatcggttttcaagaaacggccaataaaagcgataatcttgacgatgcaccatcgttgtccgagatatggtatagcataccaatgtgttcatctgccatgcaacattaccacatgggtcgcatactgctccatattcacaagccgccccaacccagtggtgcagcaaaccccattaccagccgatacaactcgaccgatatccagttccatagccgtgaaattgttggcattgctatggcctgcccggcgggctccgtgagaatcaactctctccagccgctgtttgtcagcggtcagtgtctgaccgaccccagtgagcgacggatggttttgcggctgttacaagatattgaaactgacctcggttgggcaaccgagtaccgtgtgcagcaattgcgcagagaatggggctgggatcagagtgctgatattgcgggcgtctcataatggccgcctactttttttgacttcttacgtcaagccaatgcataggccagcttggcactggtcctgctatagtcttgtaccagacttcacatgtcagcatcctaggcttgactttgcgtcttgccagccgtcgaccatgaaccacacagcgtcaagttaaagctccataccaccagggaacgtaacctgctcttcgcttcaatgtcgtgaaccctcacctgcattccgctacaacatcttgagcaggctgctaaagtgtccccacgcactctgcgtctttaatggtcttccaacgaccatcatcaacttcttttctcaactccgatgccattaatcgttactctccttacacctatatcattgggataatttcattgaccttttggcggattttgcttgcattagcgtggcgcattggtttatcgatatttttatataagcattttgggataccatttaggagcgcttttggttcaattatgagagttttagataatagtaatgcaattaaataatagccaatgattttaagttcttgattagaactcactctgagaatggcagacacctgagggtagggtgaggtgtcagctgtcccattaagtctccggcctaaggagtacaggtgtagctgcgtcgggccctttaacgacgcagaaacccaacgtcttctgctcccctcgcagttcaaagttgcaaatatgatagttgatactgacgtccttatcatcggcgctgggttgtctggggtaggctttgcaatccaactccagaagaaatacccgcgcataacattcgaaatctatgaaaaggccgaagggttcggcgggacttggtgggccaatacatatcctggatgcgcttgtgatgtaggcaaatactcttccatcttcatttcttacctgatacacatacttctaggtaccatcccatctctattcctattccttcgccctaaatcccgactggagcgagcagtttgcgtctcaagcagaaatagccgcatactgccgcgccgtcgcagagatgcacgatatcccccgacacgtaacactccgctcgacggttcagtcagcaacattcgacgaatacttaggaacgtgggccgtgaagatccttgatcagcagacaggacggatatatgagcggcattcgagggtgcttattacggctgttgggatgctttcagaacccaaggactgtgacatccctggtgcagaggagtacaatggcaggctcttccatagtgcttgctgggaccatgagtttgagtgggctggaaaggaggtggttgttgttggtgtgttgcctgccctctatacctcacatccctcaagaattaaagctttcaaggaaactgacctctgtatacctgaaaaggcaacggctgcagcgcaacacaatttgtacccatcttgactaacaccccagggagcgccaaacaagtcacccagttcatccggcagcctcactggctcgagccacgcccaaaccctgaatatccatctgccatcaaatggatcttccgccacgtgcccctcgtgatgcgctgtttccgatatgcgatatttctctacctcgagagctacttcagcacattcaagcgcgtctctggcaaaaggacacgggaggcaaggatgaagtctcaggcggcttacctgaaaaaaatggcacctaagaagtatcacgaaatcctgacgccaaggatagaactggggtgtaagaggagagttatggatacagattaccttgcttgtttgcacagagagaacatggagctcatccatgatgatccgattgagaggatcactgttgacggcgtgagaacaaagtcagggcggaagatctatgctgatgcaatcatcctcgcaacgggatttaagactgcgcagccactttttcctcttggagataacatccgtggtgaagggggcgttactctgagtgagcacgtttgtcacctcccagtgctaccagggctatcaaagtgcaattttgacacattaacgcagtgggaaagtaccgcctcccatgccccgcaagcatactacggtacatgcgtctcgcggttcccgaacatgtttatccttgtcggccctaatacggcgacgggacatacctctgtactctttacagtggaatgccagattgatttcacgctgaaggttcttgatcctattctcaattctctctatcccgagtcatcatcgtcatcctcctctgtcttgcaggagatgatctgtttcctccggaaacctttctcctctggacctcgggcgggaaagaagctcgcactaccaccagatatagtctccgtaacgtcccaagcagaggaaaaagaaagccaatggatcgacgaggcaagtaagcaatatgtctggacgagtggatgtgcaagctggtacttgcacccgtcgggaaggaatacgacgctttatcctgggagccaggtggcgttttggcttaagagttgggctggccctttggcgggtgattttctgtatagacggagctcggccgcggttttggatgaggataggcgagctgagggtgattgattaatcttaagattcttgttctttttggcactcccggcttatcgctaaggtgaagtgaagctggcggcgacgagcgtctttgccgctgcataactatgctgggttctatcggggcatgacagctctgaggaaatatggagggcttggagcaagcccgagccgaatttcaacatgaaa

SEQ ID NO: 5322 - DNA, 10036 bp, Emericella nidulans
actaaccctacatctacggtgggacctaccactgtcattgcaacagggacggagaccacagatactcctacgacaacacgccccttgtcaacagaaacagccaacacgtcaacgtcactaacaacatcacaaagccagacgtccagctctgagagcacagagcatcctaagacggaaacagacaagcccacagcgacgacaacggattcatcacctagcgcaacttctagagaagcatccaatgagccaggccaaggaagcaatctcaactctggtgccgtcattggcgtctccgttgcttctgggatcgctggttttttcatcatcggggtcataattttcttctgttgcaggaagattaggcgcaaggcccaggatcgtgaattctttgagattggcgggcacatgactgagcctccggatttcagcttccccccgaaacggcctccgatggggcctcgaccatctcctaagaagttgtttggtacagattctgagagtgtcaggctcgtcccgccggcggaggctgagtatcatgacccagctcagcatccagcggtcgttgtcacccagcccgaagaagactacgagtacggccgtatgtcaacgaagaacacagaccgggcgggttttcagtctacctccaatctcgattttgatgcggagtctacagtctcgtctaggacggtatccgatttgctcccagacaagccgacactctacccacggccattacggtggagtcagcagaagaaggtcataccttccagcggggcaactgtatttgaagaaaaccacgcaagaccagcaagaccaagaaggctacccagtcctccactccagcaatctggtcttgcgtcaggaattgcaaggggacaaaatagacatctgatggcagggttacctgctaacccacgtgcaatgatgtatggctttgaaggcccgggcttaacaccaccctggaaagaattcaagcatgagaagagatccgtatacccaagtgccaaagagcaggcgtctcggcatgccgctgtacatgggacgcccccgtacccgcccggtcataatcgagtagattatgacgatgaccttgataactactggaaaaactccaacgctggtttcgtcggagctaaagtgatccagcctcagcatcaaccccaatctttagatcctagtacagctcgcggtgccggagcgaatcggaattcagtcaacgattatccagggtatcaatttgaatttggctttggcgatagcagttccagctcagaatcccgtcgagcatcccgcaactctgggggcttccgtccacttacccctgtgagggagataaggacaccactgcgtgaaatgcagaaacccacaggagagagctcgaatcatggaaaatcatcgaccacgagatatttatcaaccacaaaatcatccggcccaggcccgcgccccctccctggcccacctgttccaccgcatcctccgcaagaggttgtttctcgacctcggattgtccggcaagacgacatcaagcgcgtccaaatacgtcgcggcaaaccgttgccgtcacccaaagatagcgaggttacggttccatactccccagatgacttttggtttgagcctaaggacgagccctcttccgcctctgcatacattctgcccgcgcctaggagttcacccaactacaagaagtatacctcaaaggggcagcttggaatgcctaagaagaagccgctacctccagagcggaacctcacaccgtcgcggagaggcgaagatttgattcttcaggtggaatgacggctaagtgccctacggtaatcaactttacctttttcatgtacatctattaagacttgcatgtctggctccttggcgctgttaactttcttgctcttctttataacaagcgtttatgatcgttagccctggactggcgttggttattcttttagaatatcattcaaaataatgtttcctacatatcagtaacctcgtgcagctgctacatagcctacattctctgcttagctagatttcaagtcagcataagtctggcaagcaaaacatggttaagctcattcaggttgcctcaaaaagtaaccatagaatcggtgcacggcttcgctcctccataataatagcagtcgcagtctgagtatataagaattgaaaaatcacttcatatcagccagcccaagaggggaagaaccagaaacatcagccgcattatattgaaccaacttaagacaccttatccacaccatttatctcacaccaatgttcgttccttgcgccatccatccaatccttgaactctctcaggcccggcccaacccgagctttccagctgtggtataacccggcgggtttaaccttgggaacgtgcgggcatcttttgggacttccagtcttcgagtcttcccatcacaaattatcatacaatatatgggcaagtggtggacctggagcccgcattcacatgcatgctcccttcgtactcgacattctgactcttgagtgcaaagtcaaaaagcaacaacttacatactcggcttttcttaccttattcatgtttcaaacgtactgaaagctacctagtccgactagtacgagttgtgcttacagagatggtagcactactagcgaaatcctctgacctagcactaggagaactgcagctagagcctggtgcatgcatggagatacgtatgcggcatctcagagactagagtgtgaagtcggttttcttggcatggtccaatcaaccgggggatggaccgtagatcctatattaattcgcgtggtggctgatgattaaacattcagcctctttttacttggttgttaacgtcaaaggggttagatcttaacagtggtgatatagcctagctcagccgggtggctgctatagcatctattggtatatacagtacattggctcgtaatccaaggtattacacgaggttgttcagtaaacccgtacggcaagtagagccaagcaatgccattggctccccgtaatacgatgggcccaccatcatgatgtcatgggtaaaggacggtgtcagcgagctgcgacgaggtcgaaacgacagatgcgaatcgtgcccctggcctgagggattttggcaatttaaggttcccgaagtttttctgattcgaccgaaattatacttgtaaactgatgtaagacaccacgaatttaggcgcatagaaaggcgggcgtttgcagctagaccggcgtttcgagacgttttacgtgacgatactccgtactgatcttatctttccctccgctttcttcatacagcacccagcttcacctccagtgtactcctactcatgatataacgccaaccatcttccgctgcagccaccacccatcagacactagttttcctgggaggtatttgacatagcatccagatgacgttgaggattccttgctatccgattcacgccggctcaatggagccctcagagatcagtccaccctcataggccaaaatggccgcatagtccactcacaccccccggcccgtgagcgctccatggttttatctgtcatgacatacccgctgtatcccactatactccgtgcaccgtttgccgacggacgcaaaaatagccgaagtcccccctgggtggaataaaaccccccccccattgagatcgagtaaagttgatggagcccaccaggctgcattgttccatacaatgtcgatgacgagcccgacaagaccagggaagggctgcatctctctgggttacgcttctccaccatctcaatcctactatatataaaccctgcgtccggcatcaggttcctcgtctttctcaccatcgttctccactgtcttcgatctttatccgtccaacattcgtcttgctatatcgagggtcttatatacttagagcttgagccggaagctaactactcctataccatcacttcttctctatattattgagacgcattgcccactactggagacggactcaacctggctacttgctcgcgtccccgcacaacccagcatgtctgtatacagtcagcaaagctataccgacgccatttcgaatggcaaccggtatcgccgcttgtctaacaatgccgctgaacgggcagaccttttcaccggcccaaatgtgcttgtgccgcccaagcacctaatggcctcgagccagccggcggacttggccgtggagatggaaatggccaaacagcgtatggagagtgacacctcttcaacggcttcggcggaaagtcctttggctgcatccccagctacctcgccgctcatccctgcttctaccaccacgacagatgagttcgccctggcttttgacattgacggtgtcctcatccgaggaggaaagcccattcctgctgctattgaggctatgaagtatatcaacggggataacccgtacggcgtcaaagtgtaagtttcctccatccattccatgaatggtctactgatacctttcagcccgtacatttttgttacgaatggcggtgggaaaactgaagaagaacgctgcttggatctcagccgtcagctcgagcttgaggtcgccccggggcagttcatttgcggacataccccaatgaaagagatggcgcagaaatacgacaccgtcctcgttgtcggtggtgaaggcgagaaatgtcgaattgtggctgaaggctatggcttcaggaacgtcatcactcctggagatttcattaagacgcatcatgacaccacgccgttccgcaagttgaccgaagaagaatacaacaactccagagtgcttgaccttgagacacttcgaattgacgcaatttttgtcttcgccgacagccgtgactgggctggcgaccagcagatcattctcgactgcctgatgagcaagaatggcaatatgcttgagcgctccacgaccttcgatgagggcccgcccgtcttcttctcccacaacgacgtggtctggtccacctcgcaccagcactcccgtatcggcatgggtgcgcttcgcgcctcacttgaggctctgtacaaggcagtgaccggcaaggaactgacgacagtcgccttcggcaagccgcagctcggcacctatgagttcgccacacgtcttcttcgccagtggcgcaaggagttccacggcatcaacaaaccccctaagaccgtttattttgtcggcgacaccccagagtccgacatccgcggcacaaacaagttcaatgagattagcgatacagattggttctctatccttgtcaagacaggtgtttaccaggaggggacaattccgcgctacccgccaaagaagacctgcggaactgtcctcgatgcggtcaagttcgctatcaaccgagagcttggactaaagacagatgatcttcgtaacaacgagccatctcctgagcgatatggggaagtccgtgcctgagctggatatcgacggctgtccctgctattgggagaacttatgcttaggcttatgattttttgctatctttcggttttctgttctcttcttcgctcctatctgctttcttctcttcgcgtttatgtgctattccctagattcccctcatgtttgcccttttcagttctattcatttctttcccatcccgttcgctctgcatatctgctactgggatagagtgcctcatagaatccggtacctttccatatctagatagtgctacaaagtacgaagaatgaacggtgcataggtccccatctccaactaccaaaatcctagtacaatgagtcaaagcccgacaccgcaagtatggcttatagctctgaagccttatggtcactgtaagcaaactagcgcacagacagaatgtcaccaacgagcatggcacagaccatgcgcaagcattcttcctgtccatcatcccgtcccatcccgcaaaacgtcccaatcaatccatgtcagcacatccctaggcataacgccacaaagcctctttgcccgagctgcaatccgcaataccgccaacctagctttagatacaccgcaatgcactatgacgaccgtgtgcagatctcacctagcacttgagcaactctgccagcagccacggacgccacacgcgccactcccgattttcaatgccgtacggcttatgatatactgtcccgtagggtcacttcgcgcaaacaaggtcaatggagcgcatctgcatcggcattcagtaccatcaagaaggggggaacgctccccagatccggccagtagggtaggaatctgaggcaacagctacagctcccgtagccaccgacctatttgaaggcagggcagggatgcgaatctcgctccgggttactccgtaacgggcgctcatcttatccaatcgcaggatttaaacaagttggattataatacacacacaattaatgaggctgaatgaaacagagctcaagtcgccactccaaatctgactgtaactgtattcttgtattccgtgcgaggttacagctcagccgaggtacgacagcataatccataaaaggacaagcacagtatgcaagtaacgtagattggacgggatatacgttccaacgaaggaatagactatcctgcgctgtatttggttccttactgctgccggtggcttagtggcttacagcccggcgcttcaaaagacctgggctataacagaggcgataaaagatgacccctccatataaacgggatggatgtaaatggcaatcccgcgtttaggccgggagtcagggttaactagccctccgtcaaggattggggttggcctataggaatggcaagcgatacgaatagtttctctatactatcccattttggacacctgcttaagcccctgctaatctataaacgtaacaatatatctttgcgctcgactcagacttggccctggccctaatgccccgccatgtgcgacgacgtcagtggggaaaagatgcgcagcggggatgtgattgctgggctggcgcgggggaatgctacgctggtggagtaggtcggaatcttacaggcagtaaagattacattagtatgaaaatgtctatggaccggcttgaattagtacagaccgtatgtatagaataagagcagaagaagggataaacgagtgggggcaagtctgagagcgttgcatctctgtttcggctgttcagcacgagatgactcaaagtggttcccatgcaaatggattgtgcgcaaatgaagtgatatgtaaaagtcttgcgttaactcagcccagaaaccccatgatttaggatttgatgcgacaggccaggggctcttagcagcggggcggggatccgtcctccgtccacgagtgcgcctgtcccaccccctttgtgagatccaaagattcacctgcagaacgagcctatcataacggcaccacggttccctcgtactgtcggacgggtgccagccgagggtgatctttcaccgggatagggtcgtccggggtctagcggcatgtacatgtaccccggcctccaccccagtcccacctgggcaagaattgtggatgctggatagtatacagtacgacgtacagaacaagcgcttactgtcatgaaagcagtattacgctgttctgtgtcatagatcgaattcttggtcaagccagtgcttgatcacggtatggccctctgcgtagccaggatcatccattcgaaccacgatcgccgcgtgggtgtgctcatggttgtggatgtatactgggtacttgcggaaaccgacggcgttcagagacttgatcatggagaattgatctggggtaagagctatggtgggtcgtttttctccacacctgactttctttactttgtttgcgtcgtcggttgagtttcctgatgaggccgcagctggtgaatcttccgctgtaccagttttgtcattgcgcgaacgcgtctgagactccaggtctgtggtgggtacgtttggagagatataatcggggtcctgtcttgccgctgcattctcgaatacctcgtccatggccgtctgtatcctcctcaggccaagcggcatgcgatagctcctgaaagattttccaggtccctcttcatgctcgcgaatgcgttctcggctacgaaatgtctcgcggacggaatagacaaggaagactgggatagcaatcgacagaatgagacagaagaagagccagaaaggcagcttgctgaagaacgttcggatgctctgccacgctcgcaacggaaacgggggccgcttcttatcctctgatgctggcagcgtgtaaacgtccgggtcgatgacgaccggctcataccccttcacatatttgatggttttattctccagatcccggaagtggtcttcgctcgcgaagatcgtggtgtaaaaggccgtggtgcggtcgttgaccacattgccatagacacaccgattcttgaacctcttcagcccttctatgaagatactgttggggtccgctaaagcgctgagcagtggcttccctgtatcctgaaacgtatcggccaagaacatctgtttcccagaagtcgagatagtccgggagcccaacccgttgaagagcagattttgaacacccctgaccggggctcgggctccgagatgcggagacgcaaaggttgtgaagttgacgggttcgagtttgtcatcgtcaagccagccccgggcatacagcaacccgatcgcgtacctcgatatcaggcctcccagggagtagccaaccacgctgagttttctcatcttgtgcccgtcagcctctagcttgcttagcgtcgcttcgatttcatgcgcaagtcgctctccgcatacttcgataccatcgtatgtgaggttgccggtgttgcactccgcgacgaggatatgtagttgcttttcgtcgtagcgttttcgcagggctgaagcaatactgcccatatgtgaaggattaccccatagtctgttagagaagggataattccacccattagctatttattgccatattcggacatgtgaagctgctcccacccatgaacgagtacgcagagatgatccgcctttggtgctgttgtccagttgtctgaatcgggatccattgctagccgtcgatcgtagaccaagtcaagtgattagagcgatggaacttcttcctgaagctttttgatgaagcagaatgatctttaaagttcctttagacgaatgagcaggcactaaagacgggccagttgagatagatgtaatgccccagcttccctgttgtcccgaatcgatggttctggtccagagaagcgcgtggatttaggcagcatgacagcacagagaaagccagcccgcggacgtgagcggcgcttgccaatgccggctggtccctttctgtatggattgggcgcttatctatcactacctccttagcattaacctgcccattcctgactccatcactgactctgctggaagagagtcttcgatcgttcctccatttgtttcataaagtataaaccatcgagatatcgctgaaagtttttgatgctgaacattctagccttttttggggactttttgatcttcctttccttctcttgttgggcaatggataagcgcaacttcagctctgattcctctctacaaatacacccatatcagtctaacagcctttctttaacatcatgcttttgagcttcttactgtacagccgttaccttgtgcccacgtcctagaaggctcgaggcagttggagtacagccttcggaggtagtgcttacgcccctcttacgcggcccgtcacggcatattgttcgcgagcgacagtccaaggtatgtacgtgagttatcgttgaattaattttgtcattgaaaaagagaactatttattgttctaacggtttaaatagctcctgcacgcagcaggctttctcatttccattccaattactcaagcgtctaccaagccaacgtctcaaagaaccattaaaaaaccggcatcagaaacatcagtatggattaggcacgggcgcgcgagtcagcttgaaatggccgtgctgaagcgtttggaagaccccg

SEQ ID NO: 5323 - DNA, 2115 bp, Emericella nidulans
ccaccgagtggtgctggttgcaactcatagccggtaagactattcagccgcaacaactcgtatttctttctatccttctctcttaggaaacacatggtatctttgcgtggctctaaattcggttcgcgtgtggcaatgctatgttgcaatctgtctcatgctactcgcccaggtccagggacaggcgtgcaaattggtcggttcaataatttcaacgatgaccggttccaggcatccaatcaacatgggggtcgcttcagccgaggaagccagtggaatcccagctaccccccttttcgttaagagattgacaaaccaagtgtcgcaagacctgaaacatctcgaaaagtacgaaccggcgcgacctacccaagacatagattcgatcttagatgtgatttgtgtgcatgaatgccctgcgaatcagacttcgagctttccagatttacatggttgcacgaggctgaaaaagcttgacatcctatgcctcgtgctcatctcatatactcatctcgttgaactcttaggctctttactgttcattttatccattgtccgcgctccacatgtcctgctccagggaagtcgatgggtatgtattatttttcgtgaagactgtccgcattctgcatcttagaggtacagtgacggaagtacggagtgtctacggcagtggagtgtctgcgggacggctttgtaaagacaaggcagcttttcctacacatatttctaaatgaccaactcttcttattcataaacctggctcgtccttgctacgcatgctttgctatcagtccgctagcctgactaaggacgaatatgttgtccatagttgtggcaccccttattagccccggtccaagtctttaatgaaagccatactgatgctaggagatacagtaatcacacgttgctagatgaagcaggaacagccttccgatgttactgttgtctggcttatgattaagcggtctcccccttctcccaagttttcagtctcttgggctttgcactcgcagctccttggcccgttaaaaaaatgactggtttatgttggattcctgaaaccggctgccccgttgtaataagctgaacgatatgagcgtccgatgtcggatatgttggctcttgtgatgtcggcttcgatgccgggactgtagtcggggacagagatgatgcggaaatttgcgatgagccggtttctcgcgagccatctatggaggtactcgaagtacgcctagcttcaagccaggacttgtaggtcgcaacatctagcggcagcgcaaggttattctttctggtagtggagaaaaaaattagtttaatacagcgtacaattctctcagcacaaagctatgcaggcagggagtagatatacggtatgtcttgatggtgcgtacctgataaaataataacacttcgcctgcaggaccaaatcatcatcgcgagcaatctcctcgtctgaggccggcgtctcggggtgaccgagtataatggcaaggccgcctgcaaattcgcgatcggtcgagaaaggatatgtgctcaattgctcaaagatatccgcctgcgggtttcgagattctgtttgcgcggtggtgatgctttcgcggggatgcggggaagatgtctccatgtctgtggcggtactcaaagcggcattaattcctttctgattcccgcgagctcgaatggctgatctttatagaattgggtcaggtcacgccttttttttttcttttttctcccagctataagggcattaaatttgatgtgtaagtactaaggaagctccgctgagttcttgaattggggatcgtgaaggaagcttggagtaagtatccgtggtttctgacatgggtgtggttgatcgttactttgcagggtattattggttatgtgccgacatggtggaaccaggtgagctgcccggcatcttgcgtaccgctgatcaatgtatgtgaccatcaatctgggtacaattgatgggagctttctgagggtggtcgggcgtacttccggatatgcctgggcattgtcggtcattgttgcggatcaaacgcactaaattatgttttgaccttctgagcatcatttattcgcaattcaagcacacct

SEQ ID NO: 5324 - DNA, 2999 bp, Emericella nidulans
tcaacctgacgcaaccatcctggcatctggcgatcgcgaataaacctcgcattatttgcgcctcgcgatcgcttcaagcgcctgatcgccacgtatctccctcagcgtgacgctgtggtcgttccgttcgcgctctcgcacgcgttcgcggagtgcagggctgcaaaaaacgccgctcgactcggccgataagttcagaccggacgggagtatgggaaagcatgagtatcggcttcattctctgcagcagagcactggcagtggtaagcggagcggcgacggcgaagaaggcagcaaccttaaggacatctcagtggagcggtcgtttgaagttagcgtagtgagaacggggagtatggagcggattctgagttgatctggtttgttttgctcaatgagtggattggtcgctttagttgagtctcgggctaatatttggcataattcgtcgtagacaaggacgaagaagacgggccatcatcccctaaaaccagtttgaggcttattcaaattctgctggtgttgccttacgattcggccacgtccaagcaaacaatccagaggattttagaaaaataattgatagatattcctttttttcttctctcaatttttttttccctacaaaatgtaaccggttatccccttgaaagagtatttgttgattgtattcagcaacctttccaatttgatcatgcactaacaacagttgtcataaaacagcactgcaatacttcccgtactcctgctcgagtctgctgagccaggttcgctcacctgtattttaccttggccatcaacaatgcagagctctatgcaagagctgtatcaaacacccgccatgatggaggtgagctcctgcgcaggatttgtgcggtataaaccatgtgagcatcctcgactagtcagcgactccctgaagaacgttgataagacggagtaatatctcggactcaaccacgaatacgagggtccagagcgtttggactagcaggcgcatctgcaaacggtgcctgagtcatgtctagaccgttctcgcccatagcggcttcgcccgcattcctcagtgtcgcccgcttgatttcacccgctcaatctgtctagacattgcagatccgagtacaaaccttctggccgattagcatctcacccaccattacaggaagcgtgatggcagacagccaccctcgcgtcctctcgctctccaccggtaaagcccataccttctccaaatcgcccgcatcaagcctaaccctgattgcaaactatggcgtccagggcgactgccacgcaggcacgacagtccagcaccgatccaggctgcacatcagaccggctctagcgaacctgcgacaggtgcatctaatgccgctggaaatcttgcgacgaatctcagacggactaccttccgacgagaagacaaaattattgtcacccggcgccctcggacagaatatcatgacccagggagtggatctactgggtcttcctgttggcgcagagttgcagtttgtcactgacggtgacggaggaggcgacgacgggcctgttctcgttctgacagggctgaggaacccctgcgcgcaaatcaatagcttctgtcctggattgcaggagcaattcctggtctgggatgcaaagagagatatcaccgcgcggctggcgggggttatgagcaccgtcagggttggtggagaagttagggctgggatgggtattgtggttgtaaggccagaaaaacatgtgcttctgggccctgtgtgggtggaccgctcctaccatggtagaattagggagtcctggctatggggaaattcgtacataggatgatagatgcaagctaccaatgtctgaccaatttgcaaattatcaccgaatttacctcaataccatctaaataacagggcttctattctagcatatcttaagactccatgcaaatccaacggaacacattgccgagcctaggtccactttacgatacctggcgcaagtaccccgctacccctccgatcactaatcagctgaagaacgttcagctgaagaacgtctgcctgataggataaccttgataggaatccttcgtttcaattcattccagtgtaaaacccgtcagacacaaatatgtccatgccaccggccgccctttcttctctccgcactgccctcaccagctcgctggtcttcacgcctggcgacgaggggtacctggactccctgcggagatggtccgataccgggcgcaaggaagctgtgcgtttcctgactcgaacccctcatttcattcctttctcagaatatcttctcattctcccctcacatcccttctcatatcacagcagcatctaaactgaataccgggctagggaatcgttattcaaccgaccgaaaccgccgatatccaaaccgcactcaaatgggtccaagaacaccagatcgaccttgccgtcaaatgtggcggacactcggtttcgggcacgtcttcatccgccggtggattggtgattgacctctcgcgcatgaacggcgtctcggtcgatattcagaagaaaaccgtcactgtcggcggcggcgccgtctggaaagacgtcgatgaggccgccgccgcgtacggcctcgcggccgtcggcggaaccgtcaaccacacaggcgtcggcgggctgaccctgggaggcgggtatggctggctgagcgggcagtacgggctgacgatagataatctggtctctgcgacggtcatcctggcgaacggcgagaccgtcatcgcaagcgagaccgaaaacagcgacctcttctgggcgctcaggggcgccgggtataacttcggcgtcgtgacgagcttcaccttccaggcgcacgagcagcccgagcccgtgtacgcggggatactcgcgtacacgcccgacaaggtcgagcgagtggtcgagatcctgaacgcgctgctcctcgacaagccggacccgcggtccggcgcgatctgtattttcgccgaaccgccc

SEQ ID NO: 5325 - DNA, 1636 bp, Emericella nidulans
ttttggccccttcctgtcttgactttacggcactctttttttctgcctcgatctcagcatctagctccttcatgttttgctcgtattgctcgacttttctgttgaggtctgtcgccattctgtctgctctttctagggctcgctgtttgtgtttgactacagcttccagctgcatgcagtactccttcttctgctcactggatctcataacaggcttcaattgcgcttcgagaacttcaagtttgcgttgagaaacatttctctcctctttcagagccttgccttgctccactaaatgtcggtataaaaccaagggacgaaccgtctgcagtagttcgatccttctcgcaatttgagctctctggcgcactctctcaaagtcggcgcgctgcatttcttgtcgattttcaagattcgccaggagatccttgtcggactgattattcgattggagtttcttctgctctgcccgtagcctcttcaagttctcgtgcagctccaccatctcggctccggcagcagctctttgagtcgagtgaagcagttcaactggtgtgagagccgcgaactcgctaactttatcttgcggcaggaattgacataggttgtcgacttgaatcgcgaaggactgcgcaagtttcttcacatggtgtccactcacttgctttccgttcaacataaaagagctcttgttgccttctcgtttgatgatccgagtcacgactggatttcgagagtgctttgggcccctagcaagctcaatctcgattgttgcctctctgcacccatgcttgacaaactcgccgatgtccttcgcacgtcctaaatgctgtagccgagataaaagatcgttagtactcaaaacacagttagattataacaggcacctactactggtccccatcccagccctaaacaaatagcacaaacaagcgtgctcttcccagttccattcggcccaataaccatgttcaacttcggcccagggaagaactccgccgctgtgtatgtcacgaaatccttgaccttgattcgcacaatggcaccaggcttgaacccctcctgacccctcatgccattctgcacagtcgacaatagccccgcaggattataattatggctctgtgtctcagtttgtccatcatcctgggtggaactcgcggactcggaactgtcctcggcattttcgttctcgccatttccttcaaattcgggatcagacgcgtcttcggaagcatcatatttcgctgctattctagctctcttgctgtgactcctgttactcgcaggagttggaacaggtgaagattcagatgcggacgcaagatcatcggagtcatcgtcctgctcacgtcggcggcgttgagggactgcgctattgctcatggaaggcatattggttttttcggacagatgcgactgcctggacgaaagccatcgagcatggtgtagaggcgagatccgttattgtcctcccatcccggtcattgagggcgacttctttgtgtcacttttctttattgtgaaactgatactgcgggatggaattcgtgatcaggcgttattcaggacgtgacgcgctaggaatcaatctatatcctaatttaacaggcggtgagatacggtagattcagag

SEQ ID NO: 5326 - DNA, 2901 bp, Emericella nidulans
gtaagtccacccccggttgacctgcaactccatgctaactgggcaggcttctaccatgcattttgcttctacaaagtctaggacgctgcccgtcgcaggcttgtgtttccactatctttgcgcctcactagagtacatataccggttccgttcgcacatttcaattttatctcactcatttctagctcgatatcattgatggttgtagcatttgaaaaccgcttaaataaaatgctagtgaaagaagtggaatgaatgaagtaatcattgtagcttgacagtgttagactatatgcctgaggcaagaagggagcgtctcattaagcttccaaaaagggactagttttatcgcgtcgcgcccccagagcaacaatcaatctatgggctgtttcaaggaactttctcgctcggacgccgacccaaaaccaaggggctcagtggtaatactctcattcagtgagcctacctagcgacaaggctggacttcctctataacttcagattcacagacctgtcataccatacagccagcctaaggcagatcgagagaatgctcgcgacgccaggctcatctcacctgcacaatcccgcttcgagttctagccacagaaaccgaggcggaagcacagcggcggcgacacccagccgatcaggaacaccccccctcccacaatatgagccgcctatagcccctctcaccgacacaggccgacaagcgctccttgccctcctccgcgcgcagaacttgcgacaactcaaaactcatattgggcacgtcgagaccaaacttacggatgctgcgggcgaggttaatgagcggttgacggatgcgaaggttcgggccaaaaagagagcggagagggagaaggagaagggtaaagaggctagccggtttactacggggaatgaggatggcgatggcggtgaaaatagtgtcggggaggaggcggatgaagcggcggagctgagggagttagaggagagtgttgaggctgttacaaggcggttggacaagaatatgcggagggcgattgattcggcagttagggttgatgggttgggagaggtgcttgggaaattgcaggtcgagacggagacgagtgcaaatgcgagcagtcaacgtcagagacagaggcggcggagacgtgctgaggtagaagaggaagacgaagaggaagacgacttgtatgaggctacgcctgagccggaggtggatggggaggtgctgtcgttgagagaaaagcttgagagggcaatggctgaagatcaagctaaatggaacgagatgacactgacggagcggtacgtctgctgcataagttgttcttttctggacactgacagggctttatgaacagctactccaaacacaacgactacgtcggcttctaccgcatcatccatgaagccaaaaacccaggcgaagacatgcccccgcttccgcacgcctctacctggttcgcgcatctcgaagaacccaacatttcttcaggatcatccagcgatgccgctccttcacgaaatacccgccgaatgcctcgcaacccctctccggcctctgattcagatgacctcgccattgaacgcgagcgcatctctctcagatgtcctcttaccctcgttcccttccgtgacccagttactagcacaaaatgcccgcacagcttcgaacgggaagccataacctccatgattgaccagagcgccatgaccgtcccagccgcagcgtcaagatctggccgcggcggccgtcgtatccgcgccgtgcagtgccccgtttgttcagaagtgttgacgaacaatgacctccgcgaggatcccgtgctgctccggcgcgtacgtcgtgatgaggcgcgacgaagacgggagcttgaggaggaggaagaggcggagcttgttctttcaggacgaaagaagattcggcaaagtgggattacgcttgggagtgatgatgaggatgatggtggtgaaagtgaaagctgtaacagagctataatgcacattgaccaagtccggatcaaacaagagagggcaagatcgcgtggtgttactgaggttgagaatcatgagcaggaggagcaaactacagcgacggagagcgaaacacaggattagaaggaggataatgaagacgaagagggaagaatagaaaattcaggctcagatgagaaacccagtaataacgaggaagagcagtgggaggtatcccaaccacgattcttcatgatttgccctgacgcggagtgtagctcgccttaattactaaccagccttaccctaggtacgcagcgtagcctgtcatcatgtcatattacgaaaagtccgagtgtccaatcaaggtacgaaaactgggaagatgcagttcttgaaccttcaggtatagaaggggagaatagcgacagcaccgcgtatctgaactttttgacctgcccaatataggaaggcacgcgactaaggaaggtgcgaggtaggtagagtagaaggaccttctgcttaccagactcgtccaattactatgtgaaccggtgcgttttgggaatgccggtgaagcaggcatatcggactcagatgaacgcagtgtttcaaacttcaaacttcaggtatacccaacaagccgggcgtcagcactctgcgtgatactgtctacttgatggctgatagcactacaacccgacttgtcaggttataagttcttttaagatagtcaatggatcaccgatgcgaatatgtggtatattccagtacgaagctttgtcaatttgtattgagatacccgtgctagggccaggcctgcagtctcttcattttgggtattcaaccactccatacgtacaattaggtgaatttgcaaacatgagcacagtctgtcgccgacatttgtgctggcttgctcgtcatggg

SEQ ID NO: 5327 - DNA, 3101 bp, Emericella nidulans
gattctgatggaaaacaggaggaaatgttattgcaccctcaaccggccctgacttctatagactcagacaaccacacgcaatcggttatcaatcggttgtctcacggtcgacaaaaggagtgccttctttaaaatagcagcaacctcccaatgggttggaacctggcgcacatggaattgcaacaagaccagaacgtcgcgcatggttagaccattgctctctagctgatgcttctcagatttgctatgatgcaagagctacagcatcgactctacccaagcgcatgggtcatatgaagagcgcagccttttacctccgaatatttcaggagaccatcctagatgttatgctacaacacgtagccgaagccaatgaggcgtgcaaatctccgattatacctctcttcagatatttttacaacttcgtatatcagggagattggtgtgacccaccgaagcctatgaacgacacttacgcccctgcgccatgagacataactccaagcaaacgccgaagaaggcaaatcaataccaaccatttccctcctcgccaagtctcttgcctgtcggattcattgaaataattctctgtcctggaatcgtctcatccgtgaacgccgattcaaagatccccgatatagcccgtttccctaacacctggaaagaatcatacccctccagctcgccattacaagccgcccactccctggacagccgcggacttgaacccgtccccagatcacaccagcgcgtcacgacaattgcctgtcggaagcgcgactgctcgcctgccttacgctgctccgtgagcttaacctcaatcaggtattctgaagggcagtcgggacagcggcgcatggggcggcagtggctgcacagagtcgtcaaggcattgggatcatgcacccgacggtgggccatgtctttgacccgatgctcgaggccctgcaggccctctgtacgtcgggagacagggatgtgcgtgagcgcgcatttggcggcggacatcagatcgccgtcgcgccagtgcgcgcaggcggagaaatagggccagtaatcctcgcgcgagtataaaagaagccgctgcgaggacggcgggaggcctgggtcggcaaatgtagaggacgtcacccgcatgaggagtcggccattgtgtatcaagaagcgggattgatgggaccagttgtcgcggcgccaccggcgactgagggctgtagtggggtctgcgaggccgtagatgggcgatttgaaccgccatgggcgaagggcaagctggacaaacgtaaaagggattgtgcgaccgtgcgtgatacggtggcgcggctgaggacgaaggttattgcgggcattggggcagtcgaagagcgggttgaggactttggcgggctgcagggattcgtggccttcttgagttcggaggtggaagcgaccgcaggggaagcaaaggagatggtgcgggtagtatttatcctgtgagacgagaaagtcggcgcgattgtcggtttgttcaggctggttgagcgaggcccaagggtacgggtagaggcgggcgtagagggtcctgctagagatggcgagtcgggcgccatctgccggagagaggtgctcggcaatcaacatccagaggtcgtctggcagactggcgatgagcggttcgcccggtggccggttatcgcggccatagagaccatcggcatcgctgtcggtctgaggcaattcaagtcaatacaccgcgagccgatacctcggggaacaggagctgggactcacgtcgaagttttgtatgccaatggcatgaatgaccgaagtatgatcgagcgtttcacctaactgggtatcctgctgagcatgaacgtggcggtacttttcattatgagctgcaagaggcgcgagcaccggcaaagggggtacgtggtcgttttcggtcagagttgtggtggtggagagggttggtgaggctgtttgtcgtggcgctaaactgttgcgcagaacttggcgagatttcttgggccggagagctttcgaaagcaagcctcgtatgccctgcctgtcttcagacatcttttggcattggaatgagtgaagaggtttgggacgatctccaggatgataaaaaaaaggatgagaagacgatgaccagcctaaaaaggaaattgcggcaatgacgtgggagcactgctgacggtcgacaccccagcgtcaaggacgtcagatccttgtagaattctgtataagtaggatataatggatatgtccatcacgacttttatttttcatccattcaaggtcgagatggacggttgccgactccggcggttccgactatcagccaactacaaccataaacggtcgacccgtgggtcaattaacgcggtacctttcagcttctactacaggatgactgcatggaagagaaaagagacgtccagctagatcaaaagatcaaagtatacctcattgctgcaaacgaaatcatacataggaaagcaagtacgtatcataatttaggattgtcacaactacaggttacatggggttatatccaacaattcaatacgacatgcgctcaacccttacgcaaagcgcttctcaacggccttccagttgatgacctcccagatcgccttgaagtattcggccttgcggttctggtattgcaggctgcgtacgggttagcggagaagaacaaccgaggggaccaaagacacttactagtaggcgtgctcccaagcatcaataccaaggaggggcttgaactgtccaacaacggggtcctggttctgaaatgcgacttggataagtaactacgtctctgccaccacgagaaacccagtatcaacttaccgcgtaggtcttgatggcgatgctgccagtttgcttgtcctgaaccagccaggcccagccgcttccctggatagcggcgagagcagtgttcatctggccctggaaattctcgaggctaccgaagctctcgttgatggctttggagagagcaccagaaggaggctcaccaccgccggcgttcttgggagccaagttctcccaaaagagggtgtagttgaagtgacaccgccgtggaagttgatcagaggcttgagggc

SEQ ID NO: 5328 - DNA, 1885 bp, Emericella nidulans
caacctcggcaagaacttcctcgccccctggctcacactccgtctcccgggcgtctggctcgtcatgctctggtacgccgggctggttggcggtgttgtgaccctcagcaccgtcggtccaacaatcgtcgcctacccgccctacggctggggggagaatgccgggctgatcaacgtcggcggcgtcatcggctcctttctaggtgcggctgtgacagcagcgctcgcagaccgagcaattgtcactaagaagacgatcaaggacggcgagttcagcgagcctgaggcacgattgcccgttgcattgcccgggctgattctcgcgacgacgggactatggacgttcggattctgcgcggagaatggaagcccaacgatgtggattgggatgcagtttggaattggtatgctggcgtttggactcatgcaggcgccgtccgtggggttcaactatgtacgctccctccttttccaccacggcatttcccaagcgaagtcaagagcactaacggtcgtgcaggtaattgactcctatcgctccgtttcagcagactgcttcgtggcgattacctgcatgcgagccatcatcagcttctcgtggacgttctttgtgggcacgtgggtggaaaatgctgggcccgcggttccgttcggagtgtttggagggttgctggggttttttgccctgttgttgtttccgcagtggtattgggggaagaggacgagaattgcgacggcggcgtgggtttgagatttttgttcttctgttgtatatatagtggatatatattgctgtcttggcgtaggcccttagggaggaaacctcagcgacgtcatgcggatcggcagtcaaatcctccacttcgacttcaacctcaacttcgtcacttacacatcttgaatcttcccttcttcctcctcaactctaaactctcaacaccatcaacaaaaccatcttactcctctagattttttcctcttcagagaaatagactactcatcactatattcaattcctgtattgacaagtctccccaaccacggaccgaatgatgccacccccttctgaaccgccagcacgcccccctcctccaacaacgctcctcatatacccagcaacactcctcctcggctcactattctctgtcctctcgccgatcgcccggtatcctgaaccctatgatgacgccgtgaccgcctccgcctctgcaccgatcaactacttcgcccgcaaaaacaacatcttcaacctcttcttcgtcaaactcggctggatctggtttactctcgcattcgtcgctctcctcctgacatatccgccgtccccgcatcgtgggcgccgccaattccaagcttttgtgcggtacgccctcgcgacgacagcatggtacttcgtaacacagtggttctttgggccggcaatcatcgatcgcagctttgttatcacgggtggaaagtgcgaggacgcgttgtctgagttgaataacgtgcggaatgagaagggagtcattggcgctggagtcgaagatttcggtatttatttgactgccacagcctgtaaggctgcaggtggcgcgtggagaggcggccatgatgttagcgggcatgtgttcatgcttgtgcttgttacagcagtactagggtttgaggcgttgggtgttttggctcaagaaagcgaggcagagaaagatgcgggtgcgagtgcaaatgcgaaaaccacggctgaggcagggaatgaaggttggacgtggacattgcgcttcgtgggcggagtttgttgggctagggtgggtaatgctgcttatgacggtttttggtttacacgtggttggaagaaggtaccttccttggattgggccagtcttgggtgacgaaatttatggtg

SEQ ID NO: 5329 - DNA, 2913 bp, Emericella nidulans
acacgaacctggatcttacttagctctctttttgttcttctttgattgagaatggagtcaaggcctgtttctctatacagtgaggggaggctctaacaaggtcattttgcgcagaactaagtagacttcattcgtgatatagactgttatcaaagacttgaggacggaagccggcctggctctacgcgcttcgaatgagtctccagagtgaaataatcaatatgtttctcttctgcgtggtcggctcgtacgtaacttcgtccaattctgaagataccctagtccctgattcgataatagattctggattgtttgtatgttaccgcttgtataagaacacgaattagacgctaagcacttaataaattagttcaaagctgtgggcctatgtggaaacagtctggtatcataacaccgcctaagaggtacagggcaaggtaattgagaataaataatatcatcaaactcgcggcttatgaaaagaatgctataaccgtatagcaacgaaaccaaggcttatgaggatttcccggcgttctctgctgttgtgccgcctttagaggctgagccgagctcttcagaagaagctccaacattcactttgtgcgcttcagtatcaactgggtccttagccttggtgtctttctcgtcatcgctgtcccctaagctgaacggatcgttttctccgataggagacggctcgacagtcgcaagaggctgccatttactcggtttccctcccgcgggggattggcgcttagctggctcggaagcatcataaagattgccaatctctgtaggcgggccctcctggaatgacaccttgcgacggtctggggatggtgaggagcttttatacaacgttgaattcgcaagcggtcttggtggacgcgcagggggtactgcagttcactgttagtcagaccgaggagtattttaaggggacgagtgagtcgcgaccttctgaatcccttagttcaaggacggaaaaatcgtcgctcagaacttgcggatctgcatcgtaccgctcacggtcaccgctgcgacgacctagctcaccacttcttcgtgatcggccataactttcctctccgtatgtacgtgcagacgatgtattctcatcgtcttcctcgccatcgatcttcttcttcaggttctggacccatgagctgaccttggactgggtgtcgaggaaccctttacgaatattttcacgaatcacgggaaggtcgtcttgaatatcattagcctggaatcaaggacacaaaagatcataaaatatgcgcaccgtcgaaaaagttgtattctttctcctctgctgcatcatcataatgcctctgccgacgataggcttcatcccctccacgaggtggctgcgcacgtcgattgtagtgttcggcaagttgacgagcatagagttcatcagcttccagctgtctttgcgtcgcagatgggcgtggaggcttcggaggggcatagtcatcctgtgcgcttgcatttgggtccgtcatccctaggggttgttagtcctacccactaaaatccggaatcaatcacacgaaccgaggagagcatggaaagctcgttcaacgtcataggagcttgctaccaaaacagccttgacaacggacacctccaccgacgggaacgcttctttcagagtgttctccgcttgttgtcgcggagacaaaggacgaggtggttttggtggggctgtctctgtgctggtctgttgggctgaagcggaggatgcataggcgacgccggtctcctgtatttcatcgtcgaaatctagagggcgcgcagttgttggtgattccgggcttgggctatttggcccagctgctggtttactagcctgggttgtcatgagcggctcgacctcaaacaataacggggagaggggtttcaggcatactgtcttctctgtttctgacattgtgctggcaagtagaagaatgcggatgggcgaggttgaaacacctagaaggtctggagtatgcgttgataactcttggaacctggcgattagcgagaatgatcccaccaggcagaaagctaatgcgatgttctgttgcgactgattattggaggcttgagttggagctctctcatcagccactctaagcccgttcgcagtgacgtgttgacacgtgatattaaacaggtactaaagcacctcaaccaggttagtctgcgttgctgctttaacagtttatcctctaacgaatcacccaccgaggcccttcctcacttcggtgctgcaataacgacagaaactgactagcccgaaggtttctgatgtagattcaaaatgaaatatttgaatcgttctatagactctgtttattaccgttgaagcatccatctacagttcgggagcgaggtgaaaacatggcttcggagttagatgttgggaccagctttataccgtccctatacaaaccagcttccctgctacctattgcaaggcataaacagagcatattgtatctcgtggagacttatccagtcaccattgttgttggccagactggcagcgggaagacaacgcaactgccacaataccttgaccaggcaggatggtgcacagagggaaaagccatcgcggtgacacaggtaaggccgctcctttcctttgttcttagcctttttgattgaccatgggtgtaatagcctcgtcgagtagctgctaccacagtagcagcacgtgtggcagaagaaatgcgttgcaagttaggcgaggacgtaggctactcgattcgtttcgaggaccggacgtctgctatgacaaggattaagttcttgacagacggaatgttactcagagaggctcttgtagaccctcttttgtcgcgctactctgtgatcatggttgatgaggcacatgagaggtcactgagcactgatata

SEQ ID NO: 5330 - DNA, 3576 bp, Emericella nidulans
atcattgatcggttgaatagtgcagataatcatggacaaaggctttgggcaccacccgacttgaagtcaatgagcagttggcagcagcaggatgcgcaggaatatttctcgaaagttgtcgatcagttggatcatgaagtacagcaagctacacgacgacggactcgaaacttggggttgaagatggcaggaccgcaggaacatgttattggaacaacagcagcacaatctgatggtccgatgcaccctggacgtctagaaaaccaatctttccgcaatcctctagaaggtcttcttgcgcaaagggtaggatgtatgcaatgtggatggtcagaaggactgtctttgattcctttcaactgcttgaccgtgcctctaggcgctggctatgaatatgatgttcgtgattgtttggaccattatatgaatcttgagcagattgaaggtgtggaatgcgccaagtgcacactgctccgcgcccgagaccaacttcgcaacttgatgcagcaaatcgaagacgatgaaaagctagtagaggctaaggagcggacaaaagtctcagacgcactcaaatcatcggctgagcagaggctacaggctgttgaagaagctttagaggaagctgactttacagagaaaactctgtcgaaaaaatgccacattccatctaaaaatagggttacgacgacgaagtcaaggcaagccgtcatcgccaggccaccaggctgcctggcaatccacatcaatcgaagcgtgttcgatgagcacaccggcctgttacgaaagaactacgcagcagtcaaatttcctagggtccttgacttgggcgaatggtgcttgggagggagctatgacgaagcgatcaagcagaaggttgaaaattggggcactgatcctcgggtttcgatgctacacccgccaggcgcggcgagggatggcgatcgccgttatgaattgcgcgcggtagtcactcactatggtcgtcacgagaacggccactatatatgctatagaaagcacccagttgaagtattcccagctcaagtaccggaagcagttctagaagcggatggtgagaaagaaaggtctgagcgttggtacagactgagcgacgaagacgtccagatggtcagcgaggagaacgtgatgacccagggaggggcatttatgctattctacgaggccaccgagacaccagctcccggagccagattagataccaatggccgaaatccgatatcgagcttctccccctcccaagaagatatgtcctctaatatgtccacgactacggatcgttcaacaatgtacgacacatcccgcgctactagcgtatcggccgagggggagcaagccagcgagaagggtcagatgttagaagtcgattgacctccgcaggtttggttcctcacttgtttcgcatccttgaacgcatgcatctgcatgtattgtgatacccagaagaaagcatactaggcgttatcggctttggtcttttcctttaatattctgctaggaattctaccgggctgcgtatttgtttgtattagtacctagtggaatacataggattttggcattggcgacagcaacatagtggaaggtagaaatgagcctattactattatctgaccacaaacaccaacaaagtaatccaacgccaacgccaacgccaacgccagtcattgatacaaccacctagaagactccagcccgttgcatgatctcatggaactgctctaacgacaccccagcatcgacccccacacccccatttgcctccagaatcatatccctcagcagcgcgtcgtccaaatccttcttcagctcacgcgcaatccgcctcaaatgacccatcgaaattggaccgtcggtcccctgcgtgaacagctgaaaggcagaatccacctctgcggacatagcatcatcggatcgcgatcgcagtttcgccgccgcaacagatagaaagggcgcgtaggggacgtatcctgtgaatgtagggtcgacggccgacagaattgattggagttcttctgatgaggagggtgcaaggcctagagctctggcaaccattcttgttagccaaccctgtccgcccaccttgacgtttgtggaatagggagcgacatacacaagagctttccgtaggtcatctcgcgcgataccaccatcctctcatcaggaaattcttcattcgcctctgaaaagatattaagcacctcctttatctcattctcctcttccccgctaatattgttctccttggcgagtttggattgccgcgctttcttcgggcccgacgacgatccggtcggtgcggaacgcttctttggcggctggacgggcatagcgttagtcgccgtacatgctattcttgaggtcgagaaggtagatcataactagaacttaccatagggctagagtgaccgtgatggcagttgccggaggtcgtttgcgatgcaattgacgtcaaagagtgccgtgaaagggcgggcggcactcggccatttgtggggtgagtggaggtttagttatcgtcgatatagtagcaagtccatcacattgcaagatctaggatgtgatgtatattgtagctggttactctgagacggagttgtcgatcatcatcgcatgtcatcgaagattgcggaagctgtacacccgcgatgctgacgtaacagtgcgtgcctggcatcgtcttgagctttttgcagcggacatggtgcttataaggcgcacgtttggatttgcattcccggctttctagacttttcagatctatactatttgcgctgttttggttctgtgttacagcgacccggcatccccaagatggatatagagttgtatgtctatgacctgtcgcaggtaaggatgcttacgctgggatgctagatgaacattgctaactagaacagggcctggcaagaatggtatgcataccataattcagcttggtttgagctgtttctgacttcggcagtactcgatggccctgacaggggtgcagatcgacgccatctaccacacgtccctggtcttcaacaacactgagtactacttcggccagggcatccagacagcccagcctagtagtacgcaccacggccaacccatggagaagatccatattgggacgagcgagctgcccttagaagtggtggaggagtatctgcagtcgctgagctcgatctatacaccagaggtatgaaaactatcttggttacttattggcgagatattgacggtttagtcctatgatctcttcctgcacaactgcaacaactttactcaagatctggctatgttccttgttgggaagagtattcccgagcatattcggaatcttccgacgacgtttttgagcacgcccttcgggcagatgctgaagcctcagattgagagtgccctacgtggtgtcacgcaggctccagggcaagggttgccggcgccacgatcaggacctgctgggtcgcacactcaggctcaagcccagtcccagggcaaggtccgaagtggtgggcagcttgaatgagctcgagcagcatctgtcctctgcttcgaagtcgtggcagc

SEQ ID NO: 5331 - DNA, 3120 bp, Emericella nidulans
ctcggcctcctctaatctctccttcaacttctctctccgttccaaattcctcttcaggtcgctttttgttctccggtcccactctcgtctatccgcattggctctttggtaatttgagtagaactcttcgccaacctcacgggctatttcggcgtcgctcatatggaagaccttgaagcgtttgatgcagaaaatgagggtcttttcagcctcgtctttccgttctcgcggggaaagaggtggcggtgttccattcgaggaaagactggctcctgcatcagtggaacgaggagacagggttcggtcatagtattgctcagctgctgtgccttctgagcttggtattagtgactctgaccatgaacgcacctccgcctccatctcgactgtagcagcctgatactcccgaatagccgcttgcgtaagaattctcactgtgtttggatttggcagcactagcttcttctggagatggtgaaaatactcggcgtcaaagttcggatcgcccctccggaagtcccgttcggccttctcgtaaaaccgcgtgatgccacctactacaagacgactgaactccggtgagttataactaacgcaaaaacgcttatagacctttttggcagcggctgtgccctgggtttctgcgatagcggcgagaattgtgtgaaatggcggggagggaatatatggaaggcgatacataggaacgtactcagactcgaatacagaaccggcgatttcgtggagcgaaggggagggtaagtggcggaagaggcgggtgaagctgatgagagtgtgtgcttggaagttagggttacggcgtttgcgccaagggttttcgtcaaactcgccgaataagatgcggtagagaacctttttcgcttctgcaagatttatttcaatgtcggaattggacgtgctgggcgaatttgatttttccgatgacattattagggcgtggtcaagacggatgatctctgcggcaatggcggcgatgttgctatgcgcccaagtcttgattcgattatcacggatgtatttgagagtggaaataacttgatcccactggtgcatggtgatgcgataatttagaatagctcgaagagtgttgagggagacaggctgactgagtgatcgcacaacggattccccaatgttatcattcttcgtggcggccgcaaatcgcaagagggaaggtgctagagcctggtctccatatgcgtttacgggcactgtaggcccgtcgatgtcgtcagacaatagaagccattcgccgaatgcaaaagctcgtgacacagtaatcagatcaaataaatgggcaagagtgacgttcgaaagctggggaatggacgattcaaaggataataagccatcataagtgaaaggcaggtttgcacggtcatctttcaaccgcgacgagaagaaatcatcgagacgtcgcatcttgcatgtgtccataacagcctgcaacctggcgaacagattcagagcgttcccagtgaatctatgagaagagtggtacttcaggttgtattcaattaggccagtaaaggcacacgtgtcgtcgtagagttgcgattgatcaagggcagccaaagtatcctcttccacaggacacatgccgttgctccatggtgggacaacgtgaggtgttagcttgagaagattatcgaacgtttgtggatcaacttcgggtatcaggccgccggactcaatcacacgggttgtaaaccaattaactgttttggttgtcgatagaaactccgactcagacgtcgtagcagaggtgatggcaaatttgagattatcgatgtgacggaggatttcaggagcagggacacctcctgtacccattcccatatgaatgagattgggcaggttgtccaataaagctgtaacgatttcgacactaatcgtttgcttaccaaggccgtggaaaagtgaggggggatcagtccgcttgggcggctcggacgcaacatttgcagattctggcgaaggccacgttgagacttctcgatttatgatagtgttgcgcaaggccttttcctcgtggagaagaggcgtccaactctggaacttccaaccttttcgacggatcaatctttcaagcagccaagttccttcgttaatgtgtccatgctcgacgcagcaccaaaggataaactccaaccaaatctcatgcccgagttccttaatgttgatcttggcaggcaggaagggagcgtctttccccgcggctgctgcttctgccgcaacctctgcttcatgcaccgtccaggcagcatcagaaagaacgtccataatgtgagtagatagaagatacattcctggaggccggaacgtagcctgataggtgtctggggtggtgtacttgtagacgcgctcggagacaagaccagaatggtgaagccgcgcaagaatacgatagaccactgacatggcaagcttggatttggcaggggatgtgtcagcagcgtatatagttattatgcctaagcttttccagacttcggccatgagcagcatgtagtaatcccgcgaaaaaggcctatatgtaagtgaatctagggtctccaatccgacaatatccgatgtccgcggaaatggcgaggagaacaaatccacatcggtcaatttgtcgagcgagatccccagacttatggccctatcctcaactaccccacgtcgcgaagaagaagctgccgcgactgcctccgcagcatccagtaacccgttgagtatggcatacaccatcgaccaattgttcaatttatagccagtatgagctaaaaggtccctatcgagctccgtccgagcggcattcaaatggcgagctaaatcgatggtctccgcaaacgactttcgagttattcccgaagactggttggaggctgaatgtgcttcagcactcttggggtttcgccgcagaaactcttctaagaaagttatccaaggtttcactcttttcctgtgccactccgggacccggcgctccggaggattaaggcgattgaggtctttgaggaactcggagtcaaagaccgagcgcttggcgccgacggagtattgcttgctcattgtagcttccacccggaacgaggagttgctggcaaggag

SEQ ID NO: 5332 - DNA, 5128 bp, Emericella nidulans
ttatgcgggaaagatgcgacagccgtttttgaggcgacgcatccagcgggacattagggcagcttctcacggtctgtaatatacaacccccaaacacgccgcaaaacaactgcggacgcctaacgcagggcagaataccatctcggacctgttgcccctatcaccagggatgcagaattcagtttggcttctaaggagaacagagggggctcgcaaagctctgagtcacctgtgcctgcgcccacaccccatcttcacaccgtccaaaacctgaacgagttcgagtccatcgcaaaggcctgcttgtctccaaacgcctgggcctactacaattctgctgcagactccctcgcgtcttttcacaagaacttgacagactggtccaagatcgctttacggcctcgcatcctgcgaaacgtatccaaggtgtctctgggaaggaccatcatgggccatcgaagtagtctccctgtatttattgcacccactgcgcgcgcaaagctaggtcatccagacggcgaggtgtgtcttgcgcgtgccgctgcgagacataatatcctttacgcggtttcgagctacgcctctattggacatgccgaattagcagaagagttcgtcaaagagaaaactaggttggtccctataagtgcgcggtctgcgcaaggagccctaggtttccagctatacctaccgtatgacaaggaaagaggcggacgggcattgattgcgaaggcaaaggacttggggtttcaagcgctagttgtcactgttgacacgcccgttgtcgggaaacgcgaagctgatgagcgttttcaggcggagctggaggtgatctcttctgaccgtgcagccgtgcaggtcaacgtaccgcgaaaggccgagcctggtggtgacgctcctgttctccgcgggttccattcgtcttcactcgagtgggacgatatcccatggatacgggaggcttggggcccgcagccgctgattatcaaggggattcagacagccgaagatgcgcttcgggcgagcgaggcaggtattgatgggatatacctcagtaaccacggtggccggcagctagactacgcgcccagttcaattcagacactcctcgagattaatcgtttttgtccggaggttctcaaacgagtcgaggtgtacctggacggaggcgtgcgacggggaacagatgttatcaaggcgatttgcctcggtgcgaagggggtagggctgggccggccgctgttgtacgcgctcagcgggtatgggactggcggggtcgataaagcattacagagtgagtccgtctcgtccttaactgggacaatgacactgatggccatagttttgagtgatgaaatcgagaccagtttgcgtcttatgggcgttgttgacgtgtccgagttagatttgtcgtttgtgaacacgactgctctggaaaaggacctggtctccgtaaggaacttggatgaccgattcaaagcacggcataggctttagattggacagggtgtggattggacgagagatctggcagcatgtgcgatgcaatgagctcggttaccaagctcgaggagtctggatggccttgaagcactgaatgattataggaccatagaccaagatacgatactgaaactcttgtagtctttccttcacctaaaagattattcaagcatagcctgagtaaagtaagctttcttggaatcatctgaaagtactgttagtggtgatgaaatctagagtaactaagcagagggtttacactttgcctttgatgttggcgtctagggagattatttgcaacgtataatcattgtatatttcatagcatctaagatgtaggaagctcactcttagcccacccttcagtaataagcccaagaatgctgggtctggcctaataacctactccagcttttccgtctcatcatatcaacatgagagaaccaccgtagaagccattcagcctctacgagcaagcttgacaacctctgatcgcattctagttccaaacccaggactatgaatccacccatacgcttacttaccccaggatcatgtcgagttattcatctgacccagtgcaaacctggaaagatgacagtcctagcgaaaggtgacactgatctatctggtgaaaatctcgaatcgcagtacctatgctgggaaggttcatacagtacactttgcgagttccgccaccacctccctgttcaagccggataccagctcctgctcggtatcgacgacaggtgtagatggagtgtcgcccccttccgtagcatcatgcaggcagaacttgacggcgtttgtgtagattgttcccatccggaacgcaagcgactccacgcatcttgtcctcacatacctctggaagctctccaacgggacaggcgccactaccgagcctttgccggcagctctggccttctgagcgctgtagtccttgtgcattctgtcgacggtttcccatctccctatctccatcagaaggataccaagactgtaaacgtcaaatcgacgcctgaacgggatcgtgctccgactgtctggatgagtacactgcgggtggcggtatcgatcgcagaactcgtctgcctccggcttaatcgtcatttcatcaggagagtccgggcgggcgtagtcgaagccagaaagatagggctgaacgcagctccctctcccgtcagcggcctgggtaaagaagaggatgttcttcgagttgaggtttttatggtaccatctagacacaaagagccggtgaagtgctgttgcaaggttcctggcaagctcaaagcgctcatcaagcgacggtctggagaactccttcaggttaatcagatcgtgtagggtgaacactttgaccggcggccctgctgcggctactgccaggggcacccgatacaccaggcctactcgggaatgcggttggaactcaacatcgtccaggattcccagacagtcaagagtgcggtacgtctccaggttctgactagcatggagaagccgggcaaggtcgaggcaagtattgaggtatgtcattttcgtctctgagttgggcgggattctgtaagctcgccattcgatgaggacctcggttattccattatttgtatactttgtttggtaccgtgccatatcctgtccaagagaggcgaacctagcgcgtgatagcatgagctggttggtggacggaggaatcggcgttgatgcttgctgctgcagtgctgccacgcttgcggccacagataaagctcttcgccaatgcactcctgcgcgttgtatctccaacagcctgtttggatctggttcggcgagaatcgcttgcatgatcgatccgtccaaggaaatctggaggggcttcggaatgaggttatggaggctggtattgtacgcatggatcgtagcgatcaggtctttcagtcgcgcttcctcgccgattgcccatcccagccgggcaagagaccttgagagtcgcgactggctatgcttgggctgggtctccttctgtagcctttcaagtacctgcccaaggtagtgcgggccggtctccagctccttgttgtcccctccaattggtgaagttgccttagcaacgactagcccgatcccgcgggttgtactatgcaatatgctatccaatttggtgagtggctcagttcaatatagaagccctgcagtcatgagtgcactccgcagccgcttcacaagaccgctctctccagttccagcgacgatgaagtccactcgcgctcacaaaatattcatctccccagctcaccatagcatggacatccaatgcggttgtcagcaaggctgctgttcctagtccaacgccgagaggttccatctcgtattcgcaagcgtgagatatgagaaagacgccatttttccgcgtaaaaggaaaaaccccgcactaagataaaagccaagccaggaagattaaaaaggcgaagatgttgcttccggcccaggctgagctcaacaaccgccggccatggcgacgagcacgtacttgtccacccgctcagcgtacggaacacggtactcaacatcgactagtggagcacccgagtcctacgagatacgtaaagaccattatgatctgttccttctgattcaggatctggtccgcgggatcgatggattcatgcttgagttcccagtcgacgactggggtcaacagcaatcgatcaagatcactcttgggtcaggcggcttctcttccgtccagcgcaggatcgcgaaaggacgctggggcaatcgaagcgtcatggcgtacaagagtatcagaccccggtttgatcaggacgggcgatttgatgaccaggacgctctggaacaggctgttgtcgagttgagattactatcggcatcaggaatccgttcacatcgacatattacgcagctgagagggatctcatttgagacgcctcatcaccgtacggacggatatcttgcccccgtgctgatgtttgatgcttcatcaatgggaaatctgcttgatttcatccgcgatcctgttcgaatggtagacgggccttactgggaattctgcctggacgctgcgcgaggactgcaagcgctccatggccacggatttattcacggtgacgttcaatgcgagaacgtgctcatttttccggccgaacaccgtagggcgtagtttgatcgttatagtgcggacttttgatgttcattgccattgacagggctgctctcagccactctgctagggtcaccctttccttcattgttcacaagcgtcactgtcctgagcgtgctcctttgattccattcgatttccttcgtctgctgtgtggattttgttcattgtgatcactctatgtttctggtttaactttgttcctttgtcagccacttccttattgattgttatcttttcttctcaccttttttattctctttcctttctttttccgtttcttattcttctatattctttttttcttctttccaccactgcttttctctctactttgtactctcctctaccatctatataaagttcccttctctttttacctttctcatcttcatcctcttaactcattttctttcactttatatctttccttcatttcgcgttctccttctcctattctcc

SEQ ID NO: 5333 - DNA, 3260 bp, Emericella nidulans
ttaaccacgctgctttcaacgtcaccgcccatgttgtcaacttgtagacgaacgccagagggaagtaactcgcggcgcaacagcagtaccgctcgcagcgcatggcccatgcttcggtcggcgcttcggccaggtcggtgacgagggtgttgacatggccaatgtggccataacaggtatctattccaatcgacggacgtatcgagggtagaaacgtgtacgagatgactagatagggcgggatatcattgcgggtactattgcatcctaaaatcgtcaggaggctacagccagaacacttcaactgctttgcaatacgaaagccgtgtaaaatcaagtgcgctaaaaaggcgaaaggcgccataaacggaactcgtggaagcgtggaagactcgaagtgagcttatgctgagcgaggttcttggcccagatcgcgatatgtaatcttgggcgctagatttgggtcgggtgcaccgccacagccgcgcggctgaggtgcccatactgtatacgtaggagcttacgtacacgaaggtcaccaacacttaaagcactgctacttgaaaagatatccgtcatatgcattcgcatggtcccagaataagccgggctatgttatttcgcagttatatgaagaaatgggaattcgctgctccaatgaactaccaaacccaagaacgtaattgacccttcaaacgcccaaaatatagaggtatcatgcagaaaataatgatactgaatcgaggtactcatatttatagaatttagattatgatcgatgccgagggggatacgatcaggaacacggccaggtataaagagacggaagagcaaatgcctatctcgaaaacaggttgccctggtcacaccagccgttaacgggctaaaaaagctgttagcaaagtttaaggaaaagaagcaccagctgtagacttaccagacagctgaacctgtaacaccaagaacagttcgagcttgggtacttataaaagttcacaataagaaggatgaacccaataaggacagcgaccaaagcgcctaatcgaacaagccaccaagcccaccataagggcttccggccggcgaagaatcctttggggttaaactttccaaggccgcctatgttggaaccagttgacgtcttgttctggtccggatcggcgttttctgcagcaacaccgccgctcatggcgacgtacggactgcgagcgagcccaatgcgctcacgtagagcattaggagacctcatgacgcaaagtccgagcgcaaggcccattgtaaaaccgccaagatgagaaaagttatccaaacccggcaggaggcttatcatataacgagacggcaatgccaagaaccataatgataagctcaacccaagggttctggcggtcattccatccgtaaagaaggtccaagacgaacagcgcgagaatgccaaacagtgcaccggagcatccacaggacgcttcaccttgcccagcatagttacctccaagaacaaaaccccagattccactggacaggtaaaccaatccataccgccaccaaccaatcattcgctccatatcggcccccatagtcatctggacgagcaagttgaagccgatatgaacaaacccgctgtggaggaacatgggaattatgaagcgaaaccactggtcgggtgcgggcttatcgtcaagtgagccgccaggatgtgggtttggcaccccgtcgaatccgcacagctcggatagggaacaatctgaatctgtggtcgtagcattcgggcagggaaagagcacttgttgggtagcgttctgcactccgggaacatttttcatgcaaggtgtatatctcgcacccatgttgatctgaacgtatgcggacggaccaaccatcggattgaactggggcttcgtttgtatcgggcttccggtaagttggcctgcaaagtcaattagcatggcctgttagtattacctgatcaacttacccatcttcaccaattcgacaataaagactatgatctgggctatagttaagatgtatgtaacgtaagcaattttcttctggaagaaccctttcttcttctgccgcatagggacttgcggttccatcatgccaggatctggcgcatagtgggttggttgctgcatccaaggctggggaggatggtcgttgccgtagggattcgctgatttgagaggtatgttctctgcgtattggtcgtgctcgtttattctccctccagcaacatatgcaccattatccgaaccgatggactgttggctgtaacgaaggctattaggatcgtgggggtcgtccgactggtagtaaggagcgttgttgtatgccactggactcgggctcggtcgtggtgatactctgttgaattgatctgaggtgtgatcgtgttgttcgtatgcaggagggctgttgtacgcgccgttgtagtagctttgagcggccatcttgagagaccgcggacgtgggcagcggcaagggatgagttggcgtctgcaaacaaagaaagtccgggaggcctgatgtatcagaaacaaagaccgaattacttcttcaagcagttcatcagacgcccggcggcttcgagtcacttgataaactgccaggggccggatggaataaacaacttccgcggttgaattggccctttaccggacaaacgcgaggcaccacacagaacgtggacgcaacgatgaacgcagatatgatttcaaataagcaaacgacaggcgggacgtcggagaattaagcgagagatgaaatggccaacaaagcactgaagcaaagaaaagaccggtggttgcgcgttaatgcgttaggcagtcgttttgcgggccactatttttggggtgccgatcgagcaagcttcgtcagcattttcgctggcttctgatcagccactaagaaatcgagttgaccagcgtttttgaaccagaactgtccagccgcgcctgaagtggattctgcagtcgtggagctgatggttttggcgatgaagcaggctgagcttgtcgtggctgatgatgtcctccctcgtctttaatttatttttatcggcgatgtggctgaggctcgaaaccatccacaccgcggcttggctagctacactactacagagtacagataactcgagactagctagcgactactgctgcatcggctgagtgttcatgttcgtatttaacattaagcattattagaccagtactcgacactcgactataacacctatgaccgtcgccccaaagaaggat

SEQ ID NO: 5334 - DNA, 4521 bp, Emericella nidulans
aaggaccaacccggggactgcggccccaatcccagaggatgcctcagtcacccgctttcttcagcttctggccctcactgggtctcgtgcccatcgagccagttacattattccctcttctctgccaagagaagcttgtcggccttgtccaggtcttgaatgctaaccgtgctgggcgcttccttcgtctcccgccttcatgtacggccaatgttgctcctttgggcaagtatctcctccgcggcgacgaggtgccttgcttatataccgatgggctggagtgacgagctgtctgaacggtttgccccctcttttctgacaggtgcattcctgatcttgctaatcatcacccagatggagtcccacggttccaccactctaccggcctctaacaccacagagggcaagcggctccgaagagcctgcaacggctgtcatcggatgaaattgcgttgttcagggacgaaaccctgcgcgcactgtcaggatacagggaacgactgtgcgtacgcgttcgtagcaaagctggggaaaccgcgggggagccgcaacaaaaagaccatcgagcgcgagagggagaggcagaggcaagtgagcgcagccgcctcagagcaaggtgagggcaatggtgaggccgagcccgatacgcggtcatcctcgccggcatcaaccccgccgccgccctcaaccgtacaaagaaagctcacagacagcggtaactacagtggtaattcgtgtgtatcaaattccgggcctgacacagtggacgggatggactggacggcgcttgtacatgccgccgtgacaacgccagcgtcactgccgatagacccagcgctgggctggatggacgagatggacgggctggatggggagagttgcttgcagagcacgatgtgcgatgtaagttaatgccttggccggagtgtagttgctagctgtgtgtccagaccaaggcgctgggactaacattctgtagctatcaggtccggagacgatggctcattccaaattgcttggtatgtcctcactcttcaagctttccagctgtcttggcgctgcttgatgctgattgcttcttttgtctcgcgggcagaggatctccagtcccactggccgatgccagtcagaattgaggagctagccctggagcagggctctactgcgtcagcaaatccagcaaaaccagccccagtggcagagagcccatcaggggcccaggagaagtccgacaatgagtactggacaggcattctgcgactgccttcggacactttttgagtctctctgcagtctccgcgccccaaacaccagaggccgcacccagatccagtctcctccaacaacaccacccccgggcccaagcggaaacaacgccttcctcctcacgtgaacgcgttcagtaccctgcaaaaagtgcaaaaatgccagcttccatcatgtcactcagactatgagacgaccgagctcgtcattctcacagtagaccacgtcttccgacgcttgcagcgcctcctctgcgagagaacaggcgcagaggcggggtttaccgacctgcaactgcatcttggcgggcagacagtatcggagtccgagccgctgtccctagtccgacaggcgctgctggggttggtgcgtgaacgggcgcagcaggccgtgcttgagacaaggcggcgtatgggaatgctaggcacgaatctgaatacgaacgccggtgccgatctagaggaggcgctgaatggtaacacggaaaaaatgtacgttgtgaaactgcgcatggctgggatgaggttggacacgatgttgcagcagattgagtggcgcttgcattagctagagtgagggttgcatgcagaatgcatataatatactatgatcttaatgcctcgtattcgcctttcctgccctactcgatccgcctggctcgctttcttgtctatttaaggatatactagggtaccctaaagccaggctaaatggacccctgcttgcccgctctcggggtatccatcacctcatcctaactctagggaagacgcacggggcttttacctggacacaacactctcatgagtttgaatttatattgagttatatatctgaaacaccgagtacagcagcacgagctaatcgccagcctacaaactctccggctacgaccttcaccatccccgtaccccccgatgcctgcgtctacctcaagaggtgaaattaccaacctactctccctcctttctcccccttgcctataacagaaactctagcccaaaccggtccacatactccgtcttatctacattgatcccaggcgcaataccactgtaatcactacatgtgactttgtaccggtcgaacaggttaaataccactgcgcggacctgcttatccgcaaaaaactggccaagacattttcgagcgccgaaccagaacatgctgagattccgatgtatctcggctggtgtcaatgtggtgaatctgctgggccggtaggaggtcgcgtcggggccccagaaggggttgcggacgttgatgccgtaggagtcggctattacgctagtctgccgagcacgtcagccgacctttaattgtatagagtatgtttctctgagagcaagggaacaacaggggaaagatataggatattaagaaaaggatagttgacgtacgcctttggggattaggtacccgcccagacctttgtcgacggatgccgcttcagggagggtaaatgctagtaaaccatgtcggttagtagagtagcttaatgaattcaatctggggatgtaaaaaataaagacgtaccgcaaacaggctgtaggcgcaccgcctccaaaagggcatagtgcagcagggtgtccttccgcccaagataccgggtaatggcactccgggttggcgtccaattcggcgactagattgtcttggaaggcctgattgtcggatattaagaatattgtcatgattagcgcgtgcgaggttggctctagattgaagacggtagactctgtcagggtttgcaggagctgcaccatcaccggttagttccattctactatgtcatgcgtcttctatacgctcatggccactacagaaattcgatagcagggatttggcaaaagatagggggttaggataatacctcatctttactcagattgcccacctcaacgtccctccacagcctggtgatcggtaggtcggtctggtcttttcgcgcctgtgaggtacgcatgagaaacgcctcccagcgggccagatacgcctttgcagactggtacttctcgcgcgagagcatccagtaacccagaccccacctaaacggcccttcagcaaagccgtgtcgacgattcccatgaaggcaagacagacatcccagagctctatcttctcctcgtcggtcagcggcccaaagaatatactcgtcgtttcgttcagtgtaaacggaaggaaagagcctgctgctttgatgatcatcgtttcttcattacttccaccatctacgcgggtggtggcgattgaagagacgaactcggcagcttcttgatgactacgcgagttatgcttcacggcaacgttattcgccagtagcggatcgaaggccttgcgattccgcttccagcgtgcccgttagtgaaaccgacgcatgcgcccaagagcttgttgacgacctagtttgaccggagcgcgagggttttcttgtgcgaggctgagtcagaatagaaggttgcgatgtcggcgggcgttgagataacgcttgatgtactgttgattgacattcctctatttccttagaaagaaactacgtatagggagggagacagacacttcgctatagaaccctgtccagatacggtagatatcgccatactccttccgccatttatggctaagtgcgcgagactcggcgaacatgtggcggaagttcccaaagggccagacgtagtctgggccggttagggatcttttgcggtcgacggcgcggtaccgcgccgtgagggcgagtataggctggataatggtttagcttccgtttgcttttctcctataggactgcacggtgtgctcgtaatcggactgagtgcttgggcggcttacattgagcgcattgctcatgatactagccctctgctttgctgatagaagggatcaagggaaggaggacggcgaccagccaggccagggcaagaatacgtggcggttgtggttggtcatggtggaatagttcctagaatcttgtattaaacggccccggcagcgactgaacaggagatgtgccgttcgagggccattgaggatcagcttcgatggggaactgaacagctgccatggcaggaacaatgagggtagggagaaccgacgttccagtagatatccaggagttttttttttctgatttgatgtatggtaggtgcagatatacaagacatgccccaccaggagatcgatcgggacagtgtgtgttgagatttgtctctattctgcttcggcccacataacgcaccgcatagagtccgacgaaat

SEQ ID NO: 5335 - DNA, 1096 bp, Emericella nidulans
agctgcttgtaggatacggatagaaggtggcgcgcagagcagagtatacagactttccatagcctggtgaacagagcggaagaccagcgctgctggaatagggatctgagcaccacgaagcttggtttgccggcgatccatgagtgatatcgagacgattgaccgcacaaggatcccatctgcaaccgagagcgctctgaacccatcgcgaccgagatgctctagaataacgaggaatgttggcccagagaggaacggaaaaatggcgtgccagttctcaaaatacggtctggtccattggactagagcttcgaatgtgggtagagacgcgttcgcctggaggtccaactcatgcggataccagaggtcggggtactgatggtgtagctggtcgtcttcaccgggcacttgcgcgtctttggaagtctgctgcggcttcttgagatgcgctgaccggcgggcaaaggcattgtagacgatacgaatgaagtggattccgctcgaggagcctaggaacgacgccgattcagagccattgtcagtaaacttccgcatcacccccagttcatgagctctgggagtgagcttctggcgtttgctgggagagccatgcctagaagtgccagagtccatggagtccatggaaaagagagagcgagcgcgcgagattcgatgacatggggcagcggttgaaggaatgaagataaagaggcagtgttcccttacctatttgtctcggcactagaggattttccaaccggccggttgatcgtctgcctgcaagttctccgcaatctcgactttgacagcaacaatcttcttggctttttggttctctatcagatcttgagtcaatgacggacaagcaaaatccgatcgcatgcgagccctgtcgccagaaaaagtgcaaggtatgctgcaagatcttcctgtttttccccctcgtttccccccattttttccatttttttttctttttctttttttccctttcttctaaatttccttcttttttgattgatactgacgcttctagtgcgaccgaatattgtatgaacatcgtacctgctatatattcaagatactaacaaccaag

SEQ ID NO: 5336 - DNA, 4361 bp, Emericella nidulans
catgtacgctctagatccttaatatcatggttgtctttgtgacgattcctttttcctttttggcattgtccatctgttgttgctgatccccccttcctttatatatgactacacatacggcggctgcgccatctcgggagtcgccttatacgagatcctcccggccggcaagaagaacagcgcaacgagtgcacctcctctcacttcgggatagtggtgcgttcctgccgccggcgaggtccacccggccgcctgccacccattcatccccttcaactcagctgtgcgatcgacctgcaccacgcaattgatctccccatacggatgcagatgatactgccctcgatactcgtcctgactctgcatgtagacggtcgtaatactgaaatagcgcgtacgctcgctgggatcgcagagtcggctgcgcctgtatctggggccgtctagctcgtcggtggcgacccagccttcgttgttgcgaagaccgctgaggatgagcgagcagaaggtgtcgtagtatttattgccggggccgtagtgttcattcagatattcctcaagggcgcgaccgggagttctacaatagagcaatgtatagcattagcaggctgtacgggtatacgggtgcacggctgcctgaagtatacgggttgtagcgaaaagaagtaaagacaggagaagagacgagagatgcacagacagatcggcgacttcggcaaagaactcctccgccaacgatatgagtttctcagcatttgggtggaccgttgccatcttggtctgtttgactttggtgttgctgaggttgatggtaacgttaactgatattgattattaagagtggtagaggaacgtctaaagaaccacaccacctgtccagaatgcggagacgggaaggaaatggatagagtacttcatccctgttcaagtgattggtgagtcactgggcccactatgaagcaacgtcttggctgctgtcagaggtctaagcccgtctacagtccatatggcgatgatctgctggtctttaatgcctcggcctggaatatcggctacagaagcctccaccaccggacatggtccgatgttgacaaatccaaatctactctatcggccgttgatctgttggtccaagtgcagcgggacgtagacgtggccacgaatagaagtctcgaaggagtggcacgaactttgcatgcttctcagtggatctggatggcatccaaccggccaataagcccaaccataccctatggagcacgcaagcttcccctcgccggcattttggtggcattgcggggtatcattccgctatctggggaagggtctgaagtcttctagggcaaaaaatgcggggttgaaggtcttctctttaagaatgccaacgctggcctcctgagtgtaattccagctagaacaccattctcacaagctacccatggctatccccgacgcagacctagaatacgaaaagcctagcgtgattgcgcttgagggcaatgaccatggcgggctcacgtctctcgatcaagtgttcccgccggacatgcagaagcgcgtcctgcgcaaaatggacctgcggctcatccctatgcttgctctgctttacctccttgccttcttagaccgtgggaatatcggcaatgcgaagattgaggggatgctggatgatctccatatgtcgggatccgaatataattggtgctgtaggtgcaaccgtcggaagttgccaattgatccgggctaataatttggtcatgcagtgacggtgttcttttttacttatgttgcctttgaactgccgagcaacctgttgttgaagaagttgaggccgtcgaggctcttgccgttgctcatggtggcctggggcattgtcatggtagggttcagtgactatccgaatcgggaccggagtgcttaaacagtcattagacgttgatgggaatcgtgcaagattaccatggactgttgatttcccggctgttcctcggtgttgctggtacgtagtccctaccccattcgacacatccctcttctcttcagcggtgctaatgcattgatttgcttgcttgttgcagaagccggcctctatcctggaatcgcctattatataaccctctggtatccgcgacaccttgcccaataccgtcaggccatgttcttcagcgccgccagtgttgccggagcgttctcagggattctagcttgggcgatagccgtacgctccctccttacctcctcttcccctttctgtttgatgattggcctgcgcttactagatgtggcatcactagaaaatggacggagtcggtaactacgccggatggtggtggatcttcatcctcgggggatcctgacggtcctcgttggcatcatcgcaccgtttgccatgtacgatttccccgagacagcgacattcttgaccgaggaggagcgaaaatatgttatccatgcgctgcggacccagaattctggacaggataccctgagcgcaggtggagacgcagtcgaagaacaggcgaagttccgcccaagatacgtccttgatgctttgaccgattggcagatctacgtcggtctattcagtacgtcccttcccatgtaatccgtttccccttccctctgccgctgctaaagggaactgcagtgtactggggtatcacttgccctctctacggaatctccttcttcctcccctccatcatccgcgacctggggtatacctcttccacagcgcagctgctcaccgtgcccatctatattaccgccgcagccgttgccgtcgccggtgcgtggttgtcggatcggtataagaagcgctcgccgtttatattgttcttcatgagtctgatcgccattgggttggtgatggcccatgccccctcggaccgtggcgtaccgggctggatgtattatggggtcttattgcggtgggtcggtaagagctcacctcacctttatcgcgcttattgtgagcttcaactaatgtttgcctggttttagggatctatccagcctttcctggaaatgtcacgtggatcagcgtcaacttggcaggcgactacaagcgcgctgccgggatggctatacatatcgggctgggaaatatggctggaggtacgctcctacaatccctttttggtttattatcgactaatgagtgcagcaatggcctctaacttctatcgtgaacaagatgcgccaaagtataccctcggacacgctctcgagcttggcttctgtgttgtgggattactcgccgtgcttattctgcgcttctcgtacaaacggatcaataagaagagagaggcgatggatcaatcgcaatgggatagctatgaaatggcgaagatgggagatcggtcgccgatgtttaggtatatgctgtgatgcctgatagggacgcgagatgtcataattatatgtactggaggattatatatctgatcagtagcactagacgtaggatatagagcagtcagagccacaatgcaaagccaccagaagccgcaaactagagcagcccgtgatcctccttcaccaaatccgcacccttctccgcaaccgcatagacactactcattatattaccagacacattgttgggaaacacgcttgcatctacaacgcgaagaccctctactcctttaactcgcaacctggagtccagcgcatcccccatcgcgaccgagccgcatatatggtactcaccgatcacggtgtcgtggatggcacgcttcgcctgttcggaatcttgcaggtcaagcgacgatttgggcaagatgcggcgggagactgaggatgcaaaaggtgcagcgtgtccaactctgtctatccaactaaggaacgcagccaggagtgcgacgtctgcggagtggctgatgtagtttggttggatagtgggcgggaccgagggatctgcaatggtgaggtttagcagcagatctaggacaagggagcccggccgctgtgagaaaaggaaatatgagatgaacataccgttgctattgatatggatagatccccgtgaaaccgggtactgcagacacggcgcggccgagacacaaaccggctctcctactggcggcggcgtgaacaggccacgctggtgctcaacaccattctcatggacactgcatggaaggaagacaacctgcaagttcgctgaggtctcgctttctagatgagcgatgacttgctgcagctgcttttcatggaaggcactactcggcttgatatcacggatactctgcacgatctcggcgagctcggcgtctgagaggatactcttgacggggatgaaaccctgtgtgctcccaattgagctcaatgacctgtgcgggaatctgcgtattgatgca

SEQ ID NO: 5337 - DNA, 2101 bp, Emericella nidulans
ggttcagaggggaatggggcaaagaagaagatgcaaacgactgttgataacccagaagatgggagggagagacaggcagtggactgtaatgagctggaggaggggaaaacaaccaggctgcgcttatcgaggctgtttatgtgattggcccagtcgtggatttgggacgctgggaagtggctggtggtggagcgctgggtcagcgtcattggccgatcgtttgttcctgcatcgaccatcctggccaggccccaccttgcacaactcgcaaatcacgataccgtgaattacgcgaaattacacgcatacagctgtgcaacatcaaaatgactggggatactagcaaagcgatgcgagacaggatagagcactggtttgatagaatggaaatcatggaaaatagaattaaacgcaaaaaagagtggaatatgaattctgctgcctgagtaaaaatagatcgaccgaaatcaaggaatctggaagcctgacaatgatgatctcacttcccgaaactgcccgcattagcctgaaacataagtaagcgcctaagccctgtcactcccaacgccgactcgcccaagtggagttctagatgcatgacgacagtggagatcgttgcttttacccttaggtgcattcggccggagccatgctgaaacggcgatctgatgacgctgtagtccgttgcgttgttcgtatacaccgtacgttgatgccgtaatcatatactttgcgcagacacatgtctcaaaaacatgacaaacgctttcaacgaaagatatgttagttacagtattgcgtacgcagtcttcgaataggtgagtcagagagtttgaagtacgcctcatcttagccctgcaatttgtcgagaatatcaatttatcctcttaagattcaggctgcgcctgaaacgacccactctaacaacgaaccgggactccacaattcctataagatgtctttgacttactctggtggacatcggacaatgcacaagagatgccctatgggcctccagagcagcaggtccttgctgattctcaggtacaatacgtaaatctgcttcctcttgtgtcttcattcaatagccgtaacatgagttctgcctcatctttcagtacagtcttcactgttcggtaattcagtcattgtgagtcaaaagcgtaccgtaggacttaggatccgggagatatttgggatttaactggaacgcagactgcaacccagctactaaggcttgtcaagcaagaagacggcactgttaatctcaaagcactaatctcagcgtttggtataaccctttgttgcccagaaggggtacggtatcatcgcccagcgactttcccatcctccccaattgtcgtaatctctacctcactagcccgaacctcaacctcgcccttctcagggacttcaacattaatctggtctgaagaaccttcaaggacagaatcatagaatcccgtcgtcagatccatctggcagggcctcacgtaccgggctcccttatagaaccgccagaagaggaagttgcccacgtagacgacgatcccgacataccgaagcacaaactggtctgctttgaattgtgggatgaatgcgtcataacctgttttttatgagtaaagaggatttggaggctgggatttgcaattgtttgcctaccagagaagacgatacagagaacagtaatgaacattgagtagtaagctccataaggctgcaggacagcgcaataagacctctctttcaagctgatttcctgtctctttataccacgtctgaagttgagatacgaaagcaggatactgagccagttaagcagcgcaaagatcgtcgccaggctgacgaagtattcaaagatcgttgatgcagatttagcggcgttcatgtaccccagaacacagaaaagcgcagcaaaacacacactccatgctggaacgccatttttcaatgtttttgccaaaagcttcggcgcctgtccgtctttggctagaccatagagcgagcgggacgaacagtaaatatctgaagcggccgaactgacgacgaaaacgagtaagccagcattgacgatatcggggaggaccttgattcccgc

SEQ ID NO: 5338 - DNA, 3946 bp, Emericella nidulans
tcgactaactgccctcaagtgaaatacttccttctctcagcgccagtggactggcagttttaccagctcatccgaagatttcttctcccgactggtgattatatctcatgtgtactttggttagtactctatttgaacatatatcactggaaatcctattaaccactctacaataggagcaacctgttccacatctcaggtaccgatatcgatcggtgcctggcattcagattccaagcctttggccgtcctgtcaagaattctaaaaaattcgaggagggcatcttttctgatttgcgaaacctgaaagctgggaccgatgctacgctcgaagaaccgaaaagcccgttccttgattttctttacaagaacaattgcatccgaactcagaagaagcagaaggtcttctattggtatagtgtgcctcatgacaggctgtttctcgatgcgttggagcgagatctaaaaagggagaagatgggccaggaggccaccacagtcgcagtcagcgaacctgctttgtcttttgagtttgattcgtcccagtcgttgtacgagcaactcacaaaggcacaacaagcgaattcatcctcgtttgctgcacacgcaagtacgacatatggccaatctgcatccccagtcgttcggaccgttgacgcaatgcctcctcctcagatggctccccagatggctccgccgtcgatcccccttctcacggacgaatcggccaattcccagatgtacacatcgatcccaatgcccaacccgattcctcagaaccttattaaacgcgaggcggattatggggctatccagtgcgaccgaaacggtatgcccattgctcgcatccaccagcgccattcttcaatgccgaccttcgtcgagtactcgccggcgccgtctttcgtctcttcccaatacgaagattacagcaaccgcggcttatccttcgagcctgttacaccaccgcaacatagctctcatattggaccagaacctgcttacattgccaacgaagatacgggcttgtacactgcaattccggagatgtctactgggtctgggttcaaccccatgatgcacctaccgccgtctaacctcgcaagcgcgcattttcctaccccagcgagaactttccattccaatgtttattcggtcttagaaggatcccctacatataagcaacgccggcgtcgatcgtccatcccgcccggcgctgccaaccctgtcactactggcactcactcgcctgctcctgctctatcatacgcggctcataagcccagtgatttgcgacgctccgtttccagctcggttgcccccggggatacggatgactcacgtcatgagtcgttgcatcgctctgttaatagtacctatactgcaactcttcctcagaagaacctgatgcatgaaatgtcgcgtaacggcacacccctttccagtgtgggtgaacaccgcgagcaaagctccataccccttacgcaagcggaagatttgccagctcttccagcaaatggaaccgtggaatcaggtgctcccaacggtgtcggacataagagcgaccgttatgcaactggacctgtccgccgcgcccgaagtgctaccatgatggaacttggcccttacccgcagaagtctcattcttgccccatcccttcgtgcgggcgactcttcaagagattagaacatttgaaacggtgagttattgcctcgctatcctactggtttacattgcccacaacatatgcatgttgtcttgtcataatttctctagccgcccgctgatttttagcttctaggcatgtgaggactcacactcaggagcgaccatatccttgcccctattgcaacaaggctttttcgaggtctgataacttggctcagtaagtcaccatccgtcttgatgtcggattcagtcttcttacaatacattatagacatctccgcattcacgaggctcagcaagacgggcagcctctggtccacgagggcgatttggaaaatgatgacaacgagtctgtttctcatgacgaggatgagtctccgtctgaatctgttcaccctgctgttccgggtgttcacggaatgacctctatgccatcatccgtcgctctgcaatccacaatggggtcaatgatggggtcccacatgattgcaccccaactcctgcaacagcaaatatagtggagttgtgatattcgcacgccgtggctgattttccagtgttctaataagggtttgttacattatatggtacctaatttttgcggttctcctaagggtttcatgtcgtgtcgggtgttttgttgcaacatactatcaacggccgggcagctatcgcagccttgcgtcggcgccactgccacttcaccctcagtctgtggttcttggtgcagacccggtattgtttctatgggttctatatttgggttgtgacatgtgcattggcccatgtcataaggttttacgcttggtctttgtgttccttgtgtacgtttttgtttttacctgctttttgtctcccagttcgtttgttcaagggtccccagaagtctcgggttggcttgcattgaacaggacatggagggaacaagagcagaagacaccacgacatgcaggctttgataagcaaacaatcagcttgctggcgaccatgagactattgaaagacttttcgggccagagaagcctggggcttctcgctgaatgctggttttgttttgcgcttgatagacatttctccgatttacgaagttttcatgtgtgaaaggcgggattgacctggtcgtgtatatacatagtaacaaatcaagttatagattggtataatttgttccgtgccattaagagcgaaatcatttccaataaaatacgagatcctttgtggatgctgaggagggtcacgctggcttcaaggttcatgtcacgtgtatgacgtttgtcagaagacatcatcgctgggcttcattgtctttcgaccagcaccgcttctgtccgatgctgtggcctgctcaaattcaaccagattatctccgttattggcttttgtttagactgaaaaatcatagattcgagcacatctatgcttgctcaatatacattcctttgattagcttccagccctcacgctacgcgctccacctggactagagagaactaagtttcatgcattagcttgcatttctcgacttcggcctttggtatacggtctttgaatcccagtttatcattagtcttgccacaagttgacaaagggtctttcgtcgagtatggcagcgactgaccgagctgtcaacgagacatcccctttggtgggagcacgaacaacggacgatgctgacgtggactcgatgaccttcgtgaacggctcaggcaatgaggcgcctcacgatatgccagagacaaagaccagctggtatctgtttatcttaaccctgagtattggcgggtacgcaatccatctccatcttgacggtggcaaataatcctatgtgactattgacccatgcagcggccagagctgatgtgatattctaggctacaagttgtgtggtcagtcgagctgtcgagtggctcggtaagtgcgatggccaacgtcgtttggggggtagctgctgacctacgatgtagccctaccttctatcactgggtatgagcaaagctcttcttgcctttgtatggattgcaggtccaataactgggaccttggtgcagccctacattgggattcgcagtgacaactgtcgcatatcttggggtaaaagaaagccctttatgatagttggaggcgcagttacgattgcgactcttctcggtcttgcttgggttaaagagtttgtaggagggtttctcgtgctttttgggggagatcccaagtcagagggggctaatatagtaatcgggattgtggccacatgatgatgtggtgtttagattacgcaat

SEQ ID NO: 5339 - DNA, 1300 bp, Emericella nidulans
ctgctacccaccactctcttccgagctgggctcgcgtcgttccgataaatgctgcattatcggcagggagtgaagatagcaatggccaacgcttatttgacattcgcagctaagtctccaactattctacctaagattctagggctttcaggcgggttggagccggattgcttgcggggaaaccatcctgctgcgggggatctccgtgccagccacaaaagccaacccagcacttacactattgggcactcttttcctctttaagaacgtcgcaaactagtaagtctgggtcgtctgtaaaaagggtttgctttctaactggaaccgtcttaggcgcaaaagtacgcttccgaaactcgacgttttgggataggatctgtgcttgaggacactacatatacactctgcttccgatacgtacccgattttgagagaacaaggtttgattgaatgacggactcttcgtctggtaatcggatgcagattcctgctcaatgtcttctaggaggcgggttggggccctcgtcgaatcactttgtttgtggttgtaagctgggttccgatgtgttcgaatccgatatccggggagtatggagccattagaagtggagcatctccgcataatggggatatcttgtgatggttgatattggttgataccagtagtgcttattgcggtgtagagcggtgttgaattgtatggagtggtgaggatgcgggaaccagtgcccctatcttcattcatgttcatattcataaccacctggacaaacaccccaacgccttgatgccggagatgagtgtgagtgcatgcatctaatctatcgtctcatgaagaaccctcaaagacacgaaaatccggaatggtatcaaatatgacaagcaaagaaaccacaatgccaaaagcgaggacttgacgtcaaattactgtgtcgtacactgtgccccttcgccctcctcatcgtcatcctcccacgcgtctccaccagacggatccttcgagccaaattcctctacgtttcctttagggtcgtactcgacttcatcgacggtgtctgcctggatctgtggaccaggcttgggaagcatctctttcagccgttccagaacagcaggcgagggcttccaattctcatcagggaatttaacgtttacaattaagtagaggtcgccgcgggcgtcggagcgcttgatcggcattcctcgccggggactttgaggacttggccgggcgacaaaatctggctgtggccgggtttcgggtgtgcaagttcgatgccgcggccgtcaaggtgtttga

SEQ ID NO: 5340 - DNA, 2066 bp, Emericella nidulans
atcgcctggtctggtaggatcgcgggcgggaccaactccagcaattcactaagacaactcatgacaattttgttcgtctgccacttcagaagctcttgggggggatcagaatcgcccgcgccatcttcttgaccagcacctgcgatcgcagacgcaaatcctgcgacttcatcatctggtagatcagtggctgtcggctttaaagcggatataggcggtaaatcctcgactttcaggcgcgtctttgtaagggtgtcatggcagcgttgtatccaaagtccagtctcagtaagagcggtctgctgcagccaatcgcggatcatacccttcaaaataggattatcggggttgttgtcaaatgcgagccaaatctccttctccaaagcaggcgtcgctgctttgatgacggcaggtgcgtctcgctacatgagatttgttaggccttgtatagccacatctctcattaaaggatcttgagcagaaagctcgttctgcaagcgcttcacgtatccggaaaaatcaacgtattctggggcatataaggacaggtgatcaaggcacctggaactttcagtcacaagcgcggggttttcctctagctggaactgccgtagaagtgtgagaatcagatttcgtgttttggcaatgtcctgcaggtcaggacccaaaacattgattaaagagtcaatgcaacgactgatcaccacgggtgtaaggaacgacatttcgatgttggatgtcgcgagggactcagcctcctcgttatgagaatcagcattgtacagctgagccagcattccgagggtgctcgagacaaaaggagaaaaagttaagcccgcagagttggctactttttcaagaccaccaagagcccagaaatggacaaccgggtgagggtcattaccgagtgacatcaaaaccccaacaatggtcttcagatgcagaccggctgccatgccaccaatctgagaatggatacagcccaaggcagccgcacagccagcacgcgcatttggttctctattcgcaacgatagtgtccaccacccagttgatctgggtattggtgaaggtatttcctgagctctcgcatagccgtccaagtgcttctacgccaaccgtccgcacaattgggtcgggatcaaggacgaatttctaacatagttagtcgtgacctcgtagggtattgggatcatcctagagctcgtacctgaataagctcctgcataaccttctcagtggtagggctaagcttccttgcggctgaactggtctccttcatagcgacctttagggcatgaagtaatgccacagatatgttgacgaccatagccgctttgcgcccagggttccgctgcaggccggttgaagaaagaaatgtcgcaatctgctcgacgctactttcttggaccttgggtgcgtgcagcgcgagcgctactgaaaacagttcaatagcagcattcactactcctgtcgggtgtgggtcggcagaaagacggtctccttgtcttgcagagtaaagcaggattggatcatgctcgctggcttcgcagatagggaatatcaactgcaattgtcagtaactgattacaaagagaacgaaggtactcacagcatcatccacgacctggtctgttgattcgaccgccgaccaagctgggccgctttcaccctcatgctttccagagagagttacacgcacatagtctcttgccaggccgttaccccgaacccatagttatcactcaactcccaaaggttttcaaactgtgccgttgacgctgcgatcgaactctcgagaggactcgattgggtggcgtcagggtcagcaaaagaggaaatcgccaagctgagtagactcgactgggagatcacatctgcgtggctgagtggatgggcatgaaggagtttcgcaaagcactgtaggacacgtcgtctgaccatagtttcaatatcatgtaattgcagtgatgggtgaagacgctgcgatatgtccaccaccgacttctgtggcggaatctcgtcgatgaattcaacagtgttttgtagcatagttgcaatccttct

SEQ ID NO: 5341 - DNA, 1495 bp, Emericella nidulans
atgacacggtccacagtggggaaggccgccgggaagcggactgcccactgttggccgatcagtcacttatcaagttaagcgatcttggggccatggacggctaaacgggtgaaaaaaatacgcttttgggacgaataggtctcgatgctcaggccaatgctctggacgcccgagtgagagagatggtcaggacaagctcttcgccaccagttactccagccgttcatctcttttgcccttgctttgtccagggggatccggttggcgcctttcatggtacggccatggttgagccgaagtttggtcctgccgggcgttgtaggatccgcggttggcgagtcatggcgatcggataattcaatgctggctggctggatcggaacgaaatgcggccggggcaattctggctagggagcgtcaacggtagctcaacggtaggtctaggtcgcgcggaatcgtggctatatgcagtgcggaacggccaacgctcgctgggccgtgaaactgccccgatacagcaggtgcagcagatgcagcagatgctgggagctcagtcgacgctgccaacctacccttaatctgccagtggtgtctacccgcccagcccattttcagacctcagcactgcgtcctggcggacctgaatctggggatgtttttccgggcaggcgaggaatccggggatggggctgatcagcaccggggactgggcggttgggtccggtcagtactttgtctgttcattgctttgaagagtcagtggacgggaatactctggagcaaaagaggcggatgttaaggggccacccacctgattgagtgatcgatcgtagagctgcctggcctggatgatatacctgggcaggtctttggtactactaaggagcagcggaacaagtccgatagaggccagagagaccggctggacctgctctggctgcagtgctttatcattatcctagtatccattatcaattatcgcatgtggggttcgtcggccttctcctcttctgctatgattacaattccaattctagttccattcccatttcaattatatttcccaatcgactgccttgtgtgggagttgtgtccatccccccctccctcccccccttcgtgtcaataacttcacttctactccaagtggagcgatcttccctactccaagtcgaatcattcaaaggcagccatgtccctgatgctctcgcagtcgcctgtaacgcatgcctcacctgcgcagcactcgcgccggctgagcgtcggagccgcagcgaagacgcgaacatgcgtccactgcggccgcagctttcgacgcaccgagcatctcgagcgtcatgttcgcactcgtgcgtctctgctttcttaatctctctacagagaaatccactgactattttaccagacacaaaggaaaaaccgtacacttgcttgtgcggccggcgttctctcgccgcgatctgctcaagaggcatatgggcatcaccggccatga

SEQ ID NO: 5342 - DNA, 2343 bp, Emericella nidulans
gctggttatttgcaatcatcgaggatcggtctggccgatgtttgtacgtaggtcggactcgatggtctagagcgacggaggctcttttcttgcattgcggagggttgggaacgtgaggataggtgttctggtagagatctaacaggacatgatggagagaggaagacaacgcaggtgtttgcggcgaggttgaattatcggcttgcatgaggtcgaggacgaatgggatgattaataggctgtttaaatgaaaacaaagtcacgcatcgagcatattacgccgtaggtactcgatagataacggtggaactccggcgacgtcaaaactaacaaatcgcttcgagtctttgaacaaaatccactaatgccgggtcactcccgggtccgccgcattttaccttgagtcgtgttgttcccaattggccgaggtgggtttctggagggagctcctgctgcacgtgctcgaatgtagcgagggaaagcgtccagctgcttcactagagcgcgcctgcctttttagaccaacgagctatctttggagctatttttgctatgtttcccctccatcgcgataactgaagaattttctttgatcttggattgatctacgattttcgaattctgacaacacactttattgggggatcactcatttgcctcctaggtgaccgaccgttaactactcaagcttgatcatacggactacgggtctcccccacttaaaacggcccgttctagagcaattgggctacgatgcgttacgggaagaccttgcgaaactcgatatatccaccatggagtaagagctacatcgactacaacaagttgaagaggctgctccgggaacgtgatgtcatcggcgacgacagtgataccgacgccacatggactgagcaggatgaagaagcatttgtccaggaacttctgaatgtgcaactagataaggtcaatgccttccaggtgcagacctctcaacaactgagggaacgcacctctgcgtgcgaggacaagctccgacctttggctcaaaccgaaggagatactccggctgttgcagaagaagataggatcaggatcgcctctgaggtgcttgcagaattggacagcatcaccaaggaggtcagtgagctggagaaatatagccgtatcaacttcacgggcttcctcaaagccgccaaaaaacatgaccggaaacggggtgctcggtatcgtgtgaagcctttactacaagtccgcttgtcgcaactacccttcaattcggaagactattcacccctcgttcgcaggctctcggtggtctattctttcgttcgagagatcctgagcacgaaatctccggagccagagcctggatttggccaggataattactcctcttacaagttctgggttcacccagacaacatgttggaagtgaaaaccctgattctacgcaagctgccggttcttatctacaaccccaagtcttcaaaggagctcgagactcacgccaacgaccctaccattacgtcgttatattttgacaaccctcaattcgatctctacacgcaaaaagttgcccgcagccctgaagctggttcgctacgactacgatggaccggaaacctcatcgagaagccgccgatttacttggagaagaagattgtgacgagtgacaacttcagcaacgaggtgaaggttcagttgaagcagaagcatgtcaaggagtttcttgatggtgaatatcatttagaaaagcaggttcatcggatggaagatatgggaaatggagagatggaacatgcagaatctctaaaacgggatgtggaagcattgcaatccttcatcaaggaaaacaacctccagcctatgcttcgcgccaactacacccgaacagctttccaaatcccgggcgacgataggattcgtatctcacttgacacgaatttggctctcattagagaagactctctcgacaaggagcgcccctgccgtgatgagaatgaatggcaccgtaccgacatagataatgctgccatggaatatccctttcccgccattaggaatggtgagatagtgcgatttccttacggcctgttggagataaagctgcgtggaagtgccgcgcataattcggaatgggtgaaggacttgatggtgtcacatcttgtcaaggaagccccgcggttctcgaaatttgtccatggtgtcgcgcagcttttcgaagaccatgtgaatagcttccctttctggctctctgaacttgacaatgacattcgacgtgaccctgaaaccgcattccatgaagagcaggaacgccaggcaaagaacgccgaggaagacttggcggttggaagcttcctc

SEQ ID NO: 5343 - DNA, 1813 bp, Emericella nidulans
cgcttgtcctcagctcagcacctgtcgtctggtctcggtacggtttatcatcatcctcatcactgaataggggttcctcttcgctttctccagcgaaggcgttgtagagttcaccaccacggcgacgggacgacccattcatggccttcgcctcatcctcgtcctcgatcatttcgaagtcgtaatcgtcacggtcgttgcgaagacgtctacgtcgctggacgtggaagtaaattccaagcccaatgcagaagacgatgatcgaactaatcgcagcgtagatccagacttgcgtgtgcttggaggcaccaaaggttgggaagaaagagggaaggaagctgtccgaggccggggtcggggtgggcgttggggtttcagtttcggaagcagagcctgtccaagtaagctcgaccttcacaggacgatcaacggtatgtgagggtttaactggagcttctgtggcggtgggtgctggctgaacgctagtggtaacaacaatagcatcctcaatgctatgatcatcgtcatgttcgtccggtagagggtgcaacttttgcttggcaccatcaacggccataccccagagattgagtcgccaatcgatgaattctccgacgttgtcattgacagtagagtctttaacaataacggtccatgtgccaacgccagattcacccctggttatgagttaatgagaattaggtgctgcgtgtgagaaggtacataccagtgagcaactgtcatgaacgtccagtcaatgtatccgacctctgcgttatcattctttcttggtgtgctgaggtggctgactatgccttcagggctgcgcagttccacgctcaaatcaccacggcgtgtgtgattcacgttcatggtcacggtgacgtgctcgagtttctcgagattggcatctttcatcatctgctcggtcacttcccaggacgcagcgacacctttgtcgccctgcggaacctcgtgctgtactctcaaccacggtgagtgataccacgcttgcggtttcaccagctcccaggtcttggctttttgcacgagactatatacatcgattttgccatatccccaatcgtggctgaattttcttccggacttggtgacttgccagcttccatcatcctcgtggactggaactgcagtctcgagtacaatgtactgggcgtcgcgccacgtgagttcgggacgaacactcaaagcaagagatatggcgcctccaaccaacggccagcggcagatgtacccccgtggacggagtagcaccggtctgtaccaacatcagtggtggagattgcatccgaaattccactactgtaagcaaccacaagctgggcggagcaggactctgaatattggggatgctgtccctctcggtcaatcgctcccactgtgatgctgtaaatgctattggtatagccgtcaaagttgcagttgtcaccagaagctgccccattgccagctgcaaagacaaaaatcgaaccttttccatcacgacccttctggacaccattgacaattgcccgactgacgaggataccgggagcatccatcgtagcgccgtcgtcaggaggaccccaagagcacgagtaaatatcgttttcctgataagcatagttgatggcgctagcctcgtcggtgtcgtcaataggtccggacaagattcggattccagcaatccgactgtcataggcaacacccacgccacagacatcgtttctcgcggcgacaacttctcccgcgcatctggtaccgtgccgatcatcgcgaagtcgtggcctaggctccgcggtgtggtctgaga

SEQ ID NO: 5344 - DNA, 4704 bp, Emericella nidulans
tcgtcttctggaccatggacacccaggccgtgtcgtagactgccgcggacataaagcccagctctccatcttttgtccggagctgttggaccagctgggaggcttgcgtgcatagatctgtcacgtctgcgcaagtcatggttcgtctgactgcgaggagaagctgagcatgtagactgaacgatagagagggagttccaggtatttgatgtcagccagagtcaacctggacattgttcaagaggcactccagactgactattgcggtcggtgacggagtgaacgggcacggagggatcatctttcgccccgggggagcagtccttaaaatagcctgggcactggcttatgtctctaggagcaatgcctgcagcctcaagattgtgttcgagtcatggaagtttgtctatggattagacggactgacaggcctaccacccggcgaactacatgggggctgcatatatgctcaatccggcggtaacagtcaccgagataatcaattgcttatggattgtctgcccaagggaactagagctctctggagagcatggaatcgtctacggcaagcaatatcatgagctgtaattcattgtcaatccatgttcggatgacctagcttcaccatcttgtctaccttagacccatcaattgcttaaagctttcgagctagcagtcggaaggccagatatgggccgcaagatttccctgggatattccctgacgcacagagtcgacacaatgagtcgtaggagctgatatacacaaaattgattgcatttctcgctaatcagtgttctagagacctgaacttccttagagaaatgtaccgccctatagggtttcgcgtataatcccggcggtcgggggactgatcttcggggtcggaatgatccatcgctccgatgcatgagttcccaatgaagtacttgaatatttccttgtcccgtgatatagcatctgaacattttaattttctagtactctcaatgcaccccggaatcccacgcgtcacccagctatgaccgcggatacgcttgtcgacgcaccggctctgccgcatcagaatggcagtacagaagagaaactgaaggagcgcggaagctttggaaagctctacacgtacaaggtcagcaccgttttcatgttatccctatgagtcggaaagcccagcatatggtcgcagggctaactggcaacagcggagcccccgagccctaggcatccaagctgtcgcaaaatccatcggcttggagctggagcaagtcgagctgcagccggccaacggcgtcccagacttctactggaacctgaacccgctgggcaagaccccgacgtttgtcggcgcagacggcctggtgctgacggagtgtatggcgattgccctgcacggtgcgttcccccctcgacttacgatgatacgcttgcttttgtgctgaataacactcacaagagcagtgaccaacgaagactcgacgaccacgctcctgggcagcagctcgctcgacttcgtccagatcatccgctggatctcgttcaccaacacggatgtcgtcacccgcatggcgtcctgggtccggccgttgatcggctacacgccgtacagcaaggaggaggtgctcaaggcgcagcagcagacgacgcaggccatcggcgtcttcgaggacagcttgcgcgaccgcaagtatctcgtgggcgaccgcctgacgctggctgatatcatgtgtgtcagcttggtgtcgtttgggttcgcgcagatcttcgataaggagtggagggaggcctttccatacttttcgggctggtacatgatggttatgcatttacccatcatgaaggcagtggtggaggaggtgccgtttgtcgaggagggcttgccgaatgcaccgcccacggagccgttcagggcgccttagaacagtaatactgcgatctatatatgggtagaataattgtggaagatctggattaatcagataggcggatctgttccgcagtatacagtatttagtcgagcaactacttggtctctgggatgtatagaagatcaggtcaaatcttcgttgcttgctctataaagtactagtacattccacccacccatacaaagcgacgaaaacaacaattgcttattattcatcctatcgatgaactgcctggtccataaggctctcagtatgatcccaaaccaactgaggtatcttctgctcccgatactgcgccagaatcttggtgctcggcctaacatcccccttccaattcaacaggtaggcgccactccccggttccccagtaatgcctttagcgacctcgccagcctccagcggaacaccctggggcacaatgccctgctttgctgggtagtgtgccgagctcagatggaaaagatgtcgctcgccactctcgccgagatccacggaaaacggcttcatgaacggccacacgaggtaattgtagaaggtcgaaaccggagctactaatcttgtggcttatatacgtcctgtcttgctgcacaagaacgttttgggaaaactaactccggttcgctacacgaattcattcagtatataccacagcgtgtatttattagcatttctgactaagagtcagatgtactgagggaaattatgctactgaaaatccaccgccgcaatccgtccaggggatcggaggatcgcagggggatccgaccacattcggcaggttgggatcggcaccataggggaggattcgagacagggccgaaacggtagtgttagctagctgattacgcctctaggctaaatctgacaattgggatatcctatcatccacgcatagtagaacgtggcagaacgtggcaccgctgcacgccgtgggatcgcctactcaaccctatcaattcactcctagtgaagaatgatgcgttccgaatgctgtatctctattttatacggctgtaagctaggaatgtgaatgaatcagtggctattagccataacatttccatgctcgtagtcgccgtgctgggccctttcgccgtagtagtgtgcaatgcagtcttctacagtagcattgggcagcagaaacagctccaaccggatcaagtgtcccgagtaagtccccggtaaacataggcataagtactgcgcttgtatctagaaaatagtccatgatccgatatggtcggaaagatatgtagtgtttaggacaggcccttagagatacataaagtcaagaagaaacaatgtcattatctcatcaaatgcgcaggactgtcatattcagtctgataaacctcaatggcatgcctgaaggctgctcaacattgcatccaaaagagcctccatgaaagggttcggagtcttgaactcccgaagcagactgcgagccttcctgtccagcccgtaaagcacctctcgcgtgtaatctaaactgccagcattgtccagtatgcagactgcttcttgcttgatcttcatgtcatccgttttgagcctcaacatatggagcagagcagttctgttcttggccccttctccgattgcatggcaaatggggaacgagaatttgccctccgtcaggtcttcgaagaaccctttctgggcggccatctagtgcgaagtagtcagtcttctttagttctcgatctggttcgacgaagacgaaccttctcttctctgatattcttgtagtcgtcgaggatctgaaagtaaagcccaagaacatccaccaactgctcgacgtcaatgacctgtctgctgcttgtctggagcagccgcactatcatccgaaacagtccacctgtcttgttagcgatcatctgcagatagtcatccatggacggaggcagcaggttatcccgccagaatagctccatgccttgaccgcggtgcaaattgaccatttcttcgttgaataccgaaattgcctggggccacgtccgcagtctaaacagctggttttgcgccagaaagtagacatagttggcggagttaatggtctgggcgatgccaaacacttcatgtgcgcatggaacacctcttcggagcttggaactgtcttgaatatcgtcgatgctgtggagtgcttattagctcgtgaaaacgcgattgagccagagactggatgcaacatacagcagggatgcattgtgtgccataccaacagtggttgcaatagcctggcacgactgttcgtcaactttgtaccagtggttgaaggcctccaagagctttcggcggatctctttgcctgggatcccagcgatgtagtcatacggctctctaatcacctgtggagtaaaagagataaggtcaactctcatggctgatgagtgaaccaggccctaccgtttcattcgccgccttccagtacatcgacaacttctcgtcgatcgtatctgggtcgtcatggaatacatttggcgaattgttcacatctgacatccgggcgtcgtcgaggctgatattggaggaggcgctggagtcgtgagaaccgtggctgctgtggcttccacgcggcgaaaagtacccagtctggatttctttttcaggcgttacaaggtcgtgctctttgtactgcgacgggtctttttcagttctgggaaaggctgtttccttgtatttggacagtggcttcagggcagaatcaagtgcgggcgacatgtttgtcaatgtgagttgattaaattgcgaggccttttgctactgtttatcttttcct

SEQ ID NO: 5345 - DNA, 6653 bp, Emericella nidulans
gtcgttggccattaaacgtggctgctgttacatgatatcgcacgtccggaaagcagccgggcttgctgtcccgaagtgctataggctggatcccagcacccagccgcaactgattgggtacatcgaaacacttctgggcgatacccagtattttgttgctggtcctgcggttgctgcgtttcttgaggtttgcccggataggatcgatttgatccataagcattaccggagcttagtcaagaaactcgtggacatggatgaatggggccaattggcgactttgcgtcttctgactttctacgctcggaaatgcttccctctgaagacacgaaaagtgcagaagaatcccactaagtcaaaaggattctatgacgatgacgatggggaagctaacgagggcgagggggaaacgtatgatgtcccagttctggacccagatcttgagctctttttacgatcttgcaggctacttttgcagagtcgtaatgccgcagttatcgtcgctgtcgttcgatgttacttttaccttgctccgacggaatatcttggtgctgccgttggtcctttggtcgctttgcttcgaagcccccaagacatgcagcacatagcgttgtacaatattgttgtcgtcgctctacgatatccgaaaccgtttacgaaatatgtgtcgcatttcttggtgcacgcgtcagacccacctcacatctggcgtctgaagcttgaagcacttacgatactctttccccactgcggtaatcactttaaaaacttgatcatcagcgagctcgaacattttgctcagggcgctgatcccgacttagtacgggagagcgtacgcgccctgggacgttgtgcacaaggtgaccctaatgcggctgataagtgtctacgtatcctactcaaccaaatcacaagccttgatgacactcttgtgtcagaatcactgactgttatccgacatctcattcaacatgatccgggctcgcatgagcggacagttattcagttggtgaagtacctcgggctgaccacaaatcccgacgcgagggcaaccattgtatggttggttggcgaatacgcgggacttgaacctgagaggaattttgcacctgacgttttacgggttttggtacagaatttcgccgaagagtcgaaggctgtgaagcaacagatcctgctcttaggagctaacgcttatctgcaccatattctacgcaatcctggtaaggaagagtctgactcagaagagcctctatcgaagccggtggatcaaacccagctgaggaacgattgggcagatgccgatggcgagaaacaacacgacaggaatagtttagaggaaaaaaaagaagcacctggggaagaagatacaatgactcttctctggcggtatatactacttctggccagatacgacacatcttacgacctccgggaccgtgctcgtctatataaggcccttctttcttcgccctcgtcgactcaaatagcgaatttgcttctccttgccccaaagccggttccgcatgctcctagcccgtctgaaaccaggaaagacctattgattggctcatcaacgcttgttctgggaaacgacgctgggatccacggtttgcagggttacgaaaatataccagactgggtggaagcaggccacgagccggaccccagccttcgcgtgtcggatgttaaagccgataaaactaccacggtggcgactactgcaggtgagcagcttgacagagctctcaaggagcatgaagcgaacatagctgcctcaagccgagcgcacgcggttcgcgggagagtagccgctcctgctgcaaagaacaagacccttgatcagtggctcgatgaacccgagcccgaaacggacgaggagactgagtatgaagaggtaacagattctgaggagggagatgaagagtattcaacggaatacgaaacagactctgaggcaggagatgaggacgaggaagaggaagaggaagaagaggaggaagaagaagaagaagaagaagaagaagaagaggacgctgactccgaagagcgccgacaaactcaacagcttctaagatagcaggctaggcgtttgacgaaggtgcattttgctcaatttcaggctacctaagtcctatatactatcgaatatataagattgggctacgtactgtaacctgtttatggtaacctctaccgcatagggccggggcggtatgtgacggcagaacaagtaagcgatgcaggtccgatccaggccctggcttctcgcctctaaacatcggcatatctcaggcagcgtccactgggccaacagtgaggagtgctgttcttctagctgttcttctagctgtgtttctctttcatctcttctcctacgcatgaaacgagttccgttcgcggcgcttactcaccccaccgctcctctagtcccttggtcatgatgagagctactgcgggaagtttcaagccagacgtaccccttctccagccaacccacatatcactcgttctcaggactctatatcagcgagcttatccttgatatctcgttgcatattgctcgacgatatcttcgtggcccgcatatttgcgtgtctcttctagtaatcgtcctgtaccaccattctctcggcttctatattagatttcattattcgcaatgcctggtttaccaggtacgtctgccgcagaccgctgtctgtttcctcattactgacattccaatagctagcatcgacctggacgagtgcattgagaggctgtatagaaaggagctgctggcggactctgtgattgaagccatatgcgccaaggcgaaagaactgttgatgaaggagagcaatgtggttcacatcgcggcccccgttacggtagtaggagacattcacgggcaatttttcgacatgattgagatttttaagattggcggattctgcccaaatacgaactacctgttccttggttcgttccagcatacctagaatgcggacttctctaaccagttctgtcttactatacaggcgactacgttgaccgcggcctcttcagcgtcgagaccatctctctactcgtctgcctcaaacttcgttacccgtcgcgcgtgcaccttatccgtgggaaccacgagtcacgcggcgtcacccaatcttacggtttctacaccgagtgcgcccgcaagtacggtaatgccaacgtctggcactactttacagacatgttcgacttcctcaccctcgctgtcgtcattaatgaccagatcttttgcgtccacgggggcctttccccctccattcactcaatagaccagatcaaaatcatcgaccgcttccgcgagatcccgcacgagggacccatggctgaccttgtttggtcggaccccgatacggagcgcgacgagttttccctctcgccgcgcggtgcgggatatacctttggagcgcaggtcgttcggaaattcctcgaggttaatagtatgtctcatatcctgcgcgctcatcaattgtgccaggaggggtaccaggttctttatgatgatcggttgagtacggtttggagcgcgccgaattactgctaccggtgtggaaaccttgcgagtgtgctcgaagttagtgatactggagagaggtttttcaatatctttgatgcagcacctgagaatgatatccatcggggtgagcagcagacgcagcagagcaaggatggccagggtcctgtgatcgactactttctgtgataccctttttcattcgtatttcgacggtttatgtttcctttgactgtcatcttatttcatttgagcgccacttttgtagttgataaattcatttcacttatagataatcttgtctgtacgaagaccgaatggacgcatgtatttaaaactgtcaagatgctgggcccatccaatcggacaccatgctgattgcatctagaggtgccaaacacgttttcaaacaactgaactaacactttaacgctcataggtagggaaaatatatgctgttcgttatatgtatgtactatcgccaagaaaaatcccgtcaagatttaccagtccttcgcaatgtcgaaggaccagtggaagtggagatgcactttgtcatcgtcgtcgataaacttcgattccgcgttgtagtggccgcgagccatcatccccgagggggcctcctcttcttggactgaaagatgcaagagtcagtattggaggcgctccataggagaaagaaaagacttacacttcttctcgtaaattggctttcctgtagtgcatggcgcataacttccctaataccagttagcacattctataaacctgtcctgacatggccttcgctattctcccaaacttacaagcatctcctgatccttgctaacccggatacccttgcgcttgacaacctggaggtacttgaggccgctcagaacatcgtggtggacctcaaaggtcaccttaatgcggaagtgggcgccctccttgatagtgaagggcttgtccttcagcttctcgagcgcgcccggggcagagacatcgataacaacatccggacggccttgaacttcaagcgctagggttttgatgatacatgttcgggggtcgttggggtctccggtgggctcgccggtgtttaggccgagggaggccttccaacggttgagggattcgtcatttttgtctggtgagagtggcgttagttaatgggatttattttacttcttttcttattctttaagtttcttggtgtgggtttgtgagataagcaataaacgaggtggggtggtcaaagagtgtagttgcaggtaaggggtgaaccggaccccacgaggcagttgcgggagtcctcaggaaatgcttcgattgacggcagtgggcttacataccgagctcattgtattcagcaattgtcttcttctctccgaccttgaagccttcagtcttggaggcaatgagttcgtcgtcatgttcggccattgtgctaggatttgtgtactgatatggcggggtagcggtgaccgacaattgggggtggaaaggagagagttaaagatgaatggcggactggtaagttgggattgtactgtctggattcagcaggtagttagtatttgaaagaagagatcgaaaataagaagctagaggctcgagaagaaaagagaaaatatgttcgaggctgaagatgtcttgttcgaggccgagctttgttgatgtagcggtgggtaaatgaggggattcctgttcgagactagcgcgtgaggtccctccgtgggcatcgactgatcgcccactccattcgccaacggtcactctgcggctgcttactcgccgtatgtggaaggtatatttctccccagcagtctaatcatattctgaataatctgggaacatatttcactgcttctgttagttactgaatgaccattggataactatggtatgatgcagtgacgcgatataaagtgaagcggtatggtgtcttctaggtgtacctaattaatcctttgtactgccagaattatattggtctggcaaatggctacctattctgtacctttctcatctgagtatgaggctgcccactatcaattagaccaagtcatatgccaacaacacaggcaggactgaaaaatcattagctccagaaccgcagttcggaaaatcgccatgactagagcaggccagtaacatttcaagaatgattaagcagggtcgtgctgtgcaagagaaccattatggaataatctagcttcagctctttgtttcgaatatggatgacggttgataacgtccaaaggcccatttcacggtaacaaccaagcatctacctgagcgctttgaaattgcggtgactctcataatgtgatgacttcggcttattggatgagtatgtaccaatgatatcctgattgtaagttgtactgttggttaaaggcgcctgactggccttgaagaggcgtcctagctccaacgcagtgtaaccgcagtactcattccactgagcgaaaagttatagactaagccggccataagattccccttggttacttcgagcatcaaagtagtcaccttcttcacaacaggatgcagggccatctattctatgtatcagcttcttcgcagccgtcaatgaccctaccctcagcgcagcagtagcagcatatccgtgccattttgaggcagtatgcttcgcatatagcctgccgacagaaactccaccttgttttagagtagcgcgttcagcggcgcaacgagtgagctgaggtgcctagggaaatttctcttgactatgtgttagaatgcaattctttacaagttctgaatagtactccgccgcgtttgtggggatgagctggggtctgccgctgaagatgagattagagggttccttgaagcgcgtgttagcgatgatatggccattttggccctttcaggtcaggcgcagctgagagtatctgcacctacagagtattagtgattcggtgctaagtgaccaatagacttctccaacatcaaagaaattgatctcgatctgcttaatcctagttgcaaggacttatgaggtcatgtgagcttccaggtattcatccttggtacagggacggctgttccacgggtgtgagcttgagctgatctgtttatgctgtcactaatgcta

SEQ ID NO: 5346 - DNA, 4721 bp, Emericella nidulans
acgcggttaaaagagtcaatgaggaatacctcctggcacagttgaagtatcgacagaaagaacaaggccccttcatcgtcgggttcagtgacatctttcgagaatggatccgcaaggcaaaggccgtgtataccagttatgcggagaccttcccttacgctaactatcttattcgcaaagaggcggagagaaatgttcttttccggcagtttctcagcgcacgccgagatcacaagatgtctaatcgtcttagctgggacacatacctgaaagcccctatcactcgtattcagcggtatactctgctcttgtcgacagttcaccgcaatatgccaaaggattcggaggaaaagaccaatctggcccaggccattgaagaaatcaaggtcgtcgccttggagtgcgacaataaggtcggcgaaatgagcaaaaaggtcgacttgagggagctggcctctaaactgcaactccggccagacatgagaaagcgcgtggaactcaacctggactttctgggtagagaggttattttccgcggagacttgcagcgcccaggctcccgaacacggttcttggttgatacgcatgccatcctctttgatcatttcctcgtgctggctaagctatctgttactagagatccagcaaagccgatcaaatatgaggtctatgatgtatcgaaaatgcctattccgatggatcttttggtacttgaaagcacccaagaagatcccgttgtgaagtcagcggtcagaggagtggttgccgcgggccagaccccccaacctggtgttgttgcacactccaatgcggacaaggctctagttcctacgacggttcttgagagctcgaaagacgacaaagttctgtatcctttcaaagtcaagcaccttggcatgaatgaaacgtacattttatacgctccttcggcgcaaaatcgaaaggactggtgtgataggatcattgaggcgaagaccaagcatgccgcttcactatatgctcagaatgcagagccattccgtcttcgtgtcctggcggatactgcctttgccagcaacgacagttctcctccaactcacactgcaatcattaagggcacacctctccaccgcgcagttaaagacgttgaaaagcagtaccccgcttcggctcgaccgaacccgatttgccgggcggcggttcattgcgctaccgttttcgagcaacctcctgggcgtaaaatgtgtgctattgggactgattacggggtgtatatctcggagtacaatgatcccaggggctggtcgagggtaagcccaatgtatatctcttgctgaaacctactgaccccacagtcaattgctatggcccgagtaacgcaaatcgcggtcttttaagagttcaaccttttcctcttgattgccgacaagtccctgattgcctatcatctcgacgttgtctgccctgctagcggcgtgccgactggcgccgcaacgactccacccggcgagcaccgcagaagctctctggaaatcgagaagtgggcttctttgccgcaggacacatgaaggaccgtacgcttgttatgtacaagaagcgtgatggcctgtcgtcgacgttcaaggtttgtttgagtagaatcattgatgaacctgactaaagtgaaatagattctggaacctgttctgcagaaatctgcctcaagtcgaagtcgatttttcagttctcgccgatcgaacactgagtttttccgtgaatatgacgagttctacatccccgccgagagttacggcattaacctgttccattcgtcccttgctatatcgacccagaaaggcatcgagattctaacgctcgataaaaaacagacttggtctgtccctgagttccgcaccgacgcccaggaagcccaggctcacctcagtgagattggccgccggattagtggtcttcgaccgctgggtatgttccgtctcagcgacacggagtttctggttacctacaccgagtgtgcggtttacgtcaatcagcacggcgacgtctctcgcagtgtggtcctagaatttgtcggtcgcgctcactcggcttgtctttacggcaagttcctgattctcttcaacgacgactttgtcgaggtccgcaacgccatgaatggtcggttacgccaggtcattcccggccacaatgttgtctgccttgatgatggtagccgcctccctggctcgggagtgaacagtataccaaccagctctggcgacaccgtcaatctctccagtggcatctcgaatggagctccgttggctaaccaaggccgcacggtcaagatttgcatgcagcatcctcactacgcgcggaacctggttgtccttgagcttattgagaacgagggctcgaaagattaattctgccctgctttggttttacccatctaaatccatacctttcaaaatcctgttcttcaatcaccgcttcccttcgtatctttgtttgatcatgatcatggtcatgattgggcattctgacaaatgagacaatcggtcacgaggtacaccatatcatgcattttcttcctttctggacacctatacccattttgtttatgccgtttgacggccgaatgattatcatgttaacacgttttcacgaattacttctgtcttgcatatggatgtacatatcgtcagtagcgaagagcttggtgatgttatttgtttttcttggtgagatttttcaaagcgaactttttgaccctgcttagccttattgcgaggatctggatgattgctcgcaaacttcagaagcttttattataaaactcccctttcaagcctcggcgcagaagagagtgtacgtatcccttccgcaccgagtagaatgggtacattcagcgcgaatataggctccgtgttgtgtacatgtccttatagaagattagcaagccttcaaggagacctatacaccttctgccttcgaaacaccacaagtaattacattctcagagcgaagaccgaaacacaaccccatctctcttcgcattccacgtcgcaatcgcatccatcagtggtggactcaacgcatcataattctcaagccccaaactcttcagtctctccctcacacccggaacaagctccgggtccagtccctgcccaatcaaactgctcacaaaaccggcgaattgcaccccttgccatccctccttcccgcccccctcggacagctcaacgtgcacaaagtccaatcccttaaatgggtgctcaacttcgatccgtccgtagaggtgcacgccacactccttacatgcgtagcgctgaatcggagcgttcttgtcgatgatagcgagtttggaggcgttggcagttacgctcaaagcggaggttgggacgacgcccacgacagagaagatgctgcctttgggcttccagcacttagagcacccgcacgcgtggttgtgcaggacatcggaggtcagtgtgatttcgactttgttggaggcgcagtggcagtagagttttccgccgggaaagttgggttttccttggctgatgccgttgtctagaaggggatggagcgggagagaggaggacatcgtgctcttattctgattggtggactgaagaagtatgagtggtcaaagatggtcaaggcaagggaccccgttagatggtgcaactcgactatatatactctgtcctcacccaggatggatgcatccttgaagctgcacctccaattctaccagaaggagaggagaagaggggagtctcctcacgatctcacgaatcagtgcgagagctccaggtaacccctcacgaggggaataatcccgccagctgataccatccatgccacggacctcgacatcagtcccagtgaggtcagcattggagacctgacagaaaaagactctgtgccgctgtttgctctccgctaggcgcggcagggcatcggaaggcttcccgggctgatccaccacgaaacaaatacaactgctttcccgatttggagtacaaatgcgagattgcgttggaagcggggccgaaattctagcgtgcctaggcgcatggaagaaatactttgctgcagctggatgtgtgcctgggcctttttcttctggggttgggatcttgactctgcagactaaacagactgaagtcagcgtgcgataaccccgatacttcacgactccttcaggtatacttacttttgaggtagccagtcaaacataccttttcagaaccctgtaaactagtgacagtaacaagataaatctctctgcctccttatcacgctgctgttttccccggcagatgcaagatatggagaaggttgagcgatgaggttatctaccccaactagataaaagaatgcttgtattgctactagaaattgctaatcaagaagttgcaagtatgtcccagaagttaagttccacgattcaatatctaatacgtcccgtttcccctacaaaggaagaaaccagtcaagactcgaactccacaaccttgctgacaactttatcatccgagcctgcggggatacgttgaccgctactgctttcttgatgagagtctttgtcatccaagagagatacatcatcctttccgcggatattaacaacctccgctccttccaacagatcccgatccgtttcccgaacgctgcgccgctcaggatcggcaccgtaagcgcctgcacccgcaggatgaaatccaccaacaatggctggggcggtgcatgat

SEQ ID NO: 5347 - DNA, 6432 bp, Emericella nidulans
  unsure (1)..(6432): unsure at all n locations
gactcctcttccacaagtcctccctcctacgtgaaacctatccatcgaccaggaacagccaggcgcaataaattgcgcaagtcggggttccatgggataagctactcgttcatcctgcgctcggtggctgaatacctgaacaagccggttgagaagacaagcctgattgccctgcatatagggagcggtgcgtctgtgtgtgcgatcaaggatggaaaatccatcgatacttcgtatgtgtccagaccaactattcattcgtttattcattcatgcatgcaccccttgcgtcctatatcccgggaaagaagccagccattcaagcatagcgatcatgatactgacattcctgcttagaatgggattaacacccctagccgggctaccaggcgccacacgcagcggcgatatcgatccatcgtgagtgtctcagttggaccctggccttggggtcttaagaaagccggatctgatctgatctgatctgatcgactgcgatccgtgcacctccttgctggatgcgagctaattcccggttttccaggcttgttttccactataccaacgaggcggggaagctcagccctgcaagtaccaaggagatgcatatcagcacggtaagcactctacctgcacgtagcagtccagacaacgctaacgactgtccacaggcggaagaaatcctgaacaagaaatccggttggaaggtcctgacaggcacaacagacttctctcagatcgcagtcgaagacccgccaagtgagcaacacaaactcgccttcgacatccttgtcgaccgaatcgtcggctatattggcaactactacgtcaagctggacgggcaggtcgaagggattgtattcgccggtggaattggcgagaagagcgcgctgctgaggaaggctgttatagagcagactcgatgtcttggctttgcggttgatccggagaagaatcagcatgggcctggagacgacgagaccgtagtggatatcaccgccagcgggagatcggatgtaaagagggtgtttatctgccaaacggatgagcaggtgagttttctcctttgcggaatgtcgtgacgttgctaatgttggctttgcagttcgagatggcgtacaactgcaccaagacgcaaggtctcgataagcagtaggaaaatagccgatctactgtcaatacaccaaataaccagttcgacttttgaccgtcgtagtatcggccttaaccttggaactcaggacatgtccgcagcctcggtagcaaaacaaatatatctccaacacccaaacacgcaatatacagaaaacaccggacctctcatagcacacatatacccaaaacaaaacaaaatgaaggtctagaacttcattaacttacctgtctattccatcccattccatcaacccaattcccagacagaaccagccagctcaacagccaacagcctattattctaactaggctattcagcgttccagatcagagtcaaccagtcaagcgccggcaagccacagaacaaagagaacttcaaactgagattaaagtgccggaacgcctctgatcttcccgcggcatcctggtacctttgctaagttgaccagtcgttgttcctgacttttttcctatgtccttcattcgacagttatgcgagtaagcaaacatgggcgctctacgccgtagcctatagtctactgatccaaaatacttcgtacggtagtatcgcattaccatcacctcatcgacgtctgccatccagtcttactgtatcgactcaacgccacgagcagaaacaaagctggcggcaacgacccagatacatccactggcgtataacatagtgtgaagatcgcccgtctctttgaccttcagccgggataaacgtggactttactggtctgaatgtcgacttagttggaatgtctgggatgcccgctcgacagactctgacggattaccgaggattactttgtgctccgtacagcacattgagatcacctgacaaggatggatcacagataatcgcggtgatccctctgatccatcaccgaccagtgaccactggtccatccgacggtggggcggagttggagaggcatacctcttgcttcttcagtcaggtatctgcgtgtgtccaacattagcttgcaaaatccagactgtctcctgtatacggagtacccgaacagagtatcagcagacgaatggataattttggtttttgccacagcgccactgacgcttcactttcattctatgtccctgcctccccctttggaaggtgaaatgcgtatcatggaaggttgaagaatctgagaaagacagatgcaactgacgatgcaggtgcaggttcaaccgcagtcagggtgaaggtgttccagatcgaagttcgcgctgttccaaaagtaacgtagaagtagtgaacaatagagaacgctgctggtgcctggggtgcctggggtgcctgaaagtcattgtacgggccgaagcgacatccttcaaggtactccatcctctgtactcatcttgaccacgtacttttttcgccagtaggccgtcaacatcacagggtaccaaggaggcaattttcacgaggtagtgccagcagtcactatcacagagtccaggcgccggaagcaaaatggctatcgattttcagggggcggatccggccgcgataatggtgatccgcgaagatcaggggctggggcgcataatggaatggatcatggaatggatcatggatacgtatcggtatctccatctgcatgattgtcatgagttacctggttgacgggacaggctaaaaaatgttgctatttccgcgttgccgtatggagcacatgtacagttaggctatcagaaagtgcctaataatcttactgtacagagtcctgtcagttggcgtcctcctgttcctgagtatcccaagctgaggtaagataacgtggcagctgagtggcaatggcagcgctgtctgacgtggccagacgaagtattccatcagggcaccacgcggttatctctctcgcgagtatggaggacagtgtacgacgacgagtttcagcttctgggacttcaaggcgtactccgtaccaaacatgatgattatagggtcgcaagtttgactgaatggcggttgataacaacaccgattcgttcctcttacataacgcggcggtgcgcggaaacagatcgaagatctcagctgttatcctgcctggcttttctcgtctttctccgcccaagatagcacccagtacgtggtcgccagcctgacaggagtgagacgaaatactccgtgagttgtatccattgatggacgcgtacgctcatactgacatacgatagcgtacgctggatctgagctgataattcagtcacttttcacgaatgccgctctcgatcaaggttcataatacgatgtctcaagactagtctcccgccacggcggccagctgctgcatgagaacttgcagcaatgcaaccctattccacgggatttctagaaatatcccggtggcacgaaggctgggagtcctcagtgtcactgagatttacggactgaaatgtatcgcgggcatgccgcatgcgctgcgcgtatcttttgggctcgactcatcccggctagcggcgtataactatatacctgtctcaggctttaatctctgaatacaaattcgcagctgcgacggacgcctcaataacagtgatgcccggtcttcgatcagatgagtagcctggttttagccccctcagacactgatgaatcgcagtaaccctggaagacatctccgaggcgcggtagagagtacatcccatatatcagaaattaacaaaatgcatctcgacctatcaagtagctacttcggataagtcaaaaatgctgatggtcccagcggttcgggcgggtgggagcgcctgccgtctgcggtcgtgcaggttgctttttctggttgtccgactgctgcggcaggctgcgcaagcaagctcaagccaagcttgagctcaagctctaaatactgaatccgatagctaaagaaattaatgagattgcccaagtaggaagatgtacggacaagaaagccgacagccgtagtgtctgttttctttccaggaaggatcacaaaggatgagacggagaggctgcggcggtgcggattggattcggtccagggcttatgcgagtgagctcactggttgaagttcattccaaatctcccgtattttaagatatatcatttggaggcaggctgtcacagttgtcagatttgtgatgggtggctctttttttaccgatacggcaaccagaatcagtgcccgtgggtacggaaacggagatttaaccatgattgggggcctgatgaatgtttctaaggcgacgctcctgcattattagtgccaacgcatctcggcacgtgtagcctgtgtagtagacagtattcctgctggacagagacaaaacggaggtaggctggctattgtgatgtatatgcaatgtatatgcaaagtacatcatcaggacggatgtgatgaatccgtatactgcacaattgggaacttgcctgaacggggttcagccaccatttcagccacttgagccccctgcttccattgaatatctctctcaagattcaaggcaataattctgcaaggcatattcgcatttctcgcgatcagaccccccgccccttcagcctcccgcttggttccctggcagatcggtagatcgcgtctgcaagctgcatgcaagcagataacgcatgcgcctaagcgtcgtctgtcgtacgagcaagtaccgctcatagctccgatatgtgccctcgggcctcttggtaggtttgtagtatctgatctaccgcagactgctgagagcgccggggacaggaaccctgtcgccatgcgccgatacgccaaggcgaggcccaggccagagatctgtcagttttcatcgtcatgtctgagctcgacagtctcaggtttccgttaaagagtctcgtattgctcaaacatcttcaagtttaagctaatgcgggcagccgagcccggattctctctagggaagaaaagtaccagatcaggagatgtagagttgagtatcagtctggcgtatactctggaacacacaaaggaaagtcgagaaaaaatgattcgtttctggtgtcatattgactatttgcgactatgggctttttttgtcttgaggtcgtaggatcccgtctccgtatctcatcgagagcgattacccgtgggccatcgtcttcccttcgcggaagtacgggtgtgttccgtaaggcttgagcaattggaagctcgaagcactagtctgcttgggatgctgatagacgttgatccctggacggactcaggagaagcgatctccctgcagggtatgtagtcgtggaagtaccgcagtggaacgcggaatcgtctccctgccaaccccaactgagagatcaatgggccacaacggctcaaattctggacctggcgacaagtgccgttctttagtttctagtgcggttctagctgtattcgcgaccggatcgttctccgttttcgcaccggtacctaatgtatttgactttgtcctaaaccgtgctggtgcagtttctagatcattacttcggcccttcgatgaggataatcacgaaagttgattggtacggagtgtctgtacggagttgggagtcgccagatgtggagaggcatcctcttaggtgaaaaattccgcaggctactccttaggtaccgcgtggtctttactcttttctagagtagctgtcgtttagtttctacgggtaggctgtgggaggccaacggtccgtggggtgaaccatggataggatagcttccagaacgattctggaagctggaatacccgctgggctgcagccagagggtcgatgatcttggactaatccactcaactgcaggcgccaatgcaggaacatctgcatacccgagctgctaatccgtctgcatccgccgtctggatacctggcaaaggttcatctttgcggcgctggcccattcaggaccacatagcgggtggttttcgcactctagacccagtgcctaggtgatgcccttctctcgagacgcgctctaacgatgacctcacacggtccccggcagcccgcagtgcgtcgcggatgcagcctggcagctgccaaccgctcacctcccccccatcagggatccaacaccaaagtaccgcgtcgaattttcccgaaagtttcgtcaagcgctgtcgcgccgaggatcacccatgcatccgcctccatgatttactaacggagtcgacactccggttgtcagccgccgcccacgacacttaaacacgcatgcgcgcagccaatccggtgcccgatatttccgaacgagcgcgacacgaacatggagggaaactctaaagcccngagacatgtg

SEQ ID NO: 5348 - DNA, 2927 bp, Emericella nidulans
aaaataccgctgaagactattacatgcagttcaagataattgtctgtggtcttttttgtatcgaagctcgacggtggattaattccaggttagtcggaatggttgacatagacaatccagagagcctaaagcctttaattgacggcggaacagaaggtgagtaacctaccagcaatgcgtgaagaaggtctaaaatatcataggattcaagggtcaggcgcgtgtcattttacctaccctcacatcatgtatcgagtgtcaactcgatatgcacgctccccgcccggcggtaccgctctgcactatcgccactattccccgccagcctcagcattgcattgaatgggcacaccagatagcatggcaggataaacgcaaggatgatacgtttgacagtgatgacatggagcacatcggttgggtatacaatgccgcgcttgaacgagctaaagaattcaatatttccggggtgacctttcagatgacgcaaggcgtggtgaagaacatcattccggctatcgcatcaacaaacgccgtcatcgcagccgccacaacatctgaagcgttgaagatcgctacctcttgcaatcccttcttagagaactacatgatgtatgctggggaggaaggcgtatacacttacacttttgaagcggaaaagaagccagactgccctgtctgtggtaacctcgcacgcaagataacagtgaaccctgatgccacgttggaggaattcattgagacgcttggggagcgacccgaggcacagctgaagaagccgagcttgagaacggaagagaagaccctttaccagcgcttcccacctcaattggaagagcagactcggccacacctgaaacaaaagcttcgtgatcttattgtgagtgggcaggaggttgctgtgagcgaccctgcatacacgatcgatttccgcttccagctggttttcgggtaaacattttgcgggtgagatggcactacgagagaataatgattatgactagatttcgttatttttaaccagtttttctatatcttaaatcctgatccagactcccagtcatgtaaagaaggtattggcccacttttgtcgcatatgtacaaacaaagaacaacaaaccaacgccgggtgatgcttcaagaagagactttaaacaattgcagatgagggattaatacctatcgcatgaggtccgtcaagccccgcttccaccgtgcacatttgagcttcagcaccttcacgctttcgaggaagagaacgtcgctgtcaaactgtccagtgctttcaatgttgaagatgaagtgatcgcgaatccggcccaacttgaccttgcctttgaattcatcatgtcgtaagcactccctgctaacggtatcattgaaagcatcgcgaacaacggccttaagctcgccgccacgaccacgatattcagcgttttgccgctcatcctcagcggtgatgggctcaagaccaataactcccttagggaagcatttggcgaatttcttcgcgtcctctccaatgatagggcgcataatctggatgaccggcatcagacgataagtcgctgtcgctaccggggagaatttggcatgatctgctccaatgcctttaatacagtgcatttccaactttatcttttgcccagggcgaagcttaccaacgagaatatcggggttcacagttcgaatggcgccttcaccggtgaagaactcttcttggcggccgacagggtggaaggggatatccttggcgtagacgtgtgcgttcttgtacagtttgcgagggtctgtttcgtcacgggatgcattcgggttcttggtacattcgacgtcgagacgcagaacgacggtgttgtaatctgccaggtcgctaccgctgccaggctcatcttcgctgcccttgttgtaccactgcatccagttgaggccttcgactgaaccctgaagagggataagaccaagccgctgtgcaagcacctcatcttgaatgacagaggtgttattgtgaatgtatacccattcaatagcgagagtaggcacttcagccatgacaatgcgacggaatgcgtttgcgatagaggcatccaaaccgatcaaggaaaaagaagcctcgaacttcttgttttggtggaagtcgacccggaagccctgcgaagtttagaaagtggatatgaacaagggagttgtagggcatacatctctgaatttatcaagattccattcgtgcgactcgcctggccagtggccggggaaatcagtagaagcgatgttagtgaccgtctctgcgttaacgttgacaatctgcaggctgttagatcagaaagagatataaagctgaaaaaaaaagcttacacgtctgcgttcaagctcttcatgcgacgggactaggggagccatggccgtgtattggggaatgcccgctctgcactattgacgaaagaaatcaaaaagttcttttgaggaaaccggcaatatttttgcgggctggaggcggagagagtaggccactataccgtgcctcactaattctgcacttgggtcagaaatggagagcagatgcggattgccagctgacggtggccttaggctgggtgagaaatagaggggctggaaggccaaccagaggcgggctgatgaccggcttgtcaatcacgtgactggccaaattgcatctcatggcaacctccccagcgtcactccgacagcgaacccttccgacgaagctccccaccatttgcgtccggactgaggacagtcagcctctccctcattgcttattcacgcctccggaatggctgcttcctttgctcgcctggcgggcaatgccccaaaaagctttgcctccgcccctccggctttgctcgcagcacccttgtttccagatcacggtcgattgcgacgtcagtgtcccgtcgagcgaccga

SEQ ID NO: 5349 - DNA, 2037 bp, Emericella nidulans
ctgatcatgagatatgatttgctcgctttcggcccctgcagaacatattagattaaaaacattattataccctgatcagcagccaacctgtctgtctgtcgagtgataaaaagcccgccgttgcaacctcaagactggccagcctgggatttgtccgtctacctaaagaggcgtgggctggccttgtgctgcaactgatgagaacattcaaatattgcaaggtttgtccgcatttctgccaaggcagtgatagcttcaatgtggatacaagacagaagaaccctcaagcttttgttcgctcaggcaccagactagccacagattcgtacttgataatgctgatatggcgcaaaggctagggcagtccttcagaccgtgtaaccatcgcggggacatcagcagcagcagcctgaatgtgctctgtagcgctgagggtttttttttttttttttttttttttcacagccgggtcacatacagtgacagagtgttaacttgtgactgatttaccagactaacttcatcgattaatctccagagcaggatctcgaaatggttagttaggtagtttagtccttcggccttggctgaataccgggggaacaggtcaaaggtctgatatgctgcatctcgatttggactgccgcagccaacaggtctatctctcatcggttaatttgtgttttcatgtctgtttttagtgtggatgagtgttgggttggaagagaagaagtggtagagtcaggtggaaggcgcatgagacttgctgcaattccccgctagaatcccttccccactctaccttccctcgactctacaaaagcaaaaatcctcctcactattcatccgtcccgcaaagaacatcagcatgctggactatcctctgatcaatgagtgtgctagctattcctgtgacccgtgatcgattcacacgctaactgcccatgctcttaggccgctctccgccgggttctgtcgaacactttcaggactgagaggcaacggtctaggccggtgcatctatccatgcacctcgttatcgagtacggcccagaactttccagccaggaagctttccccgcgaccacaatgtgaacggtggtcatgggggaatcccgagagtcgcaaagagagggcacggtcaaatatacttccataagcacgggaggcaaatagggaataagcagaaggatactcagatatcaagaacgacggcttattgaaaataaacaatgaacttgcattggcaatacctctttggctggtgaaccgtctccagatcctaggggacatctggagagcgcgttctggtggggcagccggattttccccgcccctgcgtcaggaaccatcccccgcatctcgaagtcttcttagttgagcaaacttctaccaagcatcaggtcaaatcaagagctactgtgatttcagaatggcagctgtacttaagaccacgagttttggaataattcaaggaaaggtcagcgacgcagtcacgcagtatctcgggatcaaatatgccacactgaaagacagattggcagacgcagtgccaatcgacagtcatgagggcgatgctctgaatgccacgattgacgggtgagcacgtcctagacgagcttacagactgcgactaacagtatagcagtcctactgcggtctcgcttcctattggttgtgatcttgagttgacgcatgtccaacatactctgcccaagaaggaccttccccaatcggacttggattgcttgaatttgaatattgccgtcccttctgacgcgatccctacttcgcgactcccggtctttgtgttcatacatggtggaggtttcgtcatcggcgccaattcttggccccagttcgattatgcaagattcgttcagctctcggtcgagaagaagctacccatagttgcagtttccatcaagtaagtatctgactatatacatagactggcactaacttcgctagctatcgactgggagccttcgggttcctaacatctgaagaactgcgtaatgctggatataaagcaaa

SEQ ID NO: 5350 - DNA, 3261 bp, Emericella nidulans
agtgaggccccaaatagaagctttttttctatgatgctgtttttaccactgttcaatggcgcatggtcgctgcgaaagccctgaaagatgccagggaaaacgccgtccgtagcgatcgagaatcgctccaggatgatatccgagcacaggcatcggcaaagacagaagataattggcacagcatggccgaggactggcgcgcatcatacggtcgatttacatcgacgttcgatccgtctaacggcttcgtctccatcgatcaacaccactacgactcacttcttgagattcttcggactcgacagctagaccagctttttacggagagcgaactgcaagacgtcgatcagagctggcataaactcgagccgtggaatgataccgtggaagggctgaagctgctaagcagcaagttccgcacaagcacgctgtccaacggcaacgtctcacttctcgaggacctcgtgcggcatgcctcgcttcctttcacggatatcgtgagcgccgaacattttggcgcctacaagccgtcaccgcgtgtatacctgggggctgctgagaagctggggttcaagcccgaggagtgtatacttgtggcggcgcatttgaaagatttgaaagcggccaaggcttgcggattcgggacaatctacgttgagcgcgttggagaagagtttggtaatctagatcacgccatccaggagggatatgtcgatctggccgtggagatggaagacagcccggatggcttcgtagaggttgcgagacggctgggtatctcgacctagtagagcttctaacttgaattactggtagggtgtactacactacctgtctaatggacgcttgtaccacggcagaattcgtgcagttgccttacttgcatattggagtcccgtgacatcacgccaaactatctgatttctgattataaatcttgtactctgtagaacctcatatgccaaaccatgacgttgacggcataagcaattagtaatggaagataggcatactaagataatataaaaacaagttgtctgaacaatgttgaactatgatatacagtgcaagtaaaaccatggctgaggtacgagattttaatctctgttcatttggttactgattttgatagaacgagacatacaaacacgccgacaaagacggtcacttccgacgtaaagactcggtctttcgctcctgggtatcagcatcccctgacgctgacttccccgccgaaaaggaccgctatgtgctatacctaaattacggatgtccatgggctcacaggacgaacatcgtacgctccctcaagggcctcgaagacatcatccagctagtcgtctgcgacttcgaactggggtcccaaggctggtttttctccgaatccggacggaacgggtcagcaaagaaagacccgctgtatggatttacgacgatcagccagctctatttcaaagcagacccggagtataagggacgatatacgattcccgtgctgtgggataaaaagaaggagacgattgtaaataatgagagcagtgagatcattcgcatgttctacacggagtttgatcacttactgcccgaggagcggcgcgaagtgaatcagcctggtggcgggctgtatccccctcacctgaggggtgagattgaggcgatgaacgagtgggtatacgaccgcatcaacaacggggtgtataagacaggtttcgctgcgacgcaggaggcatacgaggcaagcctgcacccgcttttcgaggcgttggaccgcatcgaagggcacctcgcccagcccgggcaccagccgtatctctttggggagcatatcacggaggcagacgtgcggttgtatacgacaatcgcacggttcgatgtggcatactacctaatcttcaaatgcaacctgaagatgatccgacacgactacccgctgattgacgcgtggtaccgacggctgtactacgacgagtcggagaagacgcgcggaggggcgtttgggaagacgaccttcttgggccttgtaagtcgacgggccattccatcctggcgcagggacttgacacgacagctgacaatccaacagtacaaattcggctatctggcggcgcttggcaagaaacaaagcgttgatagctcccagctgattgtgcctgctgggccaaagcccgatatcctgccgcgtgacgcgtagatccggtttactatcatccaccggcttattttgagttgtaaacgggaatttgccgtctccttgcagttacgaagccctgcggcttgttagcgtaatgcatagcgtgtggttcgtcatccaattcccttacatggcaaagtaatggcacgtcattcatacggcgactccgtagaagatctttgttagaagatgctgctgcgcttgagcacatggctctgccgtgtcccgagagtatggaagctcgcgcagatcgagcaccatccgaggaggcactataggtgtctagtgaccacaacaccgtattccaaacggcccggcagactttaattgtcagtatacgagccccattccggactatcgaagtcagtaggcgagttaattccgaagacgagacgttggataagtataacttcggtaggataaatgccggatgagtcagtcatcaggcttgtgcggggcgggcagcggggcttcattgatccatacccagtacacagttcagctcccccatccctgagtttggtacgaggcgtctcctgaatcctaactctatgatccgcttaggtcagtctgtgagtgttaactaccccacgagcgaggcagtgcttaaccattcgggattcagagacgaatagagccatatgcacgtctcgctcaagccggcatagcacataccagactgcatgctgcatatctgataatcaaccaccaaccaccaccaagccttgcgaaaatcgaagaaatcaagatttggttgtgataaataaactggcgatccttcgagtctcctttaagccaaccagtgttaagacgcagatattcaacccttcggcaattgccaatcacacaactgcgggcgagacggcaggatggccaccaaggggctattaactaccgaatgaatacgcaagcttcgctgccatcctttagtcttcgaactcagttcgaccaagaccacttggcctaagatatgggataccttaaagtgatgtgatggaataagcgggcctaataactcggatcactataccgtatacaattggcggcgggatctggtgcatagcaaggtg

SEQ ID NO: 5351 - DNA, 7021 bp, Emericella nidulans
gccaaacctgcagcgcaaaaacactaacaccgttctgtgccctgccattatcagcctgaccgggcagcagcggcttcagcccgtacagagcattccagcttgtaagagccgcacaagacaaggttgccgcttcaaggtagttcaggtttcgcggggcgcggacgacgccgttctcgttgaagacaccgtactggcgcagggtgccgtcaacggcaccgccgagaccggaggcagctcccgcgggatcgatggggccgtactggtgctgctgattgaagagtgtgaccactttatcgcctttcttgaactgggtgaccttggatccgacctcgatgacttcgccggcaccatcggaaccgggaataacggggaaattgagggcaaagggatactttctgttgtgaacagctcctttagccttgctccttgatatattttaaggaaaaagaaacatacccttgggggataactagatcacggtaattgagcgaggcgccgtgcagcttgacgaggacgtcattatctccaacagcggggatttcgccttcctcgaacttgagctcgtcgaagcggttttccttgcccttgacggaccattgcttttgggtagtgggtgccattgtgaccttcaattgtgtctcgttcgctttctcgttcttgagaaacttttgggttcgatgaagtgggacagctaaagggaacgggatgctgtatttataagctccatttgacgtaaccagctcgaggtcccactcgcaatccacagcaattattcagcgaatttgatggaactgttttgatcattagccgttggcctttggttggtttcgtggttctttatagataccaaagctatactccgattggcgttattagatccctgcacaacggctatatcaagggcattatgtacaacgcctgggctgcatccaccgacgtcattagcagccattgtatgatataaactcgaaacacatcaacctctcttcttttctcctttctccttttctctctaagattctgaggattctaaatcaccatcttgaaaggactcaaattgtccctcaacactagtaacttccggtctcggcgccccagtgagccaagccacaaacactgtgcagaacgccggcgaccaggccacgaaaccagtcaccaagacagtcaatgagacagcgaacgagacaactaagccaatcaccaagaccgtcaacgacacgacctctagtctcccgggtacattccctaaagatgagccgcccacgaaccagaagaacaacgtcacgatcccttctttcagtgacctctgggcctccttcatcgcctggatgaagggccttattccccggggagtagacatctttgaagccgccgtccgccgctttatcctatggctcatcccgcctgagcggcaagcgaagctgtaccaggcgagtatggagcacccgatcgctgcgacgttcgtgacgtgccagctgctttgcgtggggatcccattaatactcttcattgcggggacattactctttgctgccgttgcgctattggtgtgggttgtgttgtcgattttactcctcgggccacttatgctggtggccagtctgatgggggtctcgctctggggatggggctggtttgtgtttgggctggtcaggtggttggaccgattgctgcttgggggaatgatggagcggtattggcaggcacagattgcgcagcaaaaggcagaggaggaccaagagaaagaaacggaaggcacgggcgagggagagggagaggctcagaaggagacgaatgaggagaagagggatggctaggctgttctgaccttgattctgctgaaccgctgtctacttatatgtgatttttatcgagtatggaaaaaaattggcgtcatccagccctacgcagaggtattgatctctttctcaaagaaaacccttgttatattgcaatctgtatacttagtagtgctgggtacgctcatagagctggattgagagaccaaggtcttgattgattcggcgattaaactcgcggcagtcatcacagactttataagaaggcgcagtgatcagtatggtagcccgcttcaagatgttcgttggcgccctttctgacaggcgattcaggcgctcatgtagcttccagttgtcctcgcacttctgtatttctttttctttcctcaagagctgcacgacttcccgctggcctttgagggtgacaagctctcggtcgatggttgcaacttcttctttcagctgtttgaccaatccctcgtcgtactcattcccaagcaaacggtcgtccttgtccaaaagctgtaagtcaagctctttcttatccttccgcaattggtcaaacttgcgtacgtcgggatatctatccaccatgacactgatttcgtgctctaggtgctcaatccttttgaagaattgcggattctgggttttatcttcctgcaggaaaacatgtcggtcgatcaaataaccgatcagctgtttttctgcgtgtcacgcgtagaacttcccgggttgaccctggtcatagcgatcatcaagacgtaggttatggcccacaatcttagatattttcatcaccctctctgtcaaatacctgccttcgtcgtgagcccagccgctcatggaagctttgggaggaaaatatccgtctctttccagcacagcaacagtttttcgtgacctcggcatagagtaataggaaatcaacaaatcatcagaagaccttcgaaagaaattttcgtcaagctcgaacattctggcatgattatctgttccactcccagactgccctccctcaagaatccgcgcaatctctcgccggtctgcgtctcgattaacgacatcctcgttgtagaggggtttttgagaggaatcacccaatgctccgcctgcggctatgtgcctctcgtcgcgattctgacgggtcggttgagcaaggtccaaagctctcttcttgttggtgtcacgcagggttttattagctccatgagaaaggagtatttccaccgtctcaagcctcccccagagagcggcttccatgagcgctgttcttccgttattgttgctagcattcacttcagcgccattctctaagaggagagaaaccatggccggagttcgctccctcgaggccataatgaggcatgtatccccttctgtgtctttcccgtggaggaaaatagacttgtcaggcgatgtttccaggtaatgttttacccgcttcacgtcgcccatgcagcagtctgagatagcatgcaagatacgccgctgcgtaaatggttcttgaacttccatttgtatggtgatctcctctgtggaatggtcaaagaatacctccttctttgtatctgtcagggccaagtaggagagtaaactggtcaaggacgcctcgtcatcggactcctccttttcgtcttcttgtaagtccataagagttcgaatattgacaaagcgagctttcggtttatcgatttcatagtccacaggaaagctgcactcatatggaggtctcgtggtggcaaatgcacaatgcggtacacgtgaggtacgtggatagtccctggagacaaccgtcgatgtgctgctgctagaattcaacccgtggcgatgaagttcctcacaataaggacatcgaacacagaattgctcgtcagtccaccagacgacctcagcgagcggttgggttcgaacggaggacattttctttttctgttgtgataacctagtatctcgttctctagcaaggtgcagagaggggcgatttagcaagtttaagtattccaggagatgcagtttccgtgtgattcaaattgaggacaactgggcaggaatgtcccatagcagaggcaaggctgacctccgcggcggaatccgcctctggtaagttggccgtggcactgttttaatgcataaagcgcagcaacgcacggaaattcactagctgaagaacgaaaaggcgaagtagtgacaggtcaatagttagttatcgcgaacaaggctgccatattacatagctgactttagcctcgcggtcagcctcaaagtaggttctctggcacggcacagcagatatccctgaagagagcatcagcctgcaataccagaaagcaacatgaaagagtaagtcactctctaattccgtaggcttactttacgtaaacggcattaaccaccccagctcccttaccgcatcagaacaaaagttcaactttccactctcttcgtcacgcgcactgtccagacccaaatccctccgcttccagatcgccttcacagcggccatggtggacggaacattactgacaggtttattagcatttaggacggagagccactctaggacctggatgcgcccttcctccagaaccacggaactagctatgaagagtgcccacatcggataaggaagaaatccaagcaaagggtccttgcgttttgtgtatctgtgcaagagtcgagagcagattggggaagcaggtattttggataatttcgtgtgaacatttggcaaggacgtgatgaaggtagatcgaggtggcagattggaaggctgacgcgaggagattcataatgtgcggatcttctttgtcggtcatcgagtacgcgatacatctctcaaggtagctgagtcgatgcacgaggttaacaaatccatgagccatggttgtgacgttcgtatgccgtcttcaaaatagcctggttatgcaagaaataatatctagtagttctggagacagacccatgcaagggtctattttcgttgatctgtaacttgtaagaaaaggaaagatggcacggatttcggtcgaccactcgaggctgctggggtatctaagtccattgctgcaccttgcgtgtgctgtggtgcctaggaatgtcccttttctaggaagaagctatacaccagctccaaaacttcccgactaaagacttctcggcacgcagtaccactagtactgggatagaacttgatgatcatcagtgcaccgttcatatggtatgtccactctctgatactcccgcttgctatctctaagaggcaatgaaacacgacgagaagcaggagagcatctcgctcgcacttagtccggcctagagaaattgctttgacttgtgaatcctgtgcaaccatgtcatggaggaatatcagtgactggcatttgcgggtgagtattatctggtcgtatcgggaaacgtcttggcttgcacattggtttcggaggatatgcgctgcccatgcaatagccatttggagcagtccttccgattgaaagcacaatgggaggatttttgagcgccaggggttctcatggccgactagagatcgccggattgtgcaggtatgggcgactaatatatggtcagcgaaacgatagtttggaaataatgggggcgatggacaatagtcaaagaagaaccagtcaacctctgcccgtagagacactgtgatttggagaagggtgttacgattgacgcagtgggcgagccgtctaactctgccccacggctgtgacaccggtattggactgaaccctcgtatatgcagcgaacatcatcggatgtagtgttaagccagtaacgagcgacatgtggcccaggaggaagtaaataatgcgtcccgccagatggacgcctcgttcctcccccaaacgagatgcccatcgaattggcttcatgctcccagagaagacggatgcaatagtgacagggcagtccgcgcttgagacactcactgtaagacggcttctcctctgatttcactctcttaacagctgcactgcttcgatcatgttggctgattaccatcgcatcgtcgccgtcgctctgagaagaatgttagatcctgcaagcacgatataggctaacactaaacacgatacatactcttgcaactccagcatcctaatctcgtgcgtcgaatacttgactttggaggtcccattacgaagcgatagttaggagagaaaaaagataaagtggggatctgggaatctgagaggtatatggagcagtcacgagtaaggactggcacaggatacactagttctattacaccaagccttctacccgattggagaaaccagcgcaggtattgataaagataaggctaaatacacgttcgctcatagagaactcttaactcgccccacccaagcatacagtatcattcaaatcctctggtttttccggatgaggattcgtagtgtagtccgaaagctcaaggccaggccaccatctccacttcttcgcgatttccgggtccagcgtcccctctaacatctctacaaggtactttccgataacggggaggaacttgaatccatgcgcggagcgcctattgcgatgtcgagattcttgtgccgcagatggggtgtgatcaggaagtggtagtcggccatgtccccgtccctagaatgattaagtcagtgcttgaatatagctcgacgattagagctgacgaaccagcaaattcgagtctcaatccattcctgatgagcggcttaggcacgcacgtctccatccacttacgaagccgagcttcaactacaacaggtgtcccatccttagggttgtcggaacggtatcagggaagtgatattcccattgaaggatttggcgttgttagtaacgaaatggactgcaccaatttgcatgatcccatcctcctggggcgggaaaaggatgcctagtagtttgttagcgctttcctgatacaccgccgcagtgacgtgcctccttcatatgatcaagaataggcatgtcgataaactcatcgacctcatctggcgtaagttgaatatggcccaccacatgacccttcgccacaatctgattctccaggtccaacgaactcccggtggcggcaccagcagccaggataatcttactgccaaataagctgtgccatcggacattttacgtcgacacaagtttgattgtcgtcgtaaagtagatgctttgcatatccggcactgccagaaacatacctcactccggca

SEQ ID NO: 5352 - DNA, 1668 bp, Emericella nidulans
cgtaagtatacgcggttttcttacgaggagcaggtcggccttggtcgatccaagaactacgcgaaaagacctgggaagatctccacagcctgtggtgggtttgtctcaaagaaaagaaccgtatagccacctcaaatttggagaggaagcgcctaaaggcaggctacggagaatgggaagccaaccagcggcttcgcactgtatgatttccttaagtcctgaaatatgatgaaaactgacggtgccacatagattcgcgtcacgcaacttaacattaagcacgttctccgagaaaggtggtatgcttgggaggacgctcagaatctttataagaaaggctaccgacctcaaaacgaggatactgaggagtcagcgtgatgtttcagagatcattgcgtacctttctggactttctcttttctaagacctgtactttctatgtgtagttttagcagcacaaataatatctgttttggatattgctcaaactttccactgagctatataatatgccctttctgtagcgaatcagtacttgtgagctatgctaccagagacaaaaagtctatgaatatatgctagaaattgtagctacttgatagtgagagacgagggccaaatcatgaaagaaaacacagtaccctgattgtatcttgattgtctatcaaaacgagaacaagatgtcgagtcaattaagcaggcaaaagaattcaaagccggacatcaccagggaagtgtgtaagcctcttcatgaaccactgtaaccggaacaagcacaagtcatcctgctcgtctgggtctaggtccgagtcctcttcctccataccaagaggaatgccttcagaccagcctacagcctgagcatgcggagcaacatcaccaaagatagcatcctttaaatcttgatcaacttgaaccaggactggaaagtcaatgagaaagctagcccagactgcagggggctgcgccggggatctgaacgaataaatccggacgtccgcataaacatggacagttttcttgaagagtagggaggcacgctgctgaacttcatttttatgtcttgtgatggtctcttcagggtggccaacactgaattgggccgtaaagaccgcaaggtatgtatccctagtgcgttcgtacagagctagcgggtgtcttacacaggttatatcgtgggcttcaagggcaagaagcatgtaatgcttccggcactgggcgcacatgttttcgagctcgtagcagggcatggcactatacggcgtgagtcttagcactggggtctaggagcgcttgtaatggcaagctgagcatgatataggctgtcaaggcctaatcgagctggactcgaattgtgctctgtcgctagctctcagccatgcttatgtctgggaaatgggataatatacatagcaggtcagacaatcattgcatcaaaaggagtcaaagtccagatctgactctgatgagtgcttttgaccatggactcgaagtggacagtcaaagggacattgccttaacccgagatcaacggttatgtgactgagctcttgaaccgaattacaatcagattgtgtgctgacagagccagacttgactgtgaggtagatatagcgaaccactacgtcactgatgagttgcaagatgctaacagatttggcggatcga

SEQ ID NO: 5353 - DNA, 2033 bp, Emericella nidulans
actggttctgtgtgaaggtgttaaactggctcttcattatatctcaaagaatgagggcgtcaacggttcaaaggggagtgtcatctgtactgcctcgaatgcaggattatatcccttccccatggctccgttgtattcggccacaaagcacggtgtgatcgggttggtgaggtcgcttgcgaggccgttggagagggagcagattcagatcaacgggtttgcgccagcagtgatcggtgagttttctcgatccgacggatatggtggcgactaaactggagcactgtagaaacgaatattgcgccgagctcagacctgttcaagacgatgatcctgacgccgatgtcgactgctcaacgggctgctcagcagtttgtgagtgatccttcgttgaccggcaagattgcggagttgcatggtgagcaggtcacgtttgctgagcctcctgcgtacgtggatgaagatacggggaggaatattgagaatttttggtcactggggtatgcctagagtggttgcaatggaatgaaaatatgcatgtattttgcttgccaacgcctgatactctatgtgatggtgataccggtacagccataacagtgacaaatgaaccgcccacctctatagtaagaagaaccccagtcactccagaaatcaaaggaaacacaaccaaagtacctaagcctttgaatataaatcgtaaccatcataattcattgtcatccttcaggagaactttgagcttctccagcttatcctcacatcgcacctccatcttcataaccacatcaacgctctcctttttggtaatcaaaagttgcgagacaagccaaaagttaaatccattcttgtaaaaacccatggaagcccattcacaactgctaacagtgttgcggagggtcaaccagtgatctcgccaacgcatcaatgccatgcgaatgggagccagagtcgagtcctcttgggcagcagcctgacgctttttacctaagctaggtgccgcaacaggttggttaatgccggagttgtgcatggatcgcataagaggagctaaacaggtcatgtgcgtattgataaaagcgtacaatactatagcggtcaggcaagaaaacgagatgccggggatggagcctaccgtgaatcaagacaaacatgtctagtaccgtcagagttgcaagtgcgcctgaggatgctgttggtgaaggaatatcacgtccgccagcctcttcgaacatttcactggacgcatcacgaatggtgatccctcgtgttacttgaaatcttggagcagcaaatggatgttcggaggcaaatactgagtcatagcacggaaactcccactgcagttctgtatgagaaagtcggcaagggtaattctgatagaagtcaaaggcacaatcgagaagagatatgacattcatagtactgtccgtgatcagcgacatcgagtcagatcgagctagagtgcctaccgaatacgacattcgttctgaatccatattttctcatcaatcccgtcctccggcaaatgccgatacgtgagcaaacctatccggcgcgcaacctgtagtcgcggttagcaccctcgttgatgtgcagacgagttttcataccttgacgacttcgctgaatcgaacctccatggcgcgactgctcgaaaccggccccccagcccagtactgagccaccaccatcagaaatccagcctggagggtctggaactgaagccaaccgtgggcttcgccttcggcttgtcggttaccgcaaatcgtcgcggccacttcatactcgctagagaaaatgtcgctggaaaagacgtatagctctgcgaggtcaaggagtctcttcgcagcatatcgctctcgctcgtccttcgtgtacattgcgcccatgaagactacagacgtaagaagtggcaatgcaacatattcagggttgaaagtcggcgcatggatcattgggcaattcgcgtgccagtacttgaagtataaagcagcgaatttctgaatgcgcccagtcgttaaaagaaaggt

SEQ ID NO: 5354 - DNA, 3056 bp, Emericella nidulans
gggctatggttccctgggacaacattctggtcagcggtggttgtgaccgggaagtgagagtatggaacatggccaccggcgaatcgatctatctactacgcggccatacgtcgacagtgcgttgcctgaaaatgtcagataagaacacggccatttccggctcgagagatactacgctgcggatatgggatctgaggacaggtacgtgccgctctgttctggttggtcaccaggccagtgtcaggtgtctggctgttcacggagatatcgttgtttctggaagctatgataccacagcgcgcgtttggagcatatcggaggggcgttttctgcgagcactatctggtcattttagtcaaatctatgcgattgcctttgatggccgccgtatcgcgactggcagtcttgacaccagcgttcgaatctgggacccaaatactggccagtgtcatgctatcctccagggtcatacgtcgttggttgggcaactgcagatgagcggcgatactttggtcaccggtggctctgatgggtcggtccgcgtttggtcattgactagaatggctcccattcatcggttggcggcccatgacaacagcgtgacgagtcttcagttcgacaataaccggatagtcagtggtggtagcgacggccgcgtcaaagtctggtgtctgcggaccggacagcttcttcgggagttgtcgacaccctcggatacggtttggagagttacgttcgaggaggaaaaggcagtcataatgtcgagtagatccggtcgtactgttatggaagtaagttggacccgctgtgtttcttgaaagtctctaacattctgtaggtctggagtttctcaccacctccagaagacactgagtttgacgcagcaacaatcggcgcttcgtctagtatatctgaaccaccaccggttcgcgatagtcacccaatacgaccactcgtacttccggatcttccgcaaagaagcgatggcgaccaagtaatggtggatgttccaccataaactgtggagtgcttcaacacgacaaactagcgtcttcttaatttgcaccttcagcgttgttgcttcggtttgctgcttctaacgagattccccgcaccgccggcgtgcaggattggtcacatattcactggttagcatttgcattctgggtgtttaggttcatgctgcaatgttttctgtctatggacttcgtggagttagatagggaatggctgccatactggcttgataccagctggaatcttatgcggaaattgtactcattttagtttgcgcctcaggaggtgctccttttgataacaaaaagcccctatacactttgcctttttacttgtaaatcagtgctatagcacgtagatctctccccatcgtaaaagactgggggatgatcccattcgtcagctgactgatctcacggatttagcgttctccgctcgatcttcggcttgagccatgcacaagactcttataaggtccagctactactacatttcgacagtctacaaactacaatctgtcggagtcgattactcccgtcacctcaaaaagcgctcctggaggcgggaatttatagggaccgaggcgtggttcaccatgtccgatcgccgattactagtgaggtcgtgtattgaacacttgatcgcggaatcgactgggacagtcgggtcgttttaacatagataccacgctcggagtacggcgttcagttcaatactccgatttgcctctactgagagccaatcaacatggtctatgctggccgcagccgtgggtgtcatttgtgccgcaagaggaaaatcaaggtaggacaaaatctcgcatttatgcatatttatcctccgacatgcttcgattgaccgttactcgttcgatcaacattatcactgggatttaggagctaaggacacgaaatctagtgcgacgaagcgcttccagaatgtggcaactgtcgcgtatacggccggccttgtccagggtacaggctcgaatccattttcaggaatgagacgtctaaggtcgagcagcttgtcaaaaagtccgctggttgcttagtaccttctgactccggcattcaacgggctcgtcggctcagacgagatgctagagcctccccttcattgactaactaccaaatagctgactccacgtgggaggagcgagctcgctgctatttcttcgatcagtatacatctggcgacgactcggacgaggctatgagctacttgtcatttttgccgtctctctattcggcttgccgggagaatcggcctgaaagcgccacggctgcgtctatgtgtctgtgtcttgctgtcgatgccacggccctcatgacgctgagcaatcatgtcaatgcccccccgcttattttgcatgccagggaatactatggtagggcattaagggaactacagcaagcgttaactactaagacgcaagctgttaaggatgagacctttgcgactatggtcttgctggcgctgtttgaggatattacaggcgagcggaatgggcttgcaagttcccatgccgcagggtttgaacttttgatgaagctgagaggggagggccagctggggaatccacgagggagagatctatttcattttgcatatacccatacggtacctagccctcaaggcgcgtccctattagcctaacatcccactgacaagtgaggtatacagcacgtcgagatgctcgctctccggggaaaaccgcactacaatacagactggatagtcgagcgcctaaacggcgcagacccaatcgcacgattgatcctcatcgcatccaaaatgagccagctgttcttggccacatcatcgctccaggcatcggcctcgacttcagcttcagcttcagaaccgactatcgcatcctccagcgcgaacaccaacacaaaatgcagacgacatctcccgtctcacccttctcctcctcacaggccgccaaatcgacctcgaactcacatcctggagtcaggacctgcccgaacgctggttacccatcgtagtctaccccgataaatctccctcta

SEQ ID NO: 5355 - DNA, 3227 bp, Emericella nidulans
  unsure (1)..(3227): unsure at all n locations
atattgatatcccgatctacttttcatgaaaatccaaccagtgaccttaagtagtgctcgagtgaaacatcccaattggagcttgatgtggtgttcgaaacattgttcgagaaggcaacttggaaaagccaaggagtccaagcccttctccacagtggccgctgcgcacggagatccagaatactcccgacttgtggtgcagtaatctcatgcgatccagaaacaaaccaatcaattcaggcttaggggcactttacagaaatacgaagagggcttgctaactgcaaaacctaccacccgtacatcggcggtagactagtgaagactagtgaaatatgtcatcaacgcccgttgctaattttgatcaggggcgaatccaccacggaagtagtctactagtcgaggcgtttgaggactcagcgagctctcgtcctttggcaagcattttgtcgttcgtctatggcgccattagtaatttcgcggagcactcctgcttggcttagcgtagtgaagattaacagtacttggagtaaccaatacaccaaaatgtctgtcctncacgtgttcagagctctgattagacgttcccagacgtttccatagtacatagcttatagcccgtcaatttaattcagtcagggaatccaataactgtccacgattttagccaatctaatcgaatggataaattacagagtactgtatacagaatcgagtacttctgttaacgcaatgagttatgtcccgagtagccgcagttgtacggagtatgtaattgtctcgtttcatttgaggctgttctatctttccctcagccacagctcaaagctgcaatctcctcacgctcgtctctccttacctttgtccccctcagtctttcttgattgtatactccttaagtattttccgtgtgttgagcaagtcgagttacatcaccgtgcttcgcctcccgccacccgcgtcggttcctgttcctgtctttccattccagaatcgcagaaaagtcatcctccgaggctgtgacgacgaccccaatctgatttcatcgcatgattcttcccatcaacccgccgcaagaaaaataattgacctcattcaaatcgcttacaaacaatcaactttcatcttctcgatagttgttcgtgcggcaaccgttctgcttcgccatccggaactagcccccgatcgaactcgtccgccgaccccttagaataacatctcgctccttacaatacgggttcattggtctccgtccctcttgtcgttggatggcggccttaaaatatacacaatcgaccggcaatcaatcactgtcctatataacaggcatatctttctccgcagacttccttggggcgtgcggaggttccttcgaaacacatgccgcctcctagaacgagagcggaggttcaagcccagaagcaaaaggagaagcttgcccaatcctataatgaactcctaaagtaaggcttatcttcatttatccctaggcttgctgcgcaaaaccgtgtctgaccatccctgctatttagagagttctcctcaaaagacctccgacatgttggaaactatacactgggcagattaataggaaaaggttccttcggcaaagtctatctcgcctcgcataaacttaccaaccactcaaaggtacctgcagagctatccaccaagccgtcacggtttatgctgatcatgtttaggtcgtgctgaagtcgtcggacaaggaggatacaaacctggcacgagagattcatcatcatcgtcaattccttcatccccatattgcgcgcctttacgaagtaatcgtgactgaaaagcttgtttggctggttctcgaatattgccctggtatgagctgccttgcgcgaccatatgcttgatgtactacaacagctaggtgatgaactgtataattatcttttgcggatatggccgttgcccattgacaaagtcaaaaagatatttactcagcttgttggggccgtgtcatacgttcacagcaagcagtgcgttcaccgtgacctaaagctagagaatatcttacttgacaagcacgagaatgtgaagctttgcgatttcggattcaccagggaatacgagggaaaagcaagctatcttcagactttctgcggcaccgtgtgctacagcgcccccgaaatgctcaaggccgagaaatacgctggcgaaaaggtggatgtctggagcttaggcattattctttatgcgcttattgcaggagagctcccttacgacgatgacgacgaccaggttaccaaagcgcggattttgaacgaagaaccgaaatttaatgacaaattccccgacgacgccaaggcgctcataaacctgctcctttctaagcggcctcttctccggcctagtttggacgaagttctcgcccacccattcctatccgagtatgctgctgaacagctagcaattctgaagcttcctcggccgccgcccttttcgacatctctagagaaaaccactctacatcgaatgaaaagcgcgggaatcaatattgacgatgttgtagatagtgtcatggctcagcgctgtgacgcgcttgccggttggtgggctcttctaatagagaaggagcagcggaaagaagcgaagagagaaagaaaacgacgagagcgggatgcagaagcaaagaatattcgccgtctaagcgcagcgagcagtcgcttggaaaaaatctcggctgcgctagttgaggtggacgaagagggctattcgaccgctcccttacatgaacgtggtcgaagggatcgccggagtctaccctcccagcttgccgtccctgaattaccaatgctcccggagccacctctacaatctcacaatctcaccacaccaccgcctcctcctccagtcgacaaagactcaattcgctcccacagctccacccgccgtctccctcccgcgccgccacccaaggatcgaagggcgatcacgccccagcacacttcatgcatcggcatctcaacctgagttagctcagcatggtggaattttcagaagacggaccgggcgccgacaatacccaattatcagccaactagcttcccttaagcattggtttgtggaatccgcgagagagccaagtctcactcccatgtcgtggtggtacgctcgcaggtcctgtcagaaagtgagcctgcaagggccggagggacaaaagacgacttggcgtttaccaccggcagcgacgactg

SEQ ID NO: 5356 - DNA, 3922 bp, Emericella nidulans
agagcagtcttgttctcatcgtcaactggagggtcatacgcggtcatccaatcttgactgaagctctttgattctgatatcaacaatatccctcagagcctcccgtgaaagtctcttgaaaacaatgaattcatcgatgcggttaagaaactcaggcggataggcttgctgaacgacatccatgacggcctttttaagctccggagtgatttccccatcagtcgaggccttggacgaatgaatgggatcagcgccaataagaaggtcggcgccaaggttagacgtaagaacaataagagtattccggaaatcgactttgtgaccctgcgcgtctgtgaggaagccttcatctagaacctgaagcaatagagcggagatatcccgatgagccttctcgaattcgtcaaacaaaagaacggcatacggcttccgtctgacagcttcagtgagctgaccagcgtcgtcgtagccgacatatccagcaggagagccaattaagcggctgatggtatgtttctcttgaaactcgctaatgtcgaatcgtacaacggcggtctccgtcgagaaacggaactcggccattttcttgcaaagctcagtcttaccaacaccggtaggaccaagaaacatgaaagacgcgagcggccggttttcgccactaagtcctgctctttgcatacggactgcgttagcgacagccgacagcgcttcgtcctgaccgcgaacagactgccgaagggtatcttccatgtgtatcagtttctcaacttctccagccatcagcttgctgactgggataccagttgttcgtgaaacaacggcaccaatgtcatcagcggtgaccgagtcatggataagagttgactgtggatccttttgctcatctccttcctttggcagttttgcttcaagggatgggatcttggagtatcgtagttctcctgccttagcaaagtttccttctctttgcgcttgctccagttcaaaccgggtgcgttctagctcttctttagtacgtttgagactctcgatttccgccttctccttttcccaaatttctgtcaattttctggactcctcccgtttagctttcaggtcttcttcaagtttctcgcgtctctcgcgactgctgatgtccgtttctttgcgaagagattcgagctcaatttgaatggtggtgatatcacggtccaactctcggatgatatctggcttagactcctgctgcagacgcaaagcagacgcggcttcgtctactaggtcgatggccttgtcaggcaggaatcggtcggtaatgtaccggttgctataagttgcagcagcaaccaaggcaccatccgtaatacgtacaccatggtgtacctcgtatttgtccttgataccacgtaaaatggagatagtagcggcgacagaaggctcgccgacttgaataggctggaaccgccttgccaaagcaacgtctttttcaatcaatcggtattcatttaaggtggtggcaccacagcattgaagttcgccacgcgagagtgctggcttcagcagattgctcgcatcaatacttccttctgctttcccaagtccgagaagagtgtgaagttcgtcaatgaacaggatgacgccgccttgagcttcctcaacttctttgaggacggacttcaatcgttcttcaaagtcacctctaaattttgctccagcaataagtgatccaaggtcaagagcaatgacgcgcttgcctttgatgctctccggaacatcgccttgcacgattctttgcgccaacccttccaaaacagcggtttttccagtaccagcggcaccgatgaggacaggattgttcttggtccgccgcgatagcacttggattgtccgatgaatctctgagtctcttccgatgactgggtccaacttgccggctttggctttggccgtcaagtcgacgccatactgttccaatgctgccttctccggctcgccgcccagattcatccgatgcgtcccaccgggagggtgcggtcgaccactagcatagtttctgatgctagagctggatagaggggcggcaatattcgttgagagtgagggtaaccgcgcgcgagggaggatgcgtaacgatggacatggtcgcacataatcggttcgaaggtgtgtacgtgaggtttgatgggcgcagcaatccactacggcttaactgcagccttgacgccataatagcgagtaggatatgtagtgtgttaaatttcttaaacaataatgtctgtctccctttcagatcggcgtcgcagtcaagctggtcgaagcctttatctactcagccattgaaatcaacgcgagccttctcgaaagctccacctcggccgcgaagggcgaaaagatgagtggcggaagctcgaatccagggaatctgctgggccgctgggcagccaagctccattagctactgaaatcacgtgccgaacgtgccgccttttatttcaccactggggctcaggcgaaaagggcttcagaacacctttcccctcctattcttctccctcttttattctctctcctttcagcaccacaatcatccccccttataatcctctcatatttcacaatgggtttcaccgacttcgtttctgacgctggcctcaccagtatgtctgcagtgttctctctaatcccattttcttgctaatcctttacccctcagttgccaacaccttcttcggctctcgcagctatgttgttgggtaagactgccaaaccctcccccggattgcataaacagttatcatgatattactgtcctctcctatgcgggcttcctttacttgtatgatgaaaacagattggtccgtgtttatgaggcggcttaagaccccgctgtatgactacacgacaattgcgagaaatcgcgtttctgatcccaggaagacttgtttttctgtgaaaactctcgcctttggcttacattcatgcttttgctgaagctcgactgactcgttaaaagcacctctcctcccaggcgattgttgtgacctcaaggccttctccagcgcccctgacgttaagaagtaccccacgttggcccgttgggacaagcacattgcctcttacaagccgagtttgggcagcctgcccggtgatgcctctaaggagtttactgcctacggtcccgagggtgctgagctccctaccaaccccaagacaagcccgctgctgaggatgatgacgacatggatctctttggcagtgacgaggaggaggatgaggaggttgccaagaagcacgctgccaaccttgctgcatacaaggccaagaaggaggccaagggtcctaagccggccgccaagtccattgtcactctcgaagttaagccttggggtaagtgcattcctgttggttttggctcatagagtactaacatgatcatagatgatgagactaacctccaggagatggaggccaacgttcgcgctatcgagaaggacggtctcgtttggggtgcctccaagttcgtcgctgttggtttcggtattaagaagctccagatcaacatggtcgtcgaagatgaaaagatctccatcgacgagctccaggcccagatcgaggaggacgaggaccacgtccagtctaccgatgtcgtaagtatagatacccgcccgttatatacgatgctaaaccccttctaggctgctatgcagaagctgtaaatgaaatgaccattataatgaatgtcaattgagtgatgacgacgttgccggtatcaaggaaaatatttatgtcatgaacttgaatgcctagaatgtggccaggcaatcctggttatcttatgaactaaaatcaacattatacccgacaagcactttttacgtctttctccgcgctttgtcctggcttaataatgtagacgcccaggtggcattggcgatatagattt

SEQ ID NO: 5357 - DNA, 2488 bp, Emericella nidulans
cagtacattggccttgtcgctatatagaataatgcgacacctgttagtcttcctcgtttcgctgtagatggcgacataataactgcctgtcccgggcgtagtctttcggctgtcatcaactgcccaagcagaaaatcaaacaaaaatcctaccaatcgggctcgactcctggaagtgacgatagacctctttaatggcccctccagttgtaaacctgcacttcgcccatgtcattaggattttgtggcactctcgacccaagctagaaataccggccatatgtcgaaccgagagatcgtatgctggtaaagtctccctcgcaagaagttagctacccattttttacagcctgctataatttcttgaacaacgcctcgtgcgtcgcatcttgagcagtcgagacaagacaagctagacgctactgagtcgtagcgaacgttctcgcagacaagtactggctacatcctagcaggtaagccccgaaaagaatcagttaaacattctattgcttgctcgtccgtaaagacagatgttcgcacggttcaaggttgagcccagagagtcagtccaccgcagtggtcctgcgacatcggcatgtatctggttagtatttcaacccaatcgatacgtgtattggagttccttctcgacgaggcagctagggtggctggaggtagtatatttgcctgtgaatacgatgttgttcatagccatggcttagtatttcaccttctactgcacgcacagcccccgtgaattatgcgtcgcggaatatatttccacctgcatgctgtgaaacatgggtatgccaatattcactgacaactgtaagcgggacggcaaggccggtgactggtatactggaaaccgccgtattcgctgtctacgatatgaagcacgtacaccagctcagaaagctcttgttcctgatgtaattctgcaggaaaataattatccagccgggacatcaggatacagaagttagtcaatatcttactacaacgaaagacaccacaggtcgcgcctcacataattagttgtacgacgcggttcgtgagggtatgttcagcgagttagggcacgggccgcgagagccctaatatcttatacagacattctacctttctaacggagactgctcagcatccgtttgtccatataacagactcacagtacaacggcaaactatgaagaccgcttttggtgcctcagctcagcctcgtaggcagcaaagcgtgcaaagggcggctgtttgtttctcagatacccttactgaagattgtttaatcgagaccttgatagtcaatcaacagcaccgtaacggaatactgacgttctcttttctttgatgaactcgtcaataacggctctaccttttctgaatgtcatcaacaagaggctgctaataatttgggtgcacgacaaaagatgaagaaaatggtttacctgcacgctgcatacatgcttgacaggtaatctttgttagtcgatgggcattatcagagtgtgcgtctcaattctgatcattctgacgtcgtagtaagttttttttgacaggcataatctcatcacagttggagaaaaggctgacattgactcaaaaaagccggtgctcaacggaccgctgcgccaagtcaacatagtttgatagacgtaaatctatgttacacttggttgaatactatcgaagtcctttataggggaacagattgttttcacggacgtcgagagccccagtaggttagtcttgcatcgaagcaacgccatcgctcttcttcctactgcggcattcaataccctgagcacccacagtacttaagcaacccatgattagcgccacgtgaaagacgttgatcaggactccattatacgcatctaggactgcaggcaactgctcttcgatcaccagtcccgcagtccagtcgcgccagcatgagtcaagactcgaaatctccagcgcagccagattctctgtcagcttggtggtgaagagactctgcgcaacgaaggtgaagagcgcaccaccgagaatctgcaggaacatgataatcgcagtgcccacggatacgtctgggagcgtaaggtcagcctgggcggccacaccacctttgctgaaatccgcagccgagacgtagtccgttgagagaaagagatccgacccaacgggactgggagacgtcgacagtgaacgttgtgataaagcccgcgcccaacgaggtgatgatgctgctggcaacgaagattggcgcgtagtaacctaggccagtcgtcaaggcgccggagaggataatgccgattacattggcaaggaccatgggaagggagtcgatgcccgagcggacggtgaaggcgccacggatggcttggaactggaatcagggcatgttaggcgaatggaggcggattggggttgtattacccagatagggatataacaaccatgaagaacggggctccgatgcaaagaccaaagaaagaggcaaacgca

SEQ ID NO: 5358 - DNA, 5757 bp, Emericella nidulans
tacaagggaccccaggttggatctgccgtttttggacaggacttttttttattttattttatgttttaggaagtcggattttgatctcttgggaccgacggttttcagataaactgaatgaagcagagaacaaaagctgaaatgaatcgtaacaacccgagtggtggtatccaggaaacccaccagacgaaaaatggggtagagcagacggggagcaggaaatgaaatgaaataaaagagagggaagaaaaaataaaataaaataaatagaataagaaaaaaagaaaaatcgaatctagcaaaacaaaaagacgagactgaaaaggatagagccaatgaggttgagcagacggtcaaggacggaccaagcatcaacccacgacatcccgtactcattattattgatttcatcccgagtcgggctgggaacggttgggtatagcatcttgtgccctgaggatcgaggatcacagggcccgaccaggtcctgcctgctctcaggtacctccccacaccggttgaaagcaagatgcgcctacagcttacacggcaggtgcgacaaagggcagggaggcagagtggagcgggtttgttgggaaaacgcagcccgatagtcgggttgacggagttcaataggcggactacgtgtgaaatggatgtcactactgtgtcaggatggatggatacgtggatggtcccggagtgagagtcatcagacagatgggtgaaaaggagaaatcagaaatcatcatgaaaaggaagcgaaggaggaatggagccgcggcgattgacccatcaagccctggattgtcgctccggggaagaatcaaggagggagttagaagcgcgctaagagggctgtaaggacgatcggctttccagaagtctgggttgactcttgagtagtgcagatgatagatctaacacactagccgactagcgcgcccctcccagggaaaaagcctggcaaggactttcgcgactgaggagtaattccgcagcactggctcgaagatccagatggtccttattcactaggggtcctggatttccaagtcgaaagtacagttttaaattatcgtagatgtatagtacatgtatagtagatgtatagtagctgagctgcgaagctgcaacagcattaaactctctgtacggtaatatgcggctggactgacaggcgacagtcaactattgtatcttgactgtccactatgggtgctcgtgactctatggaaaacgatcttgcaagctgccattggcgattggtctcagtagcaaacaaaggcaacgaggtctaaaggccttgttcaggagaaaggggaaaaatgcggtgtatgcgatccctcaaacagggcgaggccagacattcggtcaatgggagagtgggagccggtcaggagaaaacaaacaggtgacgatcgaaattatgattcttattcgaagacgacgagagcccagagaaatgagaattgggaaaaggtgggtctgatactgaagtgagcagtcgaggagctcccagtcccagtttcagttttttctaccccatacggagcgatagtatgactctgattctacggaacggtgagggtctgaaaacgggcatttcgtcattctgcctggccggagtgggcccaacgggctggctgatcggaggaaagacggattgacgtctagcgtggtgctggagattgttggagattgtgaccatgtcaaaaggggtaatcgagactcgtagacagattgacggatcacattctattgatcttgactcttcgactctcgatcagatacgccaggaaaccaatgccattggcttcgtaggaatgtctggttgtacggagtgcacagtgagcggatcggtacctggaagatcccatccctgtctaagtaaccagtccagcctatcgacgcgaggagacaatgcggcattgcagcatctacagctaatctgcagggataatcaaaactccaagacagatctattcgtctgctctgtaattgccgtcagtctgtcgtactgtcagcagaccgtaaatatgagctgtcacctaccagtatggatctctctcctattattcggtgctttgagactcgactctcctaaagccccgtacggagtgcaagcgagtgcaagctctctacccatctcagtaaggagcgggaatatttttccaaagactggaagacttttccggggaacgctgaccgtcatttcttctaagcagggcgtcacttcgtgctccgtaggtctctagtttcaatgactcgcttttgcagcaggaacagtacagagatttgcagttctcattgccgcctgaacgtggaagtttctatgaaccgaagcagcctgcttaggcgttgcatgaccaccgtaggcaatagacatcgtcctctgcggccatttcgaatggctcacgtggaccgcagcccaacggttgctcgcatgccgaccgagtcagggagttgactatttcattggctttgcagcagcgttagcttcgaagacacaatgggcatgaatctgttaagcgtctggattagcgcatctctaaacctggagccacgcgagccgaacgaggttggagaagaggggcagaaggaagatcgaacgatgggctgcaatcctgcagctaatctcttggcccaccacagagctcacctggcggaccagctccgatgctgtccgagttaaggacgccggagtggctcgatgccggtagtctctagtatgcgcacatcgacaacaccataacaaccgtgcttcattggagcttgcagtcgtatcattgtttgacgtccaggttccgtagcagggggaagtgttccaaacggaggctctactgaatggagagaccgcagcgttctcctgcgtatcatgagcggagttggggcacccatcactgagtcccaatagaggccagaaataaggcagtggttaacctctagaattgggacacgttcgctatagccgataagttggaaaattttctgctcggctgacgtgccgtgaatacgtatcgtatgcattgtgcgcacgcatacagacttgggtgcaaacgatactacgcaacctcactacagaactcccttggtctctgagctccacacactccacgaaacagtcccgttgtccggcggtgacaggtaaggaaactggacacagggacttaggcctcccatttcaaatatcagagtcatcgtgtcaatagcgacttccattcggaaatgtcggaaagcggatgaaaaggcagccggtgctgttgaggcgcgtaggtatgcatggctaccggtcaggtgagcactgaccaactcggctctgcgcgatagctcttccttgctgacgatccctgtgtttcaaaagaccgatgagacgagcatgcatgtgcgtcgtcgggatcaggccacagggaggtgactggctcgatgagctcaattgctgcagatggaaagggagaaccaaacacggttgaggaggaaacctggcctgcaccgaacttaagcggtgagagctgcaagcaaacagcacttacactgacagcgacgataccctggccgattctctcttggctgcatcgtcggcgcgtggttatttcgcctccaacccggctcataggctcgtctagggtccggatcctgctggcttgggcagaaaacaaaatcagcgggtggtttgacatttgtgcttgcatgctgcgctcagcaaataatatggcccttgtccttgcctgccttgcagcaaaccagagtcgaaagatacggtgagggcggcggcatagcaccgattgccgaaaagaattgttgtaatcctcatcttaacggccggcccagtttatgcaaggatattactcgcaagctgccacatttcatgacatcgatgctgagtctacgagaaagcaaacacgagcgaatgatggggcatcactagccagagctttccatcagatcgatactacgccctttcgctctggttgtcagctcgtcacatggcctttgaacaattctccgattggcacattagcagaaaaaggatgatcagcgcgcagaactgccgcgagtcaatggattcctggtagcaattattcggtcacggctgatgtgtgagccagtgtaactcgacggacatcccacttctgccaatcccgttcggtgggtttcctgattacgtcgagtttccggccatcagacagcacagcacccgttgcctaaccaattacttgattcagggccaaatcggttgtagtgttgacgtcggcttcatgaagattacttgccctcccgtgagtagcagctatgcggtgacgctctctttcatgcctgttggggatgaatgaacttctcagaatagcgtactgagtggatcagagatcgtcctcgatatgcagcccactgtgccggactgtcgggtcaatgactcaatgggcaacctcgatatacggtgccggacatgagtaccttaagtcctacgagccttggttatgacgacgtgcgctatacgtacgttgaaccgaaaagaatttgaggcgtgttgaaggattgatcaaatctagattcaatccaacagtgcgttgctggccgtttgagggagttgccggattggccgccacagccgcacttacttgacgatgatttactgtgccgctgcttgaatttaatgaataattaggagcagtcatcgcccaacgagcgcgtcagacccagttgttctggaaacattcggtacatatgatacaactctgaaaggatcatgcagggtttggccccagtgccggcggccttgatccgtaaaggttccacatataaattcaatcgtaccatagaccgacggatggtaacctaagttataatccattatatgaggccgattgttctgaagctccttctaggtcggcatctaacctaccgtgctcacccgttgcggctgccaactcctactgcgtgtcggctgacagcttggggctctgtcacactcggaacaaactaacatcaaaagtccgcatctacaccgtactttcgacagggatagtggcacaagaaccgggagacagacagaaagacgtaatctcaggattattacataacaaagtacggagtactccgtacgcagctgcgtacgtatctttgtactttgcacgatctgaagttaatttatctgtggatgcgataagtggggccgccggtggagtggttgatcctctaacttccgttgggcttttttgtgtttctctgccttcttcaaggcacgagctatgacccgaggccaatgagaacgagcctcgtccgactgtccgtcagtactcgaggcgcgtaaagcctcatttcaagttgagctgtcaccataccgctttgtggaagcaattgaagcccctggtggcaagcaaggctgggtgagtgggtgtacactgtaccttgcggagctccatagtctcatcggaaagagcgatccggtgccgcggcgacggatctctgacgctaaccatgggtctggttgccggattcaacaatccgtcacaaccgcctcaccactcagccagcccatctttaccttttgactttattgaccgtttcgagtttagacgcacattcttcgggcctcggtagtcactcccgggtcgccgctagggtgaactacgacctgattatcgtccggcccctcaaatcatgtgagcaactagccttctcagtcaccactgcagagattcacattcaagctgaaactgggccaccgtaaacgtcaacagcgcctatccgttgttc

SEQ ID NO: 5359 - DNA, 1605 bp, Emericella nidulans
  unsure (1)..(1605): unsure at all n locations
gttgacatatttctatcttttggagacttttcagcgccagcgtcgggaggtcatcaatataacaataccagccatatcattatcaagtattacttgcagagaaacttgccctctcacagtatatcaagattaaggcgcttgttcgtgcccagttttccccttctgtccattttgtccatgttcaggaccagtctcaggaacagccagctcagcaattgccagcggagtgccatccaattccctatacccaccaatctcctttatgttcttcgttaccgtcggtgactccatctcatgcagcgcccgaccggaagcatccagctcggctttctccctcgacgccagcatcgcaacccctatctcattttctccgccacctacattatgtccacttgtctccctctccgttcctttcccctctccagtgtaatcagatcttcgtccctcgctttcttcaaccaccggttgttcctgcccgtgttgctgctgctttcttctccttcgaaggagtaaaaacagcaagaagataatacttgtaaccgcaacagcacccactattccccccgctatccctcccttctgggacgctgacagtccgccatcgccaccaccactgccactgccatctgctcctgtttcgaggccaggtgtaggtgagttcgttgtcgtcgttcttgttgttgttgtcgtcgtatccgtactcggggatgaattagaagtaacattcaccatatcttcccattcgacacagcagacaatataatccggtccgacacacgggtagtcgggctgcagtagcgagttagactatttagtgtcttataacactcactcgtgtagggtggatagttgatataagagagtatggctttgggaggacgtacccgttcccaacgacatactcgcccgcgcaagtctggttatcacggttcctgcagaaaccattaccgcgatctgtctcacatcgtctttggagacagcactgttttcgcggaatatggttcgcgatgttagtaggttggtgtacttaggcgcagagacagataggagatgaggaagggcttgaagagaaggacgtacctcatcgtcagcagaatgttggcattgacctgtgtaaaggattcctttacctgtgcgtgaccacattaacgaagggaatgaaggaaggaatgctgatgacatacaactcgaacccggtctacatacgccggtgcctacgccgccgccgccgcagacgctgcttgagtttgagtctgattggcgacggctgagtgataaataagggtcgagggagtcgatggggttaaacaggtgcattattgcacggaagttaggggatcagttatattgtgagtttcaggttcaattgtatgtctatagaagtagaagcgcggccgtatggggaggcggaagaagggggtaggtatatggaggcatcagttatatgtacctagacatttaagacctactccgcaagctccacttgcgaccaagacatagcctcgacagattaatgtcgccaatccttggtccaatctcggtctctgacgcccatggggagaaaaaaaatcgcantggctacagtgtttcgagatggtgcacaga

SEQ ID NO: 5360 - DNA, 2472 bp, Emericella nidulans
gcctatttcaccggataagggatagctggactccaggatcggaacaggcaccggtctggatttgagggaccatagataaacagagaagtgatcgttcattagaacagcaatccttgtcccagacttgctaaacgctacatcaatagcattggcatcaagaggaagttcattgtgagccatagggggcggaacgcggatagtttcagaggcgtcaacttcagagtttctgtgagagttaacgaaatgagaccttacacaggtagtgtacctaatactgacttccatcaataacagcaacagctccaacatcattaggaggagtggttgaaccgtgaaaaactttaaaaacaaactcgccgtctaagattgactctgcagaaccattagtctgaattaaatcttatcccactagaacacaggacataccagaggctcctgcaacgaaacgcaaagctttttcatggtgccatttgtacgcaaaggggccctcagagcttactatcacaggaatttcctgtttcaggtagtagtggtagttgcccgaggtccaaaactgaattctgtccttgaactgtactgcaagaactgttgagtccacattccagctcagatgaatgtttgatgcccacgtagatcgctcctcttcggtcaaacgaagagtgaactggccatgtcgcaagccgtttctttcaaaaaagaccacatcaatccggtcatcgagcctctgaatgccggcaatgagatttccgtacggtctccaactgagagccccttctaggccatcaactggctcactcacgctatccagagttccctcacgggagtagaccctgattgcacgacgaatcccttcaacgatgctattcaccgcaacaaaggcgccgtctccgcgccatgtaatagttgtcctaccgtcatcattaccgctgagcttcccctcgtccaccttctccggaacagttgggtctcgcatagccttggctctctttccctgaaattgcgtctcacgctttccccagcccacggagacatgctgcgacgccttaaggtcatcaggagtaaaagtgatctcggcgacattctcaaactccctagtcatgtacaaaaatgtatgggctgaggtagtaagagccagcagttcctcgtcaggcgaccaggcggcagccgtaatgccaacatcgaccgagcccacaatctcgatcttatcctctccagggaggggctcttcacggacaacgataatgtcacctcctttcaagacaaggcatgccgtcagagtgtccgcgaagtaatgtagcgagagaacgtgatcacaatcaagatgtggcagcggacatggtgcatcccaagatgcgatagtgtcaaagacatctgggctcacggcatccgagaaatacacatccgcgcgttttctccggagctcgatgacagggtttgtgggcgtagggccaaatgtgcaaatgacagcatcggaagctgtatcccaagctgttgctgttagaggaagtccattttggagctgcacctctgcgaggcgcacgtttttcaaattgcgcatcttcagtgaatatgtggttaccccactgccatcgacaaggttcttcccaagaaaatgaaaatgactcggcgggaaggaagaaagaaaatcaataaaacttcctctccattagagcagaacagtatccaggtagtagatgtgttccgatagttttgctgttgtagcctgaatatcaaaaagaatttgattttcgcgacaaaaaatcaaccaatgacttcatccataaactaatgctatccatctacagtcttcgtgcgctaccaaccgtacagctcccgattatatcccattgccattatagggtacggagaaaattctgggttaaaggctcaaggccgaatggattctctaaatttatacacattatacgaattccccaagacagctcgatcccaccattgccggataccccaggggcgcgcggaggcggatttagcgggtcttgtaggtttgccagactggagaaagctattagacggcgttgtaagttaataacgaagatggtcggaaacataccagcaatagcgaagggagcaccgaaaccggtgactataggcacggagttagcaacaccaacaatcaatctacccactgcaggtattgaggaatactcactcatgaaagcccagtatctgaagaagaagtacttggtaagagggttgaaggggatgttggagcgaggaccctcagcgtagtggtaagggctggaaagctggctgcgggtggtggaaaagccacggcgggcaacgaaggaggtagccatgcgggcccggagagcggtagcagcgttcatcttcgacaagttcagtacaattggtccccaagtccaatgcagtacaggtttaccttgaatagaacagaagcgcgatgagatgactgaggcggagatactgatcgtgccatgcgggaaaagt

SEQ ID NO: 5361 - DNA, 3249 bp, Emericella nidulans
ctgctgctgttgctatttatcgctcccttgctgaccgatcatcctcctagcacatctattttttctctgtccctttactttcggtctccttttctgccgcagattttcttttcatttctccattaatagccaattttcttcactatgctttctactctaaaagtcgccagccgccaggctgcctcgcgcaatgctagcgtgcgctccgtgtttgccggtgccagatgtgcttccacctggtccaatgttccccagggtcctcctgtaaggctttgacgcatcgagattcatcaaaacgatgcatttttttttctgacattgcggctcgtttaggacgctatccttggtatcaccgaggcctacaaggccgacagtttcaaggaaaagatcaacctgggtgttggtgcctaccgtaaggaaccccaatcgagctctaaaacgttctttttgtcagatcttcggcttgtcttgatagccgtgtctgccaacctgcaattataaacagtcgctgatctatgctcttttacaccaggtgacgaccagggtaagccctacgttctgccctccgtccgcgccgccgaggacaaggttgttgcatcgcgtttcgataaggaatatgctggaatcaccggtatcccctcgttcaccaaggctgccgcgcagctggcctacggagcggactctcccgttttgaaggaggaccgtctcgtgatcacccagtccatctctggtaccggtgctctgaggatcggcggcgctttccttcagcgtttctatcccggcgcaaagaagatctatctccctactcccagctgggccaaccacaacgctgtcttcaaggactcgggcttggaggttgagaagtaccgctactacaacaaggacaccatcggcctcgactttgagggtctcgtcgaggacctcaaggctgctcccaacaacagcatcatccttctccatgcttgcgctcacaaccccaccggtgtcgaccctacccaggaccagtggcgccagattagcaacgtaatgaaggagaagggccactttgccttcttcgacatggcttaccagggcttcgccagtggaaacgccgataccgacgcctttgcgcctcgacacttcgttgagcagggccacaacatcgctctgtgccaaagtttcgccaagaacatggtaggctcagttatctggttgcctcaaggcatgcgcgttaactcaatttgcagggactctacggtgagcgtgtcggtgctttctctctcgtctgcgaatccgccgaggagaagaagcgtgtcgactctcagatcaagatcctcattcgtcccttctactccaaccctcccgtgcacggtgctcgtgtcgcctcgactatcatgaatgaccctgcgcttaacaagcaatggctcggcgaggttaagggcatggctgaccgcatcattgagatgcgtgctcttctcaagaagaacctggaagagcttggcagcaagcacgactggacgcacatcaccagccaggtacgtagttctgtggaatcaaagaagcgcatcaatactaacattcacagatcggcatgtttgcttacactggtctcaagcccgagcagatggaggctcttgccaaggaggtacgcaccacgtcttaaccacaatgtctcatctgtctctaacgcataatagcactccgtctacgccaccaaggacggccgtatctcagtggctggtatcactacgggcaacgtcaagcgccttgccgaatccatctacaaggtgactggttaaatcagcagggggatgtatagaggtagagggctagatcgatatattcttgcactgcctaaaggagggacatgtactgatatccgttttgttctattagcatattagtggcatgtttaaaatttcacttggatgaccgtttacacctttttttctgacctctgtgccttttgtcatagccatcgccatgctgttattgcgtcgggccattgcagtaacaaggaatcgtttcataaagcacctgggtcttcaggtagcagtccaggaagcctcttatgaccctacataactcgtgtggcggactactttgatatactttgaatagcctatggccacccagacccattgacaacccgaccgcaagtcccagtacctaataatagcctgaaccatcactaaaagcacgtttacctactctgtattttactcattaccaagcgcctatgttgtcttcaaaagcacaacatagtcacgaaggtacgtgcgtaccttacaacgggctgcagtgcatgcgcgaatgcatacagaagatacaaattcaagcagctaaccgaagcccatgaataaatggccaggtcagcgaggcccgaaacgtcaccgtaggcaggacatcaagattaccatgaggcggaagggcccatccgtttggctggcacgagcacgttaacctcatataggagacggggccgatgccaaggtgtagatcttgttttccgtacggggcgcgaatcggagccccagcttgggatggtatagcactgctttcacttccagaccgcacattgcaccataggaccgtttgactcgcacgtctctgtcgtgtcctacctaaaactgttggttttgaaagagtcgagccgagtcgagtcgagccaaggcgaccgagcaccggcgggacatgggcgtgggcacgttttggagcgtcgagtaggtaacgccgaataggcgaccaaaactggtttcacggcatgctcacgcctgcaggagatttacagagtatcgcttgagtgattggggacctggcctgttggccagttaagagcagtgaagcaaggcacctgcatttgggtagttcaggttaccttaataggtactgtaaagtattagccttgaagaaccctggaatacggtaatgtgttggcatgttgttagtagcgacctaacgttacatcaaggaaataatacttaccacgctgttggggatgagtatcctgtaggatgcatggttattaccataaggcagtcaatgatgtgctgtacgccgcaggatcgtcagctatcaatggggctgaacaccctcacaatgatcgagtactgcttgggttgtggcccacggtctggggctgaaggccgcgtattgagactgggttagactgatgagcggctaattcatccacacaagggagagtcactgctaagaatagcccagattacctaggtgaatgcgaagtacacatgcagttgtacaggggtc

SEQ ID NO: 5362 - DNA, 1161 bp, Emericella nidulans
tttaagacccggggcaccatagccgccgccctggtcctctttgtccgcacgctcatcttgagacctcgttacattatagccaaaggggggattacctcgtcagatgcagcatgcatgggcctccgtatgcgtcgcacccagatcctcggacaggcaacaccgggtgtcccgttctggcgatgcgatgagcctacttagaaattcggcggacataacggtcgaagaaagacgcaaaggccgcaaaatggtttgccggcggccagaacaagaagatcattgggcgagtgcagcagattgcagctgccaaagggtgctctatgagcgccgtatccatggcgtggctgctgcacaagggtgcctgtcggattgtgggcttgaacactacagaaaggatcgaagccgaggcggaggctttttacatacagattacgggcgaaaacgtacgctgttggaggagccttatcggccactgcatacagcctatatagagtagaaaaccagcataagcgcacatgcagtaatcaattcgacgacatacatttcttcataggtccaaagaaaacaccacacgaggaaaagactaaatctccacactcgttatgcgttgatcaaaaggcgacgtgacagtttttcctatttcattatttaccttggcaaggagattgaacagcaggcgctcaataaagccatccagccccagagtttggggccctcctttaagcctgaccatcctgacagctccttcgacatggtttctcatagtcatttcatcccgcgcccatagctaacccctgataagtatattgtatcccaaacaatggtgagagacggcgcctacctcgtcataagcgagcattatagcttttatcacactggcgtcggtaaaatgtgcggtctcggcagaaatctcctctctgagcgacctcaaaaggcgcagtttgtactggaaagccatccgcgagaaaggctctgcctgtggccgtgtctgataacactcactgaggtgacggcacgccgccaggaagagtacattcagcaggccgtcatcagaaagcgcgagcgggccccaggacaatgtcatgcgccggtagaactccacatctaaaccgttacaacgcataagaggaataataacagtcaaatcttaaaagaaaatagatc

SEQ ID NO: 5363 - DNA, 2273 bp, Emericella nidulans
gcagagaactgcgtctatccccgagcatgctgcagcaaggaccagtacagaggaaatcgtcttgtttatgagtacagagtgtaatgctgttgggtgggcactggcagaacttaacgccacattgcgagggaagcgcggactgatccaacgcgcagtcgatagctggaggaatagcaaccaggatcctcgactacggagccggcgggttagacgaatggccaagatcaatagacgacaaggagccctgccagcaccgccgcctcaacatatggctccgacaaccggggtcccccccggggtgtcaagctctagcatcgcaccagtcggcccccgtccatcacttggaccattatcagctatgggaccgccgcaactacatcaccatcacgctcaacctgacgggcccatccatgaggaagctagcggtatgttccgccacatatgatatgcttattcccttaacactccggcgtctatgctggcaatattctatgagctcgtaatggtcttttcacaacccttcttgtgcaatacgcgcgcaaggatcaccacgttaccggatgactggacgtttgctatgtacttttattcttgtccttgttcgtgttgttcctgtctggtttctctttcatcctagaacttaccctccatactcccacctgtctgctatgttatcatggatgcgtattgccgtttcataccctcaccgtgggcgcgccatatgcatttctgtgtaggctaattcttgaatgttgccttctctgtaggttccgccgattatgcgagtggtacccatcggccgctgccacctgcaccttcttctagtgggcactcgccaacagacattcgcaacgctcatgttttccacggatatcctacattcccgctctctgccaactcttcgtctggacatcggggcccctctatcccccctctgcttcgggataacggcctcgggtccttcggacgcaacccagccgtcgcaacttcgggtagggttgaggagatagaggatgacgaacatgacccaaacaaagatgacctgttcggcacactgcctgaaggcaagcgccgcaagtttattctcgttgatgatacgcagaggcctggctgccgtgtccgcgtcaaagtcatgctagaccaggtggacatggacgagattcccgactcctaccggatggctaattcagtgtacccgcgtacctactttcccgttcagatgaagactccacggggccaaggacttcctggagacaggtacatcaaggacgatacccagatcaatgatgttgacgaggacgaggccactgttgggaggaccatggtccccgctccgcaggtcgatgacgagagtgagatcgccgttcctaggatctcccgacgcaggcatagaaaggaggtgctgttaaacgatctgggataccgaatgagctggagccagagcagagtattctccggacggatgctgttccttcagcggtcttgtgagtgctctttcacggtttccacttccccggccgaactgtgaaaatttttgataagattggcgcgggatattgtctgagctaacattggctctagtggatgcatacagaaacaaaatgcgcagcactatgcttgccgccggccagaatgaaaattcaatcccaccacacttcgaaacccgggcaggaaagcgacggttccttgagcgaaggaagcgggcagctatgtctcgcgacaccgagcatacagtttctgcatcccagcacgatgccgaggaaatcgagccctagccgcagcgactggctatataccatttctctcctcgtacagcacattcttcaatttatgtcggcttcgaataactcctcaattcctctcacatttgcttgaccgtacgagctcacgtgaccacggccgctatgtatgataatagacagatgccagaaagtcgaacggccagaagcgttgtgtaccctcatgggcgccattaacgctcagatgcttgattttgttcggtgtctggagacacggttgaactttgtttcgattactgttgactatcctgccatacttgacgatttgatgtggatgattgatgattacgcttgagaaaggaaagtacaggacgaaaagagggaactgcttacctatgtcatgacttacgaatctgcttgcttttgccttttgtattggatttgttgtcattccaagggcgtcggaagttttaggtgtcggcgcagggcgaccagatattttcctccaacattaatgtgcttcgctgttcccct

SEQ ID NO: 5364 - DNA, 2032 bp, Emericella nidulans
cggtgggctcgcgacgaatagctcacaaaccgagctgattgcgaacggcatgtgcgctctccagcagcaacatgacgcagcaggtttaaactgccctctttccagaatgtcatttaagcgaagaatatgtagggtagctgttaatacgaaatgtaaagttcaataggaaaggcgggctgagccgttgctttggtgaagagtcaagaggcaaaaaagcaagaagcagggaaataaaaatcccgagcgaaaggcggcatcccggtcttttcacgacttcacctttcttctcttccttatcctccgctgctcctcgccaatcactgcgatacgataaaaacagtagtttcgcattcaacatgtccactcgtgacggaccaaaccccctccgtccttattacgtccctccctcgatcggactcggccaagacggcgcgttctcctcgcctccgaatgcttcgtctgcccaggtattcgggggctccgcacgcgacctgctcccggatttagactattccgactaccttgagagctcgccgtctgtctctggctgggttcgggatgctctggatagtgcgattcggcggtataccaatgtcctaacggcgcagccgtttgacgtcgcaaagacaatactccaggcatatgttgttccggacgactcctcaacgggacaatttcccaaaggcgaccggtacagatcgggtagaggcagtagaattgattcctacgacgatataggttccgatgaggatgaagatgtgagtaccgttctaggtggtggaaaggagctctgttaacaaatatataggacctttcatctgacgatgagagcagttacttcacctgtgcagggggtacagtctcatcaccatctgcccgacgtacacctaagcctcgtcatcgcatcaccgatcgaagcggttatatcgcgagttccccgtcctccaaatccgcttcccgacatgccctcaccatcaagaacccctcctcgttgatggaggtactctctcagctgtggacaaccagcggcccaacatcaccctggaaggcaaccaacgccacctttatttattctctactccttcctactctaaacacatttatccggagtctgctgtctgccattgtggggctaccggaggatgacattaccacgtccatggccagcgatatcctgacctcaacttctccgatggcaaccctagtcctctcctttatctcctcttccctgtcggcgattctcctgtcgccaattgacacggctcgcacatatctcatcttgactcccgtcactcatggccctcgctctcttctgcgcgccattcgtcagatcccaactgccaactacactattcccccgcacctgattccaatcaccatcctccattcgagtctgccaaacttgattaccgctagcactccgttgattctcaaattgtatctttctctcgaccccgtcctacacccgtcctcctggaatttatttagcttcatcggctccggcttagagctagctgttcgcttccccctcgaaaccgtccttcgtcgcgcacaaatagctacattcacctctccaagtatccgccagaactgcgctggctccgtccgttccacggcgtcagattctgcagccgttgccgcagatgtcgaaaccattgtgcctacaccacaaacctaccgcggggtcattggtacgatgtggagcattgtctacgaagaaggcgtccagcctagcccagaagctcaacgcgcccacgaactcctcggaaagcccgttccacaccgcaagcggcaaggtcagggcctccatggcctctatcggggctggagaattggcatgtggggtgtcgcggggagcctgggactcagtctccttacaggaggtgccgccggcgcggatgacggccctatgcccagcggtggtcgtttctaatccgtgcctaaagcacctttttttaaaacctttccgttaatccagtttatatacccatccctttcattctatctatcatccattcttaccattctgaga

SEQ ID NO: 5365 - DNA, 4213 bp, Emericella nidulans
ctcgacgtcgttgacgagatatgtggtaatatcctagctcattagcaactattatgcggcactgatatcccatagcttaccacagtgccacctccacagtcgcaaacaagcaccccgtctccaggctaggaatagcccgtcagtcctgtcgtgctatcaatggttttacctaccttcaccgcgcctcccagtttgctactggcgtatttgctcagcacagcaattgcagccgcctcaggctcggtgatcaagaagagtctgtcagacggccggtgcaatgttcccgcaaaacctgctctccgcgcggcatctcttgtagcgcgctgtgcccgatcagaccagattgccggtacagtgaaccagaattcgattggcgtaacttgcagcgtctcctccgtaatacttttgccaataatcttgaggatatgctcataaactttggcgagatattcgcaacgaggtcttcgggagatttattctctggcagctgcattataccgacatttgacgccttctctagcgcggagtcatcgtacttagtcaagggcgttccccgatcgagcagtagctttgtccatgcgtatgatatcatgccgggctctacctggaagccccagcagtctttattcagccgcgaattttccgctgcatatgcgattcgcgagggcgttttgtagacggtatcaatgtctcgagaaggaccaggccagtttgtgattaccgttatttcgctaatatcagttgctttagaacttacgtagcttgcaccttaagggatcatgttaattcacattaccaactttggaccaaagggtgatctctacctgtgaaggtcgtgccatagtcaaccccaacaataatcctgtctttattctccagagagatcccgccaaagcctgcgacgaatgcgtcgcgagatagcatctttggagctgtgaaggttgtgttttcaccagacaaatgtggtccgccgaatacgaaaatcttgtccgacgacattgggtgtatgctgtctgaattcctcaaggaaagaagacagcttttgttcgtgccggacacccatagccacccttgaaaacaggcctgaccgatggcagtctctcatacccttgtccgtctgaaacgttagttcgacgactcggcgagtcgctgataagcgcctagttaggacgcgcattaggcctgtgatagtcactgggttagcgccaactatttctaattccttcgttcaggtaattaaactctttgccggctgaaccccctaacgctgccactcagtcaaagctgagagtttttaccagcttcgtggctttagacgggtgaaacacagcttgtaagagattgcttctcagccttcacattgcaaacggccatggcttttggcgaaaaggtacgactctgaaaaacattaacattgcccctcgagatattgtaagctcattatcaagaagttcctatcgcggaaaaaaagagggaaggccgacggagagtcaacgcaacatggccagggcgccagcggcggcaacgacaagaccacgatgtcagagaacccgaaaggaattaatctatcgccagagaatttaaagtgcgaagaatatcagctcaggataactcagctcgaagcccaaatccaagatatgagcgcggatcatgatcaaagcaccaaggcaatcaaagacctaacaagcgagctacgtcagcagcaagtcatcacagagaagcattctgacgagctaaaactccgagatgagactattgaggctcttcgaggagagctttctgcttgtcgcgaagaacagaagctaaataacgtaacaaccggtcctcaagatggcctgcagtcattaacggccaccaaatggcacgcgcccaaagaggatcgctacgcaagagatgagctcttcaaaataggagatagaattcggcagtgggctagaaacaacagtgcgtcatttactgatctggacggtgtggcgacaagtgatacagattccgctgtaaagtacctaagcggttactgtgctgttagggactggaaggcgctgatcaacaagtttcctgtctccaaagacaaggccccagcgcttcttgtgcaagccattttggccaaggacctgtttgaaaggttgttcaaagaccctttttttgctttcatcgcaattgaacgcgacgaggcgatgccacggccagcgcaaatgcgtgtacttcaggacggcataacgagaggtacgtagtgaacactacgcaccctggagcataaacactgcttacctttttcgcagtcagcaatgacgacgcccatatctggcgttctcaaaccatccgcagtctttccactgcaaaagatccagaaacccagccgtttctcgcagcccgaatcgaaccagtttgcaggcagtttatatcagaactcctttctagcccaattcgcttcctacttcgtactagcgagaaatctacacaaagctataacaagtgggtcgaagagctactctctttatacaaagtggcagcgcagcttgcacttatactatggggacagcgagcttccatagctgttcggacactggatgagctaccactattcaggataggggacgaagaggttagcgcccaccgattgaataatctggacgaagaagacaccaggctagatgggaagaaggcgctgttactggtccaaccagccatattggctttcggctctgaaagcgccgaacactatgaccagcataaagtatgggcgccggctgttgtgctgcttgacactcaataggcgtgggccctagcatatagaatacggccttgtaatcaatcgcccagtggtcttctataccttcgattagggaataatattcgacattttgaataacatggagacctattctggtcctggtgagcgaagaacagcgtatatggattgtcaaatatatatatatacatggacttaaatctataacctgttgagccccaataaaaatagaaaataaaattggccaatactctagaaccacttccagtagcagatctgaacatcgtctgccaatacacgctacatatattttggtattctgaccatatattcttctatgatatctcctggatcttgcacatacttagatcgccaccacttaaattcttgcagatggggtccgattatagggccaactgcatttacacaatcctggctccgccaatctatgacaggctaacacataggctacttcttttcatgttgctgattttgattctaaaacggggtatgtatattgcaagattgaagtagcactccgttaactcgcatttgaactctttgggaaatctcgaggccaacgatggctttgttctcccctagaaaccttttgacgagtcaaaggaaagttacgagcgcaaatggttttttctgttattgcaagatatccctccaggtaactctaggtgaaagacccgagtttgccactgtccatggttcaggaccactacaacgtaatctgcatggcagatcgcgtccctcgagggccgcagcgcgattcggcagatttctgtaagtatatcttagcgacactgaatgtctatgtcggaattgcctggctgtgccattacgtgccttgacagtgctgagaacaacgcggctttgtcttctggcggcgaattcttatgtagccattggatcaggtgcggcgttaggtatgacaactagccctgctgcagctacacctgtacccgcacccgcacccgcaccctacactggtaatccgagaaaataaaatggtccgccgttgtgagtgctgccgggaagggtgggctgatcccgccatggatggggcatttggtccaggcacagaaatggcatagtcgattgtttgacagagatgaaggcaagcaggaagtgctggttaatcgcttggaactgctcatatttttccgcggcttcctgcgtagtacataagcgtagttggcacttgctggtgtatttgttggcaatactgcagaaacccattacgcacacttggcggcgccttgagattatgcaatatgtctttatatggacctagcccctgctcagcttggctaatttcatctgtttccaagaaatgactcaggtgccctaggtgggggttagtgggggcacttccctgagggacttaaggcagttggggcattaacttaccaagcccgcgatgtgaaagtcaaaccttttcgggccacaact

SEQ ID NO: 5366 - DNA, 5845 bp, Emericella nidulans
tggtttctagcagtcagccaccctttcctagaaacggctcaaaggctaacggcgtataacataccaaaagcactcggctcaatatcttcttcaaagtcatctttccgcggcgtaggcgagacggacatttgcgcacttgacagcagctggtaagacttcttctcttcaggttgtccgcaaattgtactaaagaatggcggtacttgagattcctgtatgagtttctcgttcatcatgccattggagtgagactgttgcttccatttccctggtccatctgccttgcgtttaccatataatcccgtggcctggcagggaacggaaaatgcctcttcgatccttcgtctcatcgatatttgaagcgaagaagatgacgtttgacacgatgtatgaatagacggggcgtggaggtggatggaagcgggtctcaacgtctacggagggcaagtcacctgctgacgcgtttttgtgcgagaactagtgcttaagcggctcaatggtgaggatggaaaagcccaggcccctaagaacatggggtagtcattatgcaattatgcttgaaggactcatccggcaaccaaaatatatcaatctcagggtagatgaaataccaggtactactaacccagcaaggagaattcaaaacagaaaccagagggtattgtagcaagcaaccgaaaatgaggatattgcggcaatatagatagtcacgctgtgagcatgtagagtataaagacgatgcttaagtatgtattttgttttacttccaaacagaacagccaatcagacaaaccaacacaacgttggattccacgcagtaaccgtaaatgagacgctcgtaaccatatcgtcaatatcagataaatcgttaagctttaaaagtacccgccgtttgaagaccttgaggcaccggacctcgtaacgcctggggacgtgggtcgcgatgtagatattcccgcgtcggacaagaagggtgtagtcgggagcttgatggagatttcttggggagatgaagaagatggagaagcctggtcactcttgctttccttctcatagcgcgcgacgcggattggcggtgggcggagcttagggtctgagcttgggagctcacaaagatatgtagccacaagaactgcaaaagtgccgacgaggtactgaacaattgttagcattgcctcgtttgatataaataacagaacctacagtcacggtcggctcaaagtcgaatagccagacactgccaagtgaagtcaagatgaatcgggtagctgaagcgacatttctagcatccgcgaaggccggcccaacaaagaatggcgtcgcaattcctccaagagcttgcacaatgatagtagcccaaaccacccagttgtacccctcaaacactccaccattagcgattttctcgccatccaggaacactacaccaatgaacagcgccggaaaaatagaatagaccgcaatctgcacgttgcgaacccagagcgacgtagactttgcactatcccgcataaccttctcgaagtatactccggacaaaccagaagcagcacaggatccgagagtagcaaggatgccgacaatccgatccatagacggagtcgcagtcaaaatatcctcttcgattccctcatacgtcgcagagcgcttgcgcaaaccctgaccttggagtttaaccgacttccactcctcaagagaccgcgggaagtcgaaatgcgtcgctccattatcgagcgagagctcatccgaggtgataacaggaacattaacaagggcgacgcctgcaatcagtagaagtatcagtccccatttgcgcagaggaacacttctctgcagcagtacgaggctaaacacagaagtcacgacgatttttaactggtacgaggtctggaatgtcgccgcaggtaaattcgatagcgcaatatattgtagcgaattggccagcgtatatagagcagccggaatggctaatttccagctgtcaccggagaaaatagccgcagctaaagtggagaggagggatgtcgcgggcaccgacggaggtgcggatttggagacttcataaagcgccagcgtcagggaaatggcgagtttcacaacctcgttaaagaacacggcagtcgatgtaaggtatcgtttgccgccggtagggggcatcattcgagaatagtgtactaactgtacgcgacaagaatcagtcaattgtcaaaatccgtgggagttgagcggggaaacaaaccagcacaaaagtggtatattgtatagtcaactgcatgataatttagaagtcaatcagcaaagagaattgataccgcagaaggagtgtttcctgagctcaaattagcaactcaccagcacccaagagccatgcttccaagccgcccccggccctgatgaccgtcgctggacactttcgcccatgtcgatagcagatagctagctggctgtgctttccagttataagcacgctcaaatgccgtgaaagaacgtaggactatcacaagtgaagtcgctcagaaatcgccccgtatcgtaacaggggttgaatttggtgccaccggactatttcatgcagagtgtgcgtgaggactagtccgttactgtccgcagtcgacctcgaccccgggcggtgtgggataatgggattgactcacggggatcggacgattcccctggatttagcaatttagcggaactttggttcaaacacacaattggctcaaatccctgacgtcaagttcaggccaaaatccacatttgggagggatcagcgcaggccgcgactgatctctgccacttacttcgagaggaacaaactccataacacgtttcgcactttgattcaagctgtgggcggtattatgaacccttgcttttgcagatgccgccgctgataataagatgacgttacccggacatccaccgccaaggcagttttgtctgactattagggttcatcgacttgtatgaccagaggtcacaatgcaaggagatcggcgatgtccactattcacttcagttttacggtgtggcaagctcaccgtacatgcaaagtattgaccatgactagtgagtagtggagcgagacagactgagccattatacacattatattattctaatcttgatatcaaatccgagacctcccacgactgaaaaatgcttccaaaggtcaaaaccatgcaacaaatgggaatcaggaaaccaaggcatcatggatatagcaaagacattaccgccagaaataatagaaagtagggaagggatgatgcgattcgcgcatcgccgagacagagagacagaaaatttagatagtaaggaaatgaaaagatagtatggcgggcagcaagattaatgcaccgcggtcagattattgttgtcattagcccatcccagtgcccagacaggaaattcgccgctctgtctggtatcctcggtagggttatccagaacaattgcgccgctgctgtctgtacgtcttctcgagtggcttctttgaaggtcgggaatgggagggggaggtagacgcgggggaggtttttgagacggtaggggcgagaagcggtgaataggaagggttggcgtaagaggggacgtagaagtggtagcaggagaaggaaggctctttgaggataagctggcctgcggtgacgggacagactttgtggctgtctcgtcagcttcaaagtctgtagccgttggagtcaaggcggctgtatccttatatttcatcgtgacttgacttgcacgtgccgaatcgggaggaatgcaagcactaagacgtaaaaacgaggtgtcggtgcagtagtatgagtttcgagaagggcccgagaaattcgagaacatcgaccgacgatcgacatcgatattttcgttgagaatgctcggggtaatcttgccctgccgttgtctcatcaagtccagaaggcgctcttcctgcctggccacggttataaggcggcttctcctgttgacctctttctgtgacaaccccgaagctcttgtctggaccttgctttgatcgaaaatcggatcgctgtgcaggaaatcaggttcgaggggggcccgagtgccgcttgaacggcgtgactgattgtttccattaaccaagggaggagctggaagatgcttcgaactggcacgtgaactcttagtagtgctcgaagagggccgttctacacttctcaatgttcctctgatagtatgcgcagcagcagcagtgcatatttcagcctcgtaaccaccatatgtactgacactatccctcctgtttttggccggcacggactgggacttggcgggctgcggttcgtcatcttcatcttcagaggaggaaaggcaaagcacactcgaggtggtcaagtctcggtttttcagagtgcttctgctactcttcttggacatggagttgcctttgcttcggggagccctatcgggcaggccaaaatggaatggcgaaggctcaagttcagggccgtctttcagagctttggccaacgcagggtcacgtaaagttcgctgagacgaatgtgctgattctccagacttatctgtcgcgaagctggagtcacatctcaggagttgttctctgccgcgcagactgaaattcatctggttataattgaatgcacgttccggagatcgtggcgttggcgcggcatcgaggttcttcataagggcgcggtccatatcggtggtacgaactgtccgttccatggtagggttatacacggatggagggcgctgtggagccgtctgacttgaaaggtcatcgagcggtagcatattttcctccgggcggctgagtgctctttggcgaggcggcgccttggtgagtctctttccagccagacggctttccgatttgtatgccttcaaggtgtgatgctcggcagggagttcggaagtgaaagagacagcggacggtgatgtaaccattcgctgcggggaaagaagagttgtagtgtttgtttggggtttaggaaacagcaaagaaagatcaatccttggaggtctccctttccgtttggtgtccttcattggtcctttgggttgtttgaatgctggattcagtccgccctccggaacagtccgactatcgtcggccgcggcatggtctttaccggggctggcgcttggatcggcattccctcgcgaaccagatcgagcattcatgccagaggatgacccgggtaggtgtagtttcctggacagctgcgcgaaagccgaagtcgaatcagcttggtctcgatactcctggctaagctgcgccgaggatgattgaacccggacgctcgcgggacgcgatgcttcctgttcatcctcatggtgatgtgcagtctcccgtgcattcaggtatccggcgcttctactagctctcttatccggtggtctatggtagtcgctatcgagggcaatatccatagtccctaagatcttctgggccttgtgcatagaacgggtcttgtggtctctccgattgttgccagcgtcgccggtacgaacattgatgctcgaggtccgcggtgggacgaggaaaggattagtcggcattatgaacggatatgcccttcagaggggcttggtcaatgtctctagggaaggagctcgtccctacggcggcaaactggagctggaggaacctgacatatatcggcaaaggtgttcgtgaactgctcgggtacggttcggtacacagtggttcgggcagtgtttcagccagaaaatgatgccttccccacactaccaaagtcggtgaagcataggattgatgtcatgaaacccaaaaaacctgcaccagtaataacgagtttgtgattgccaattctgtcaagagggtttgcgt

SEQ ID NO: 5367 - DNA, 2782 bp, Emericella nidulans
gagtgcctgttctcgtacgatctcgaggatcagcgcattatattaagttagcaccatctatgtgcgctacgggattttgctgtgcttatattatattctagctctctctctctctctctctttacgatatatgggtatacctgacactcgctaatgggcacattcgtaaaacctctcctagcttctactaacatcccgttctgcccatgtgctgttctgtttcaggcgcagaaccttcgccggcgggccaatatatatacaatgcagtctggatctttcacctacggatggcactaagacattactcaccataactacatagcgctcaggagctccctcggccaatagaacgtaatagcagaaaatattattgccctccctatcctcctcgccacatctttacgctattctaaaactatttggaccgggaccgttgtgtcacggcttctgcgtcgcgctattctgggaagttgcttgaattcaatcatttctattatatattgtatgctacctagagtcgagaatctcttatgtccctctttgttgtatttctaatccaaccatgctcctctcattcgcgggcagatttcgctttctgtaaggtcgtagccgacgactgatgcgactgtgtgccaaccatggcgaaaccacggattattatagcaatggcattctgaacccgagccctgatatgcccgacaaatgattgattgataatcgcgtgctcgcggtcagggacgctgctgtattacgtcatgtacggagtagcgtcggcgttttcgggtcccgcttttcgaagctccttccaacagacatcttcggccggacttctgacacaacctaacgcccattgacattccagtcctgtgtctttctttgcgaaaatgtttcatcgctatgctttccgctgcgctcaacccctgaggcaggtaagtgtttattcggcagagtccccggctttgtctagctcgattgcggcttgaataattgaccaccaatacgttcagagcgcccgccaatactccaccgaagcccccaagagcaagtcccttgcccccgtctatgtggctgtcggtctggctggccttggtgtcggattgtaccgctaccagtccggtgctgccaccgcagaggctcctgctgagcgtcccaaggttttcacaggcggagaccagggatgggtgaacctcaagctctctgacattgagattctgagccacaacaccaagaggctgcgcttcgaatttcccgacaaggaggctgtctccggtctccacatcgcctgtgagttctccgagcgcacgtattatggctagatgaacttacagcactatccagctgctcttttgaccaagtattctccccccgatggctcgaatccagatatccgccctacactcccactagcgatgaaggtacgctactgatacaccactcgtctggcgctggcgtcatttgctaactgaccattacagatcagcccggttacctcgagcttgttgtcaaacgctaccctaacggcccgatgtctgagcatctgcacaacatgaatgtcgaccagcgtctggacttcaagggacctcttcccaaatacccctgggaagccaacaagcataagcacatctgcttggtcgctggtggaactggaatcaccccaatgtaccagctagctcgcgagatcttcaagaaccccgaggacaagaccaaggtcactctcgtctttggaaacgtcagtgaggaagacatcctcctgaagagggagttcgaggacttggagaacacatacccccagcgattccgcgcattctacgttcttgacaaccctcccgagggctggaccggcggcaagggctacatcaccaaggagcttctgaagactgtcctccccgagccgaaggaggagaacatcaagatttttgtctgcggtcctcctggcatgtacaaggccatcagcgggcccaaggtcagccctaaggaccagggcgagcttaccggtatcctgaaggagctgggttacagcaaggaccaggtctacaagttctgagcaaggcttgtcataacttgcccggtactgtcgcctataccaagcgaatctgtttcttttaggaaggcatacctcgcttgtagatttggctaaaccgactagcggccaaatatagcagcgtgtgctgtgtgatgatagataggaaaatatttttttttttttgcaattactcaaatccctccaactttttgtatctgtagtggcgcacagatccctgctttgtggtgctgtagcctttagccatcactggccagagggcgcgcatgaccgagcgacactaggctatgctcacgccttcaattcacaaaacgactcactgcgcgcctggagtcgtctcacaaggagagttaacgtcgcatacctgtgtgggtccggtctaccgggtatgcgactgtatagagcttgccgctgacccgcgctctggtcgaaaccgatactatcgccgttacgtagaagctgcttaacattcggacccttgacggggtttatactctcctcggggcgaggctataaaggacttatgctgactgccggccacagtattcttactagctgcggcgcccattgtatgaaccgctccaaggcattatcgcatagcgcgctgatgctaggagatgcaattgccacacgtcgccagagctagcaggaacagccttcccatgtcactgcagtgcggccgatgactactccggtacccccttctgccaaggttgcagtctcttgggctatgcactcgca

SEQ ID NO: 5368 - DNA, 3821 bp, Emericella nidulans
ggccatcgaaggcaagatcgatgcgttaatggcctgtttaagtaaccagaaccagccatttccctcgccgatgaccacgttccagccgaggcaaccaagttctgagccgccttcagggatatctgctactccgtctgcgtgagacgatcgtgatccgccctggttattcacagctgactctagatgtgaagccaaaagggcccagtgcctccgaatgcgatacagctcttccatatttactgcaacttccagccgctgccgattttccatcataggtcgttcttcgccaatgaaaaccgggaccaggagctcattttggccatgaaagccctggggctgcgtttcaggggcaacggcatagcggacccgggaatagaccggcaaatcagagactggactgaacagtcaagacaggtggtgatggcccgcgtggcagaagggtctacggagctctcgacgctacagactttatgcatcctgactctgatcgaccacactgcgggacacacgttgagggcgggagcaaatatccggctagccgtctatatactccaaaacctgcgatttggaagtaccgaattcaccaatctggaggatgagcaggatgagcgcgtgcttttacgctggagttttcacatgctagcaagcctcatcggcgagccaactccgggacctagcttgaggactgcctacaacgggaatagtgcttcaactgcaaacgatattgggattgtgggatgtgccatccaacttagcgaagtgtggggattggcccagaactacgcagtcactgccatcacgtccgatgctcctcctccttgggcacctcattctgactactcgcggatcacgttccgacatacagagttcgagagcgtcacgccgttaagatatcgacttcacgagacccgattggatgagctgactggggcagacctgcatcggcaaagggacttctgggctcactgtctgtttttccagctggttttccacgcgataccttgccttctcaatcatccccttttgctctcggcccggctgcggaatttccgtcttaccatgccgcagtccttcttacagcactcttatgaacagatcactctgcacgccggctgggtcttacattttatcgagttgctagaaagcaagaactacgaagtctccgatcctacaatcggacaagcagttgtcattgtggctacaatctaccttcaacatagttttgtcgaggacatcttttttcgcgagaaagcccaatctggatacgacaaatgcctcgtcttccttaaaaggatggctcttcgatggccaaatatcaaaagacaggtcgacaacctgggcaaattgcgaaatagtatctccgccggggaggtgcagaattcgcgccagacgtggtcagtgaatgtccacttgcttcgagatatcctggtcgccgcgccgccgaaacaaactgcggcaagcattatggggcctggcctagccacggattgtgcacttcagacagactcaaccactccagatcctgattttgggctaatagggtctgcgggaatctcaggtcacaaaacagttgcaaggaacctagtcacgtactatccacctgagcaggtgctacaaccgacgcccccagacttgtccgcgttactcggagagcccgggctggctgtgacaggctcagctacagcattcctacagccgcaggactacgcacgggttcattgataattggttgaatcttcctcctgcatagttgcgatcgggttttaatgacaagccatcaattgctatcctactaccaagctaaatcgctactatcaacctgacagtcgatcttccggtagagctccatgtcctcatcaagcttgctcggcatactcaagaccggcattgcaggtcatatctccctaccctgtttctcctctgcacgatggctcacgaccaagtctttgacgttttgctggaagaacagtggtcccttctcatgctcgggatggagtttcccgtttatatacaccccagtgttcagattcctttgcgccgcattgcacagatccttgtcttctttcaaaacctgtttgcagatactgtcaattttgtggaagtcttcgtctggggcgtttatatgttggtacacttcatactgcatgtgcgatcgcgatgctgtgatggggacacaccgcatcagatagaagaggtgtggtgacaccgtcatgcaggcatcggaaagtaaaggtgctgattatccccatgtcctcatgatccggtctatctgtgtttgtaatgctggctatgcccagctttggtttacacccagtactttccaaggtcggtatattgcacgataccgggatggccagtcggacccggatagcactgaccatcggccatcgtttcacagggatggtagaccaaccaacctcgttatagtcatctgccaatgtcttccagctatagtcaccctcatatcccatgcgtgatcgaaccggtactgcgagaaatcaaacggcttcagccggggctgctcatccacaccagcagagtcatcctcccttcgcacggacggtgtctccaaggttcactcagatgaaacccagcttatcgatctggacgtggatcgggaacaggccgcttttctctttgtcaaagccgtccagttcctggtatcgaggggcattagcgagcttgccgtttattccagacgaccagcctataacatcaacactgaactcacacctgatgcagggaggcctaccgtgatacttgcaggcaaggatgttaaccgagccagcgtcctcctccaccaacgggtatgcacgatgcctgcagacattatggaaatcgtttatcttaccttgagggtctagaatgaggagagagagaagactccctcctgcagctggaggtaacttcttgtctcggtgaaccttggccggtgcgagacgagcatccatttctttgataaaatggcgcggcgctcaagactgtacatggcgtccaaacggtaccaagatgatggaagactcggcagcgcagcattatagctgggcttggattgtcgatatgtgaagaagcggttcatggcagcagcagagggacagatgagatgacggtagaatcacttcatcccccagcgagtgctttaccttcgtcattaaccttaccgcttatatcccgtatgaggatctttaactacctgcaatctcctcatttttggccgttttggagtaagtgataacgctgacaagcctcccctcatcggcggacggaacgcgccccggatccgctggaacggagtatacccgccggggagtgttccggatagctaccttgaaagcccagcctttctaatttcttcagtcacctctgcttctatcgtggataacagcctatttgttatcttcagaatggccaaccagaaaacagactcgattttggttatcggtgcgggggtcttcggcctctcaacagccctcgagctgaccaagagaggatacaccaacatcaccgttctcgaccgtcatgtccctcccgtggtcgatggaagcagtgttgacatttcccggataaaacgcgcagataatgccgaccctatctacgcgcagatagccctggaggcctacaagggctggaagagaacatatgccgacttctaccgcgagtccgggttcatcatgctttcagagactgcgtccaacccgtacattgagcagtcgaaaaagaacattgtcgaaaaaggtggtcatatcgacgagttctccaacgtctcgcagatgcgcgcccttatcccaggcatcgaagccgatcttccctcggctcagggg

SEQ ID NO: 5369 - DNA, 3364 bp, Emericella nidulans
tttcatcgcctttgcgaacgtattggcctaaagagtcagagccgagaagagccagcggcggcggctgcacatacctgaatcgaaatctcctcctgatcttcccgaggaaagttgacgaagtggtcgtacttggtacctacgaggaaggggatggcagttttgttaaagccacggccttgtcggtaccattccttgatggaatttagagtgctcttgcgggtgaggtcgaacatgaaaagtatagcgaccgcatcgttacacacgagcgggagcatgttgacgaactctcgctggcctcccaaatcccagatggagaaagtgatctccgtattccggatcgaaattgttttttccataaaattcacgcctggagcaatcagcaaccaccggcaacgaagaggccgcaaaactcacccagagtctgaatataatcctcgtcccagctcccctcaacatatttgaccatcaaactcgttttcccaatctgtgcatctccgaccatcccgaccttgatcaccacactgttttttgttgtctgagctggctgtttctgggtccccgataacccggagcttggccgtgaggaggtcggtggttgcggctgggggtcctgagtcggagtatgatattcatagtgggcgcgcgagtcgctgctgtagccattgtgatagctggtggaggggagggtaggttcttctgaggcggcggttgggacgatggtcggagtttccgtctccgacatgtgcgacaatccttgcgacatctggtctggttgatctagctcggtttgatgatgttgatgctctggctggttttcctggtactggtcctggtgttgtggttcggcttcaggcacaggcgcttcggcgaccgggggttgagcggggtccatgggcgtggtgggagaggttggagcacagctgcaagtggaagaaaagggagagatataaggagagtaagggtagacaaatgctggacacaaatagcagcagcaagagggactcgagttggacagaaggaggggagggtgtgcctgaggtcaacagagcaacacagccgcttttccagctcagcgatcgccgctagtccacgataggattagtgcgggctctccaaccttcgacaaaaaaaaagttcctgaaccctacgccggcttcaaagatttcatcatcgccctcactgtccgtgctgcacgactggctcgttgccgcttatctggacagacatattgtgaaaatgtcaaaaagaagtgctgacgcctccgaggacgccgccgccctcaaggccggtgagcgccccctcgctgatgcccctcccgatgacatgggcgagttcgaggacgaatttgaggacgaattcgagagcgaagatgagatcctggaggccggcgtggatggtcggccggatgcagagcgagaggaggaagaaaaaggtatgctgccgtcgagagcgccgtgaatcagtgctaatggttgaagccgacgcaatggaagtagaccaacagacattcatccccggtcggacgaaactggcccctggcgaggttctctcccctgatccatctacttacgacatgctccacactctcagtacgccgtggccgtgcttgtcgttcgacattgtccgcgatactttaggcgacaatcgaaagacctaccctgcgacggtgtatgcggtgactggaactcaggctgagggccgtcgggcgaaggagaacgagctgatggtcctgaagctgagcgggctgggcaagatggaaagagagaatgagacggactctgaaagcgattcagacgacgacgaagggggtgaagccattctcgagcacaagagcattccactcggctcgacggccaaccgtatccgcgcccatcaaaccccgcaatccgatatcaccaagccaccgcaaaccattactgctacaatgctggagaactcgcaagttgtcattcatgatgtcacgccgcacttgactagcttcgatgtccccggcactatgctccctccttccgcgtcgaagcctctgtctacgctccgaatgcacaaatccgaaggatacgccctcgactggtctcctcttcatcctctcggcaagctgcttacaggagacaacgacggcctgatttacgtaaccactcgcaccgaaggtggcggatgggtgacagacacccgtgcattccgtggccacgcctcctcggttgaggagcttcaatggtcgccgaatgaaaagaacgtctttgcctcagcgagcagcgacggtaccgtcaaggtttgggatgtcagatcgaagtctcgctcgccggccgtcaatgtcaaaatttccaacaccgatgtgaacgtcatgacctggtcgaagcagacttctcatctcctcgctactggcgccgacgacggacaatgggccgtctgggacttgcggcactggaagcctaacccttcttcctctgcccctattacggcatcaccggttgcctcgttcaacttccacaaggagcccatcaccagtattgaatggcacccgaccgacgacagtgtcattgctgttggatctgccgacaacacagttaccctttgggatcttgccgtcgagctggacgaggaagagagccgcgaggctggcttggcagatgttccgccgcagttgctattcgtccactacatggagtcggtcaaggaggttcactggcaggcgcaaatgccgggtacgcttatggcaacaggaagtggtggatttgggtatgtttctttcaccttactgatttcacttatgctgactgtcactgcagtgtcttcaagacgatcagcgtctaaaagtaacggtttgaataatgatatttcttgtttatatctcttgcatcataccatcgttgctgctatccatagactttgcaatctaggaatgaatgatatgacacaaacactggtcagctcctaatttctcgacgagggtatcgttgtgataatctatctgtctccgtcatttatctaacacggtccaacccaactattctaaccaagtctatcatagcaatctattccaaattccagacaaacccagccacctacccacggtcaggcagcatgccataaaacaaagatatgatgcatgcgatggccatatcgccgtctatctattccgctttggcacccttcttctcctcaaaaacccaatgcaaaacgccctcctttccaacatcattttcaacgcctacaaaccgacagttcttgtacgtctccattaaactccacaagaagccggtctcttcgcgatgatacatgtccccgagtacgggaataatggcattagtcgcctcctcggcatggtagaacgggatccggttaaacaagtgatgccgacatggtg

SEQ ID NO: 5370 - DNA, 2407 bp, Emericella nidulans
acgctcttagatcgcggcgcgcgctagccgtttcgagcagtactcctgaaggattggttgtacactccaccgatcatgccatggatcgttgtcatggtctgacggctcggctggtatttgcaactcttccacgatggcaagtcctctatagtttctccacgtccacatcttggagagagttttgaagtgattcttcctcctgttgcagtcgctgacgagcagcatcctcttctgcctctcggtgctgccgcgctgcctctaagacatcgagcttttgacgcttaggccgagggccttcctcccgtttagcatgggagctggactcttccagatttcgctgggaggtttcaccccgccggcgtttcattgcagtagctccgggtagcaaactcgagacgaggtcttcttcctcctgaaagctgtcaggttgctgagatggttcgcctgaagcagcatctatcgacatcggctgcagatcctctgtaggttcatccacctctggggtgtagaccggtatggaattgatgtcgaacccgtcgtcgaagactttcgttttggtgacatacttgtgcacacgagaactcttgactttcttcggcggttgactagcctcttcaggctgttgggactcgccaacaacttgtacattcgaagggggttggatggatgcaagctcaggcgatggctcttgcactatttcatgacggaggggccggcataaaatggaggcatcattgttcaagattgcattgagaaactcattctgctgaataacccgttggtcagtcatgagtgcaacctcattacacagctggaccggccagtcttgatttcctgtttttgatttgaatcgtacaagcactactccaccatcataatttctttcagatccaatgcctctctcgccggcggcgtttttcataaattgtacgacctcctccggggtagtcacaccctctttcacatcaagacatagcgctttcccgtgtccattagtgattgggtccgtaaggagctgatgctgggacttgtcgcagaaaacaaaggtatacccttcaaagacattggctcgattcgggttgggtgcgaatgcctcatctgagccgtcgaagacttctttcccaggaggcggaaggaactctttcgcgttgggccacgcagcgtcaaaatcggcctccaatggagacagactttccatattctccagatcactcggggtggacgcgtaatctagggcatcgatgaaagagtagtccacatgtatgtgcattcacagcgcttgtagtcctttccgggtatttcgcttagtttggacgacatgggttgtcacattgacgaggtattcctcgatggtcttgatatccaagccttccaagcgatcacgaaagcgggcgagggcatttttattgctttccttggaagagaaggaaaagctaagaacctttggctcccattttatgctaagcatcgtccaacaataagcactgagctcagtattttcgacatgcactcaccgcaaaggatgacgcgattttcccaagtatattatatgctcctccccggtcagtttcctgctgccaccttttatcttttcaccatcgattattgtgccggccttcgatttctcgtcggtaacgaggatttcagatcttttcttcgttctcgactaaacgcaatgggtcagaggggaactaacaacccatgattaggtatgcgtaccccatcacctgcctggacttgcgatacctcgatcgtcaagtgtttgcgggagaccgacgcatctggtaccgcttctcggactatatttggttacagtcgttagtgaggttcgttaccatttaggaacataaaagccatcataccgccctccgtcttgacacgaccaaagagatacttctttcctggtcgcagccacaagcgcttgccttccaaccgttagatcttagaaatttacgatgaacaggcataatcaccaccgaggaagtctccctccgtgtcgaggatccacatgaggggcacagtcagcgcaataaggacctaacatgacttgagttggatgagcgtcaacggatgtccggcacgtgcagcaccgcgatgaaaaacgcgtagccacgtgatttgttgcctacccgtaatgctgcctagtttggagatcaacgagcatcagccgcgaaaattctctttcattataactgcgacaatgtttcatggaggaggaaagaatcagtaagggtgaacagcccataataaaaggctacgagtctcctagtgtcgatgagagtcttaaatatcagctgttggggccttccttgataaaggcgggccaggactcggttgaccagagaaaggtgaggggaaaaggcttctcgtcttctcgcagttaaaccaatagtgagaggtctcgcgt

SEQ ID NO: 5371 - DNA, 3584 bp, Emericella nidulans
agtcaagggtatgggtgtagcgcacaggctggtagccccccattcctccactcgtctgcttccagttgctctgatagttgttcatctcgttgcgctcgttgttgaacttggcatcgtcaagggcgtgctcgagacgacccttcttgcgctggcgaataaagaagaagatgaacagggcaagcaggatggctccggcagcggcggctccaacatagacgccggctttggcacccgaaggcagatcgtcccatttttcagacagagactttggcgggggcttgttgatttcctccgcggcagtggagttacccctataaggtcagtagctgtcttaaggtaatggttcagaaaagactcacttgatgatattaatgctctcccacgagccagagctgtctccatactcatacgcctttccggtgttgaagtcgtgcacgcgcacatccttgacggtcatggtgtacgggcctttgtcgtagtcaacttcacctccagcccattcaatcgtaccctgggcattgttggggtcacctgccggccagataccgatacggacattgcagggtgtttgcgggaaagtgctctcggtgccgttcttcgcctcgtcataggtaagggtccgcagcaactgaccatcgacccaccactccaatttctccgaggtccaataagtggtgtagttatgccattccgtatcggcattttcaacatagtagaatttgccgtttttatagtctgtgactcccttgctgtagtagttggtctggatttccgtcgtattgtacccaacccattcccagtcgatttcatccagatcgtccgactgcaagaccacactactgacaataccaccgcccttggccatcttggcctggaattcaaggataccgaagaagatgtagaaggtggactggatcgtaggcgactcgagtttcttcgcaatcgtgaattcggcgccgtcatcggtgtagttgatctcgccattagtcacgttccagatcttgtcattgagggtctcattaaagccccaggtgtagttggttcccagcgccgggttgggttcacagtcctctttagtgggattgcagtgcgtccatgtctgggcaacaacaggggcgatagaggccgctagaagggccaggtttcgaaaaagggtcattttgagcgcgagcccgttggctgtgggcgaaagagcgtgggtttggcaggtgcaggctggagcgatcttacgatgccgatggggataaaagcaatgaagggcggtaatggcccggaaggagcgacaattggtaaaaagaaggaacggacgtgcgattgagacgcacgaggatgggatggagcccagtcaacgagggagagtgatgaagtcgaggggtcgaagatcgcgagggagagaacttggagaagaagaaggtggattcagggctcgggactgaacctgggaaaggaggctaaacgtattggtcggcggccgccattctgatgatttcatttgaccttgattatttttacacagcctatcagcttggcctgaccccgtggcgtctgatgctttttgttttttgtttgtttctgcagcggatggcgctcagggggtgtgcccgatcagagaggttccaccctgtactagtccagttctggctccgccaaagcacttggcttttgcctagtctcgttccagtcggcaggcgggggatcagcggggtctgccactgcccgtgatccaatcacacgctcctcaaagctcttatccaaagcaaggaatgctggctgactaagtgctcaggtacacagctgccaactgccgagctctgcatcagcatgtcttacccggctgtcttaccggtgtgttgctaagacgcataatgctcctgcaagaaaacgagccaactcaccagatgcatttgatgattcatcgattcaaatgaaagacatcaaagtgaaacatgtggacgacagggtgcttgggtataacccgctcaacccgtgattggctcgataacagctcgctcccaagtccaccggccaccacgactgggccgagtccaccgttcctgacccgtctcaacaacttccaagacttcataatccatcgttacggctctctttattagaactgctgcctggcatgcgctcggcgaccacgcgaattgtcgcatcttatccgcaagaaggggttcctgccaggactcaggagtcttgggctggaaaactactgaacctgagctgcttagtgttctaaccgtggcgaaacgggagattcttgagagcactggagatagctcgatctaattgccgaggggagacaatgttgatcccactgtcgatccttaggaagtttctgttcctcaatcaccctatcgtgtgaataggtgtgaacagtggggggcgaaaaatatgaaatcgcattgcccttacagctgtgtcagattgtgtcaactgtgtcaaatgctgtgcactgtactacagagataagctgggggtctttaacggttcgctgtacgggggcaagcacaggcaccgcctgtccctggcggtcactgtggctctccagtcaaaaattccaagacacttttcagacttgactgtctagccccattttgtcttgggtcggtccacttgacacctgagtcagtgatacttcagtcggtcgatatctcaggttcaggagtggccgtgtcatacacggcagtttgaggccgaccggagctctgtggtacctctgaacgaacgtcttatcagaataaatcgggacactccctgcatggcgctggcgccctgttgccgtcgccttgcatagacccgttgccccttttctcggacctcacaaccttgtcttgggagatgagctgggcctgttcgaatcatccgacagacttgctctcatgaaatccgcgccaaaaatagccggttatccacttgacttttgaatcgtccgcctgcagagcacgagactgccttgacctcccactttgacatcacgttcccgggcccgccgcccgctcgtcttttactaacgttgccgctacttcctcaagttacctgcggaatgacattggtttacttaacggtcgggtcgggcttgatcacctggcttcaaggctttgttgtggctaccatcatactttgagctagcggcttgagcctcgctttctcagggatggcccaaggactgtctctaggaagagtagtgcctacaagccttcttcctctgccccctaatcatacccattcagacttcgacatgtccgggacttggcggcacgtctccttcttcccagacgacgggttcgcttccaagctcaaactcaattaccccgccggtccgcataacgtccccatgctcaaaccaatttctcgtccacttctccccgttgatcttgacactctgcacgtagaccccatcctctaaccccgtagcgcgaattcttagcgtgttattaccgttgattgtcatgttcaggtcattgaaccacggcgaacctagcaggtagacgtccgttgtgactatgggatatgttcccagcatgcaccagaggagccaggtgttcattgccccagcatcggagttcccgggatccgta

SEQ ID NO: 5372 - DNA, 5012 bp, Emericella nidulans
tccattcgtcgagtaacttagacacttctttgaacgacacgggtttcgtgaggaagagatcaaagccggaggagagcgcttcggattcgtcgcgcacactgctcagccctgtgagggcgatgatggtcgccggggtaggaagctccgtcccgcgctctctttcgatggcacggatggcccgcgtagcttcgaaaccgttcataaccggcatggagatgtctgtttgatgtgtcagccgacgtcatgactgggtctgagaaaagagagagcttacccatgaaaatcaagtcgtaccctccaggcgttcgttctacagcgtcgactgcaagctgcccattttcagctgagtctagatattgcaatcgacgctttctcaagaaggtgagcattagattgaggttgatgaagttgtcatccaccactagaatttttggggtacgttccagcttagcggtagattccgccacgggctgcggtcgaagttggcaggacgaagccagagtcgacataggatcagacatctctgagctctcttgtgaaggcgttgacctgtctgagcccttggaatttggcgtatttgagctcgctccatcggtcgaatctggggtaatattcaatattccgaaagatttctgctcctcctctggtatcgcattcgccgcggtcaatagcgttgtctttggtcgaaacggaagcgttctttcagcctgggcctgttccgatacagtgcccttcgctgagtcaaaacatttctgaatcgtacgggcgagtttgtacggcccgcatgggcgagtgataatgctcactacgtcggcaaggggggaccattgcatgcgtgcgacttcgtaatcaatagacctgctgcaaaggataataagcgggggtagggacgtgagagtcgaaaaagtacgcggaagatcggctaacatatgctcgtctgctagcacgatgtcgacgggttgctcagacggccacgagaccagctcgaactcgtaccatctagtcagataatccgagatagtagaccacaaaagatgtgcgcgcgcatcagtaggcccctttccaattatggccgctcgtttgttggtataattgtgacgaaggaggtcacagtgattcggaggatccttctcggacgctgagcgaacgatgtccggctcggttgtggtgggcgaaattacctctacatcgtctccagggcgtgtgaggggcacggtgactctcacggtcgtcccttcacctgcgcgactgtgtatgtcgatgctgccacccaaggatttaaccagactgcgaacgattgacaacccaagccccgttcctacagcgagcgtgtcctcttgcgcgaatggagtatatagtcgaccgcgcaggaattcctccgagatcccttttccagtatcggacaccgtcaatgttatcaaatcctccgctggttggctatggcgatcgtcgttagattcagcggcttcaagacgaacacaaacgtggcctgcctctgtgtatttcatggcgttaccgaagacgttcatgatgatccgcctcaaggcacctggctgggcattgtaggtccagttattttgcgcgatgtcgacaactacttccacgcccatctcagcgcgaggatgactaacccgtttccctttgggcaaatccgcggcggggctcattggattggaggatgatttcagactgtatgcgtgtccaagacatacgccttccaccacctcctctgctaggagcgcaatatcagttcgcacggagttgtccaagccaactgatgctttaccactgaaacctgcaaactgttgcttcttgttttgtctcatttggcgagccttcctctccagcgaaacgatcttgctgaaatcaagaacttggttcattgtgtccaacaacgttaggctgcatgcgttgatggtgtctaacaactggccctggaactcgtccagatttgtgccgctcaaaaactctgccgctgccaatataccatgcaacggactacggagttcgtgcctattgagctattagcctgggtatcaaagttatcgcagagtgcttacgaaatgctgccaataaaatcgcctttctggcgatctgaaatgagtgattcaagacggctatgttccaccataatggaggaaccaaaccccagcacagagctcagctcgacggaggagctaaagacacgactctccactgtgttccagcagaagcatcctgcgaaccactgggaacttgcggcattccacaacgggacgaaaagtacttgggtcgcgttgggaaaataggtattaagtaacgtattttcaacgcttctccatcttttcggtgcgctctttgtcagctcctgggcccttgcagtccgggcactatttcttgagggcttggcattttcatcgtccgagctcgaaacactgccatctcgatgaaaggaccatagcttccctttgctgtatcggcgtataagctgttggagaaacccagtgtcgagattggccgcgggagaagccactgtcgatccgggcgacggcgcaaagggctcctcgttggtggacattgccagcacagaggccggggttacgttttcagcggtatagtcacttcctgagtcgatatcgagcgctggagtggtaccagtctcgagaaagacaacaccgccgtcgcccccaagctctagactttcacgtaacaaatttgcagctctcttgaacgcccaggaattgccatgggattgatcgagaccctcgagctccctgcgctgagtcccggaccaccattcgggaagaggagtaggtggattggaggagcgacctggatcgattttgtaatcggatattgagctgaaagagcgcgcatcgctgctgtgagaccttttcaaaagcccttcaacgctgttcgatgaccgtactgataaatgattgcctcttggagcagaaaacgggggcgagccgggcaaagtggaaacgctccctgtgtatgaagggtcggcagtatcgacaaaactcgagctaccctcaacaaaacaacttagtcctcgagatagccgagcggcccgtcggccctccgaagcctgtcggctcactttcagaaaattcatgatcaagactgaaatcgatcccatgatttccttttcctccacagtgagtccattatggggttttgtgtccagcaaaaagaagcagccgatattgatcttatggctttccgttgttagaggttccgaccggcacctcgatggttctgacagtggctagcgcgacatcacggacatccacccaaacatacgtgccggttggcggtaacgcatccttactgaacccccgcacgaaactgctgatccgcgcattggaggtgttgatggagtcaagggagctaaggtagtgcacgacaggtcctagaactaggggcggattgattgttgcaaggtcaaagctgggcttctccttctccacgaagtcccaaaccgagtgccatattcttctgcaccttctacagagccgtcacttaaaagccctgtctccgcgtcccaacggaggcaatcgcttcggttagcgaaggtggttaggactggaattgcgctttcgcgcgtcctcagccgttctaaccccccgaccactctagagggacttgttcctgactacatggaacctcgacaacggctacaggaaatgtttggtgacttcaatcatgactcccaacgagttttaggagcggctctaggactagggcaagtgcttgcgatcaggcggaaagcgatggagctcaaaagtcctcaacggcgagccttgattgaggaagaattacgtgaaggggccctggacagcccagaaatggaatactcaagacgcaatgtaacgaacactccgaatcatcagcaactcgacggagccctcgactcctccccggacacaatgatgaagcaacggtttgcggagtggcagcgggagagggaagctgtcagccgtacaatacaaatggcaaactcgagtcaagttattgttatcgacagcgatattgacaccccgagtccagcacggagggctgacgatgaagatatagatgatgctgatgacgatctttggatgccaaggcaggaaagaggcgaatgggagcaagaggaagcaggggataatatcgacaatgaggaagaggattatgatgatgaagatccctggcttccgaggcacaacgctcaccagagtgcagaagacgacgatctgaaagaagacgatggccaggaaggagatgacaacgttgaccgaagcccaagaatctcactacaggagaatgaacaacaacagaagaacgaacagcagcaggagacagatgaggagggggaggactacgacgtggaaggcggaatcaattatgatatttcccgaagtccccgaatccgcagtcaggacgaacatcttcagcaagcagggccagggtgaagacttcaaggaggatgaggagattgccgatgccgctgaagatgaccggtatgaagatatctggcaggagcaagctaaagacgaaggtaattcgggccgaggggttgtgctggaggctcggaacgatgtgcaatcgagtccatggaaagaaggctcaacccctgctggtcgagggtatggcacaacctttttcctgcgctttggtggatgggcagggaaagtacccacttggtcaatcagggacccgaaattgcagagcaaagagtcgacttctgttacgcaaggatctccaaccggccttatactaggaaagagcgccttgattgaacaagaccttcacacagaccttttttgttttaagtgaaaggctgtgaggcccgacgatcggtagaagccacgaaagctaggtccggcttacccaagggaggagccaatttcatgttcaacttcccaccctatgaccggaattttgaaacccattgtccgaaatttttcaaactgccggtaaaccgcaggaaattgtgaattggcccggtttactttaaattaaaataataatttttttatatttttttt

SEQ ID NO: 5373 - DNA, 16821 bp, Emericella nidulans
tgggcgcgcgcgggcccgatggtctcccaccaaaagaacgctgaatccattatgccacagaagacggcgaagaagacgtaggtgccgtatcccgtcctctcgatgagcggcagcgtgataagcccgatgatgaagttgttcagccagtttgagcacgtggcgatggcgacgcccttggcgcggagagaagaagggaagatctctaatgaatctacggatcagatgtgaatagacaagttggaggatagcacatgttagcataccggagggtatcgccaagcccaccggtccccaggcggcgccaaaggcaaccatatacaccaacaagaaagccgcgctgacccagcccgcggtctgatgcgacgcccagttggagctgtacctgccgaccaaagcagcaatgatattgtgtgagatggtttcgctgaccgagccggcgaacagaagtttacgtcggcccagggtatccatcgtccatactgtgctcgtgcacccgacaagctgtaaagagttcaggaccccagacatgatcagctggatgcttaagtcaaatcccattgtctcaaaagtcggcgagtaataaatcagcgcattgatcccggaaaactgctggaagaaaggaatcataatggcaatgtggatgcggcgccaggttcgttttcgaaagcagtctcccaagaagccatttcgcgcaggattgcgttctttattctccctccttgtaggtcagggagtctttctgcgttgatctggtggtgaaaactcagttcggcttggctgtccatgtactcctggcggacgcgcctgtcggttatgggcaacctgcgcagcctgctgaaactctgcagtgcttccttgttccggcccttggaggcaagccagcgaggcgagaatgagaggaccattatcccggcagctaggttgaataggggcataatttggaggaggaaggggagacgccaggaccattcaccggccatgtatcgtgtgccaaaactggtccaatacgaaatcacaatgccgaatacaatgctccattcctggaagacgagaagcgtactgcgacattcagagggacctaaagcggagtctgtgtcagtaccatttcttcccaggattcctgagcagggcaagtgtatctattacctcgcatatacgacgtaagactattgaatgctacttggtcattgctgttttgggagtctgaatatgccgccagtccgagaacccgattgcactacaagtgacagcatggatacgagttcgtcccatctttctgtcacctttttcataaggttgtactgctcgaggcggcaaagttgtgctccaggcttagttgcctgttatcgaaacggatactctagtatctctaccagtgcacacgacgataatctgtttgtcccaacgaggtacccgctcttctttcttgtcaggcccacagagccctcagatgatggggaaaataaccgtgttgtataaagcttcaccagagtggcactggatccgattattgcttgaggcacgatggtatgttggattggatgggataaagaacggacataagcagctaccagggtcgggcataatgaacagcaaaatgaacggctttagtctttagtataacgggctatattggagctatactgaaaggacagaggcaaggccgttttcccgtcaggtttatagaggagggtcggacatacgtatttgcctcaacgataagggacttccgaagacaatctcctcatcgagcttgccattagttctttttttacgcaaagctatttccatagttaaaggggcccatttgtatgatccggctacatggaaaacagaagatgttatctagccctaaaccagcattcgattattctattgggtggatatataaaccaccacgggcaagaagagtagtatcttgaatctacaaccataccgcatgctttaatccagcgtccaaaccttcattcaagccagccgcaagagtccatacctcgtctccctccccactaatatcgtagacctcgactccgccgccttcctggccagccaggacaacatacctgccgtcattgctgagccgcataccgcaaatgacgtcgaggttcgtccgtacatgccttatttctaccactgccctaccattatcagagagcaagaggatagcgatggcgtctcctgcaggtaacactgttagaatacgggtatcttggatctgaggttctcgctgcgcaatatgccgctcccacctgttgctggcgtaaatgacattcgaaatggtgggatggagacatatctcggcggaatcaatccttaattgatgagttggagggacgattgtgggaatgatgttaggtgcaaagccttgaattggtgagatactgagaggcgccgcggctggaaggagtctgcaggtgcagcagacaggtcgaaggcgaggatggtgtggaaaagctctccgaggacatatataatggattctaagcattagctccggtatatggcagatttgtatttttatttacttttgtcgaaggacataccatcaggggcgagtacggcatgccgggggcctgttccaggcggacactgaagccaagcgcatatttcaagttcaggcttggtctcgttcttgcgccgagagaggatccaaacgcggtctgatcccaggtctggagcttacagccgaccttgacggtcctccagcacttggtggacatggcattgtcgctggcggtctttgttggggccgtggcccgcgaaggcgtaggggaaatccggcaggatttccgtgcgagcatcatctctgagcaaaggcccgccggtgtctttgtctatgcagattggataaatgccaatagaacctcctatatactgtccgtcatcagcgagcgggaatcgacccttacgaggttagatggcttactgtggctagtgcgattgtggaacgggctcgcagcatgacaactaatagcaaccgctcgagtccggcattagaagaggtgccatagtctagggtatctacggtagtgcagacttacagtgggccggggcgccctgagtctgctgctggctggtggtcctgcaagccttctgggcgtggtcgatttcgaaagtgtacaaaagaccggatagagcccgacgagacggtcgacactcccttgcgaggcaactggctcggcccaggaggcattgaatgggctggatagtcggcgagaaggcacagttccttttggccacgtcgagcgcgaggatcgtgaaggtaggccggtcgccgggtagcagcagtctgtagctcatagtgaaagaaaatgaaaagagaataaatgattagaaacaatatgtaaaagctgtctatactcagagctgctgaaatagtgtggtatgtcaaagcccagagtcgaattagggcacggtggagagcaatcggggataagccatcggggatcaccattacaccacttttcgtccgatcattgttctccgatctaggattaaaataatcacctctttgccctccaagcaccccctaattaccagggaataccagatcatccccagaaatgtccccgccagcgcacttcaagctcaaccccggcgctctcattcccgccgtcgggctcggtgaatgatccgttctatatgcttactagtgactcatgcatacacaggaacctggaaatccgagccaggagaggtggcaagggctctcgcccatgctctcaagactgggtaccgtcacatcgatgctgccctgtgagccctggccctaggccttccattgtgctgtaaccttctaacaccgtggaggatttatggtgagcacgcgcataagaccacccaataaacaagccgccaagcacctggggctaatcccgctcaatctcaggaaacgaaaataaggttgtcagggaatacgggatagcggcgtgccgcgagaagagatcttcatcaccagcaagctctggaacacccaccaacccaacatcaaagagggattgcagaagacccttgatgctctaggcgtcgactgccttgatctctacgtaagccccttttgtttacatcggttacagaaggcgacgctgatgcatcacctagctcatccattggcccgtgcgccttgtcccggtaaggtgccctacaatggaagataaaacagtaatgcatatcgatccactctgacctatactctcagaatgaaaccagcgacctcctcccagtaaacccagatgggacgcgcgccgtcgaccgatcctgggaccagagcgagacctggcggcagatggaagatttctacaagtccggcaaagccaaggctatcggtgtcgccaactggtcaattccctatctcgaagagcttcttgccgacgaagtcacgcgagctatcgtgcgcggtagagtggcgcaggacgccctggaaatcggccatgccgggaatctggggggtcattggaacgccgcagagggaggcggccatgatgacgtgtgaagggtgtagtgttcgcgtttctttgccctccttgttgatcacgaccgtccacttgtgcttgttatcctcatcctgcgacggggtcggtcggccatatttccgtaaagttgagcgtagaggtttctttccagaatgtaggcatggccgttttgtgcgaggaactctatatttgtattctcagcacgcttcttagtatattaattgctttcgtccgatttggtgagcctaaatctgatgggttaagtccgatcctcacgacatagccctaacagcccttacgcccgatcccaattgacccagcggccgacacagcgcaacgtgccttagcgtgagtagttgcgggcttcgagggactgaaagcaaaatataagaataatgaatagcaaaagaattagagttggcttgacccttgttctcctaacatggcgattcgatccggttcttctcaatacaagattcgaactcccaagctcctcatggggtaaattgtccatgaaccagccatctaccgaaaaacaaagaagaagaagaagaagaagaagaagaagaagaagactgcactcgcaggcccacggacggcctggcgacggcagagtggtaggtcttcaaccagaggatctgtgctgctgccaggaacaagatcgcgcccttgccagatcagtccaagaacggcgagctctgagctagaggtgcggtagacttgacgtgacgaaaatgccacgggatgctgagccttcaatttcagggcctgatcgtcttagtcctttcagggattcgtcaacttgaacgggtctttccaagccaggtgcccctgccaaaccgacagtaagtatactatcgagttcagaacctggcccatgtgctattattttgaggctcaggccgtggcctgagcgcgactcgcttgttttcagtgccatatagaagctgggaccagctttatcctccaggcagtcgatgctgaatcaggatgagctacggcatgtgcctgatcactattgacagagcacggtggtcgcatagtgtgcgcgtctctacttgcgactccagtcctggttcaggccttcatggttttgccaggaagccgtacagagtggcacgatctggccttgccctatatttatctggaccaggcaccatgttttgggcctgaaagttcaggcacaaatacggcaccaatcaaggatcttacaacagtggttgcaaatctagaattgcaacccgcgtcccagacatagaacttcgccactgctcgtcgggtcagttactagtatcgtactagcataaagaataaaatgtctcataatcagcgtgatggattcgacgttccattggaaaaatgatgggggggaaatgaaccacgcgcacatgaccgtctttcctccttccttccttgggcccgagaggacaggctcagccaacaacagataagcctcgttcctgtccaatcacgcacaggcttggcgtgagtttgacctgagtaagcgtctccagaaagtcttctttgactctccgccaagaaaacctctccccccagactttcctaaaactctgcccacgcagtgttgatcggcatcccacatatctctctccggaataccccgctacgatgatcgcacggtgacatctaggtgcgtctgactctgggcattggacagataggagatcggacagtcgccgaatttgagtcatgccatgatgcaacccgtcattctccggctctcgaatcccagcctggcccagtccggggatatttctgccaacgcacaagccgcatggggctatcgtcaagggtctgttgcctgactggcctatcgaggcccgacggcctagccaattctccgaaattcgctcggttttcgataatgcaccctcatccttcggggggctctttcgtggcagctgagctgccgagctgagctgccgtgccttctattcttggcaactggtcctcttagcaccgtccttccgcgagaacgcaggtaggacccgtcattttaacatttcaagggacttggtaccttcagtgatgccgtgcttaaaaggtttctcgggcttcggcaatccttcctctgccttggctcacggcattccctttgtcttgttttttgccattccaccgccacggcagaaatttgtgttagctagcgtgcctcggcgtggacgttgaatccactcattcccccggatccagccagggatggctgtgcgcggcgcctcgcgtgcaaccccggattgcttaggcccttggcaagggcttggctcacgcggattcaggccgtcgtggagctggtcgtgaatgcaatggcagccatgaggggcctgtggagggaccggcttcgagggaaatgccggcgtggggggtagtaatagagaaatggggaaacgcgggatttggggattttggggtaatcatatttgcggtttgctgctgttgcacatcctccgcagcaaatgcgacaccgatgccggcggatggaggggcagacggcagacggcagacggtataaagtcgggcaaagccaccgggccgctcgagaggtgcagccgcttttgctttaatcgtggacattgcttagagcccgaagcgaaatcgttctatctcatttcaagcttcgagcatgccttcgcaaaacgagcccgctgagcctatccctgacgggatcttcgccgtcgcgaagcagtcctggggcgacctcttccgatggaagcagcgtgttatcattgagaacgagcagggcgagtcgtatgcggaatggcaagaccccgagccgttcaagaacccaatcagtcttctcatgctgctgagtgcccgtgactggctcttcttcctcgtcggccttgccgcgtggaccgcagatgcgtttgacttccatgcgctctctatccagcaagtcaagctggccgattactacggcaaaacgaagactgacatctccacggcaatcactctcaccttgctctgcgcagtgtcggtgccgcctttttcggtctcgcgggcgaccgcttcggccgtaagtggcctatggtcattaacatgattgtgcttggagtgctgcagattgcaaccatctacagcagcaccttccagcagttcctggccgtgcggagtctgtttggcctcttcatgggtggcgtgtatggaaacgctatcgccatggctttggagcactgcccgtatgaattccatctaactgaaactccagaaccgttccaggctgattgctcgcagtgtcagcgcccgtggcctcatgtctggaatcctccagcagggttactctctcggctacgttttcgccgcgtgcgccaatctcggcgtgggaggcgggaccgagacctacaagaccgtcttctggattgccggtgcgctctacaacccttcccagccacagagatatgctaacatataccagccggaatctccatcggcattggtctcatccgagtcctcttccccgaatccaaacaattcctcgaggcaaaagcagccggcaagcgctctgttagcgccggtgaattctggagagaaaccaaagtgatggtcggccaggaatggaagatctgcgtctactgcatcttcttaatgacctgggtatgtctttcccatctccctctgtgagaagagccttgctaatgaatgccataccagttcaactattactctcacacgtcgcaagactcctacacaacgttcatgttgacgcagaaagaactcgagaactcaggtgcctcgcgtgcctcgattcttatgaagacaggcgcctgtgtcggcggcacaatcatcggctacctctcccagtttgttgggcgccgccgcgcaatcattatctcggctttcgtctccggtctgataatccccgcctggatccttcccacgacggagcgctcgctcagtgcaacgggcttcttcatgcagttctttgtccaaggtgcttggggtgttattccgattcatctgaatgagctctcgccgcctgcgttccggtctcttttcccaggtatgcctatccatctcacctcggcagaagatacgtgctaacaaaaagcaggtctaacttaccaactcggtaacatgatctcctcaccgtccgcacagatcatcaacgccatcgccgagaagacattcatcaagggtccgtccgggaaccccgtagaggcgtacgggcctaccatgggcgtcgccacggctattattgcaacgggcatcatggtcacaacagcgtttggaccggagaagcgtggtcgtcgctttgagactgttgttgtgggtatgcaggagcagaatcggacggataagcagctggatcttgaggccgattctaagcctggggaggagaccgttgagcgggtagacaaggtttaacatcctcttttctgttttgtgtctgatgccgagaatgtctacggctgatgaaataagactcatgcctgatgctgagttggctgaattacaataatgacattgtaacgaacgaacaatcaatgagttcacgggcctagaaaccatgggttgagagcaaacatgcaacccggaaaatcacgtacaaccagacgcgagactacttcctttcataaacactaatcatatccgtccccctcccaacctcaaacgtcctttcaggctgcacatacgccttcctggtaaacttcccttgtcctgtatcaccgccagccagcagctcccaatgtatcccgtttacaccccacggcggccctggcagcgctggatccttgtacatcgggaactcgaggcaaaccagcaatccgccgggacgtaagaggtccgccatccgctccgcccagcgggtgcgttgggcggggtggagggcgcataaaaactaggtgtgaccagtgagccggacgtcggaaatacggcgagggagcgggaaagaatggctcagctcaccgtataatcatacaccaaatcgaacttgccattctcagtcctaccctgatccagaccggtactctcattttcaatccaagtatcagtgaagaaatcgccctgcaagaattgcgctttcccgactcctatatgtctagcacgctctctatcaaaccttctaccgaagttcccggactgcggagaacaaagctccttcttcgcgaaggctctcgcctctgaaacagcagtagtagaaacctccaggccgcacgcgtcgaacccatgcagcgcaaaggttatgacatcgtagccgcgcccgcagccctgacaccaacaactttcgttagtcatagagcaagaaaagaaaaaaagaaaaaaagaaagatatagatgtttggtagaggaatagcagaggcgtactggaacaagcgccctcttccttttcctcgttttacctgcatcactactgtcttcctcatcctctatatcgatctcaaacgggtgcagaagcgtgtcctggtacgactccagtaagtcaatgagtgcaggcgaaggcatccctctatcccagagggaactcttgcccgaatcccacaggtcagaccatgcttttgggtgggatggtgtggggctgatagaaaaaagttagctaccagtaaggtgatgaaagtgaggactgggcagtaccggttctcgaagtgggagatcagacggccttttatgggttgttgtgaaggcgaggacatttcgtagacaagcttgtagataaatgatggatggttcgcaatcactgggtcctttcagttgcctttagtcttggctctctttctggtcttggctctccactatagctccccacaatgggctgtggaacaggaccagactatgatagttttatactcagaaagcttcaagattggtcgaaccgcaatagaccagcttgttctggtatccaattacggggcccaagtatttcaactactccctgccggcgctctcacaggatatgttgctttccagcaattggcgaccagcacagtgcgatatcccgtgcatatcacagttgagcatacttctcaagacagtaagttactctaccactgcatcagttgccagagttgtatctaaagaaccaacaaattttttgagcatcgaagccgcatctcagcagctctatttttcaaccaacctgtgcagagagccaaacatctacgcctacgaagtaacaccttgaaacgcctccacacgaaggagtggttggaggagagctgctaagaatgagcttggtgcttggtacttggaatgtgtattgaggcttctacacttcgctccggccctggaattccttttcgtgctatcctatgagaaagccgacttggagtaggctcgggagtaggcacagacgaacaagatgaataagataaataagatgccaagctatatttggagaaccgggcgggattgccttgcttaagccttgtaggggcgaaaatatatagtaagctaggggaaccactcgcggatttcctacaggcgttccaacatggttaccgttcagctagtgaagccaaaccacttcaggtcctcctccccctggatctggatattatgaccgacgccatcagccaatatgccctgtaaattctcgccccaaatagtcttggcccagccggccaccggcgtatcgttctgcacctcctgtgggctatcatagttgtacccaaagacaccggcccactgcttgcatgtctcgtagtagttctgcgggtagagagttgcgtcggcgctgccgtggtagatctgcatctttggccgggatccctcatagccggagtacatcgcctgtgcgatttgtgcccagtgctcgggtgtgctgattgactggccctgtgcgcaggtgctgttccattggtcttcgacgttggcttccgagtagaagcatccagctgggacgccagcgtatgcaatgcctgctgcgaagagattggggtatgttgctgccattacgttctggggctgttagctctcatcgggatggtttcagaagggttgttgtggtaaagacgtactgtcatcattgcacctgagctggttccagtgacatagacacggcttgcgtctgcattgtactggttaattgtccagtctaccatgtttgcaatggagttgctgttgccgcctccattgtgggttagagttgactgcgagctgacatcccagcaggtgcctgagtaagggctttccgggtagatgacgatgaagccgtaggtctctgcatactgcgcgtagggggttccggagtagtatgcctgggcggttccagtgccttggaaattcatcaggctcggtggttcataaaggataatcgaggggtcatacagtagtggatcgccacaattattgcagggttagacgccagattctgcggcacgtaaatgtagaagcccacgtttgtaggattgtcgccaaaatccgtaacctgcgacaactgcccaggcgttggatcacgtcggtccaacattagggcagtgcagctgtaagcgtatagaagaattgacagaagatattgcagtttgaccatggtggctgttagtcgcaggagtgcgaaactgatcaagcaatgagcactccaaacttgaaaccggatggtgtcttcatttatagtccattcctcccgtgacgcccatgcattttagcctcagtaacccctcaatcagtcaaactggctaaacggcgacacggggaagagaaacgagtctccgtacccaaaacgccaagtgcgggatcgacaggcagggctgccctaatgaaggggtttcgtcacggaaacgtctgagtttgatgcggataaattgcttcttctgccctgctcactttataccccacatattacccctgcgctggcatgtttagccaaaattgctacggcgattgtccccgcgccgggttgcgacgctgcaatggggaaccttccgttggtccgtatgagtttcgaccaactcccgcagtgtcatagcaatcgcacgacgaagtcgccctctcaacagtgtttgaagtataggctattcagcgctgctgggcccggacatggccgttggcatgcaaattgctatggtgcagatcctaccggttgacaccatcagaaggtttgtgtcggatctagccgttgtgaaccgatgggcaatgacgatcagccttctgcatgaaaatggcagaagactagaattggcgcatacaagagcgatgcactgaaaaaaaatgcagatacgccgcgctgttgacggattcctgctatctaaaatcaggggagaggtggcatagcagatgttgtaggtcgaactgcgccatattcagctttcagcttcttcattcttgtgtgttagtgcaacaatgtacttacagagatcggcagactcgacattgtcacgggagggtgaagaagtgatggaacacactcatcacctgaccattcggcccatgtgccaatattcttatcttcccagtcttggatcgtcatccttctcaaggtctccccattctttctccatcctcttcttcaggcactatcttgtctcgaccgcaatccgtcttatctgtccccgctctaccccaaaacaaactctcaatcggattcgttggagatacggttccaggcacgggctgcgaaccgctatcccaatccctgccatctcacctgctcggaggtagcttttgtatgccaccagatcctagattcgtcttggccacaaacgcttctccttcaggtatgtccatccgaatactttgctctggcgtgtcgcttacattattactccaaggtcgtagttccgagtttgcggaactgcttatctggcggttcagccgacaccgcaccaggtgtagacagcgtcgagagtggctgataaggatggcgacattgatagctgaattaagctacagagcttcggcatataataagtacaagatctcaagatgaggtacccatcacttcacgatcgcggactgcaggaagcccatactgaccgtgatgaagctccccctttcgttctctggaggcattgctttgcttctcattggtagcttagcaggtgatgttgtcgctaccaaacttgacccaagccgcgacctggtacgccagaagagccggggacggaagaatcagatgcgcagcctcgttggccgctccaaccagcatataacccaccagtccaggccctatactaatgaatatgcatcgccatgccaaattaccccgccacaggagatcaaggccccaaaggagaatgtctggtatggcctcactgatgacgaaacggcggatgttgcgaaatggctgtttggtcgacccgaattgaatcttaccacaacggagaatgcgggtgaatgggacaacacgatgtaagtgcaattatgtctctaatataacgcgtgctgatatcagccaagtgccctgattgagttgcaccgtcccaacaaaagtgaagccattccgtacctggatggcagtggaccagccccgacacgccacgctcatgttcgattgaacaatcgagctacgacagacccttattttgcggacatcctggttggacctttgcctgttagcaacgccactacatgggagccccttgaatttccgtacacccgcaagacacaaggacaagtgcgaaacgtcgagccggatggcgagactgtgtactcggagtggctgttcaaaatcagtgcatcaatcgctgatatcaccttggatttgtggaacgggaccgcattggggctagagaacgataccctagacatctggggcattgaccccttatggcaggacgatggccgcatcatccgctgggacatgttctggaatatggctgacgacgagttcgatagcgagaccctcctgccgctgggcctgtatctaaagtccgatgttactggacgcgacccgtcccaatggaagctcctaggctggatgtacaatgacatcttctatgaaacgactgaagaattccgcaaagcgtactggtctcctggatttgtcaagctcaagcccaatgttgacggtgcctgggcccacaccgaacagagaggccctgttcctccccaagaccggaaacagcctccagtcatgattgctccagacggggcccggtactcggtcgacgcagagcgcaagtatgtaacttggatggacttttctttctacattgccttcaaccgcgatactggtctctcgctgtttgacataaaatacaaaggccaacgagttctatacgaactcggccttcaagaagcacttgcgcactacgcagcaaacgaccccagtccagtcgagcgttgcctacctagactcgtactacggtttcgggccatacgcctttgaactcctcaaaggctacgactgtccatcgtacgcctcctacctgaatacatccttctacaaggacgaggaaacccacacccacgtcgacagcctgtgtctcttcgagttcgatgccgactaccccatggcgcgccactcgacctccgaattcgtctccgtcaccaagaacgtctactttactctccgcagcgtctccaccatcggcaactatgactacatgttcagctacaacttccacatggacggaacgattggcgtcgaagtccgcgcgtcgggatacatccagtcggcatactacgccaacaatcaagacttcggctaccagatccacgactccctctcgggctccatgcacgaccacgttctgaacttcaaagcagacttcgacatcctcggtccaaataacacaatcgagctagtttccgtcgtccccgtcacaaaacaattctcctggagtggtaacaaaacacgcaacactatgcaactgggccgctccttcatccactcagaagacgaagcacggctaaactggggcttcaacggacaaactcagctccatgtcgtgaaccaggacaaaccaaataagttcggagaaccccgcggctaccgtatccttccctccgcagggaccgcccatctgactgtcctaaacagcagcaatctcgtgcacgccgcacactgggctgagtacgacgtccaggtgacaaggcagcacgacttcgaacccacctccgcacacccctacaacagccaagatatccacaatccgcctgttgatttctctaccttcttcaacggcgaatccctcaaccagaccgatcttgtcgtctggctgaatctcggcatgcaccatgtcccgcacacaggtgatcttccaaacacggtcttcacaactgcgcactcgggtgtcgccttcacgcccctgaattatctacccggtgatcctagtcgcgagacagtgaacatggtccgcgtggactatagtgacggcgcagcaaccgctgtccggacgtttggccagagtaatgagacttgcagtgtggtgctacagccagtggagaatgagctttggtcttatcaaggagacgtggttgtgaggaagtttccgtatgatccgaatgatccgttctatgagacggatagtgatgcatagactagtgtatctggtggtgccatgggactgagtctcgataagtcatgctttaagaagatcgagcgatcaggacgatatgtccaggtagcgaaattatgtatataagtccgattcaggaatatatgcagaattggatgagaataatgaatatatatagtgatggtggctcctgttctacctggttctttttaagttccactcgctaccaattctggcaagtgagaatgcgaaggtgctgcaggtcggtagcgtccccaagttgctatacaagctgctgtaagctataagtcatcagctgtaatgttcgttgtcggtttatataagacaccatatacacaccatatacacacatgagtttccaatatgcagggagtagcaggatgtgctgctcagcaagcaggaaagatgtaacatacaaacaatgcaaactgaccaagcccagcaattggacgattaaaagcaaccacaaggctcaaaagcatccaggcatgaagctaaatcatgcaggggtcccggagttacgacggggatggccgatgttacgaaatcaggcaatgcaggcagtccgggctcggccgaagcgggtgttgttcgggctacaagcgagtaagaaaaaagactggacgatctcctgacttcctgagctgacttctataaagagcccctcctttcttcttccttcagctcctccctcctctgcagctgctgcccagggcaagtgatctacattatgtgttgatcctaacatggccaggatagttacatgccattcatatccaagaatattcatgaatttccaagattcatattaggaaacagcatcaccccagacacttggttgagaatatcgccaatctgaccgtcttccaacgaaatgccgctgtagtgggtccctttagtagggttaattcggg

SEQ ID NO: 5374 - DNA, 3599 bp, Emericella nidulans
tacgtttctaatatagtggtttctggtctgcttcagttctcgtcacaatggctaccgcgacattcccccgcattaagacgatccgcacattcgtgatcgatggcgtcggttctggtggtgactaccacaatgtatgtttgttgtgcaatattggatgagaccgcgtcaggttgactaactcgaacaaggtcaaaggtggtcactggctcatcgacagcgatatctccacccctatgacccgatgggcgcaatatcgaggatcgcggacatcctggggtatcaacgtgctgggatccttctgcgtggagatcgaagcaaccgacgggaccaagggctttgcaactggcttcggcggtccgcctgcttgctggctggcacatcaacactttgagcggttcctaattggtgcaggtatgttggaaccgcatcgtcatcttaggagaaattatactgattcttagatccccgcgacgtcaacgagctcttcgagaagatgtatagaggctccatgttctacggtcgcaaaggtctgtccatcgctgtcatcttcgttatcgacctcggcctctgggacctcgtcggcaagatccgcaatgggcccgtctacaaactatgggcggtgccacccgttcccggctcgacttctactgcactggtcctcagcccggctccgctaagaaggccggcttcgtcggcgccaaggtagccctcccccacgggcccgacgagggtgttgaaggtctcctcaagaatatcgagtacctccgcaaacagcgcgaagccgtgggccctaacttccccctccgcgtcgactgctacatgtcgcttaacgtcccctacaccatcgagctcgtcaagcgcgccgagcaggagggcctccacatcgactggtgggaggagtgtctcagccccgacgacttcgacggccaagcgctcctcaagcgcgcccacccgaccgtcaagttcactaccggtgagcacgagtactcccgtttcggattccgcaagctcgtggagggccgcaacgtcgatatcatccagcccgatgtcatgtggctcggtggactcactgaactcctcaaagtctctgcactcgcggcggcatatgacattcctgttgtgcctcacgcgtcgggcccttactcctaccacttcgtcgtctcgcagcccaacacgcccttccaggaataccttgccaactctgccgatggacacaccgtcgagccggtcttcggtaatctattcactaacgagcccattcctacaaagggataccttgacgtctcgattctcgataagcctggcttcggcttagaactgaacccttctgcgcccttgatccctgctgcgtctttccttaaccctggacccgggcggagccttcctggttcgggcacaggagagaagacttggaccgatgggacgcattagcttcccaccctacatcatcttatgattgcatgtacatgacggcttcttttcctttccttctttgtttcattgcatgaattggctggtttcggttggtcgcgaatatggaccgcaactcaaactggatatggatcttgatagacggaaatactatactgaatcttttgaatccccgcatctacattgccttccaagacttggaaattttccatttcaggatttcgatagacagattacaactttcgcaatcacaattcataactgtaattcggcgtaatcaccgaggtagtagtgtcttgcgactggtgggactgcggggcatctcggcccatcaatagcacgagcatcctaggctcttccattcatccaccaattgccgacaggctacgccattgctccgcaaaatcggtattacaagttaaagctattatatcggatccgagagatctccgacgtacggtcgagatagaatgcttttagcggtggcgatcatggtccagggtagcatgcgcgtaggcagggtggtgttgagacctaaactaattttcattagcggcctttctggatacgtgctgcgagggtcagaggctatcagagtccgtataaaatgggtgcataaatcgcaaacataaatggcataatattcatactcgtcgtctggatatataaattcaagccaaaccaaaaacagacttggggcagggagagtttgtgtgctctgccctaccctaaaacagtccacgcatcaatctgaaagacgcgaggcaatactgacaagttgagagagccaatctcagcaactgaagggatatcagcgatggggaataatgtacaggtgaagggtaatgatggtttggggatctgatcatgacaccgcacaaacaagatacataggaaaacgtgaagaacaaaagaaactcattcacaagtgaaacataaaatagcatgcggattagacgattcacgcatttccacaattccacctccatcccactcacagacttcggcatttatgcagccgcttgttggggtgggtagtggccgggaatgtgcaactcgatggttgagatgctcttctgggtctgggcggtaggtctcttgggaatatccagcgagttgcgcatactgctcgggatcgacgtccgaggcctatgcttctcagattcaatttcatcgtccgactgttcttcaagagacgtcgggacagtgttgaccgtgctatgcgtgtattcagtcatgttggaatttgtgaaagcagttgatgtagtttcaccgcggttccgctggtgagcctgggcgtggtcttgtgccgaagtagggtcgagaccagcaacgaatattgagtttgtagaatatctgttcgagttgaacgcttcctggttgttgatggtggcaggcgcttgttgggggaactgttggttatcacgattgaaggaatcagatgttaccatgtatttttccgagggatgatcatatccatcaataggaaatcggggcgccgcgttcacacttgcagatctgctctggttcgaattctggattgagtctagatctcgatcaggattaaaccggccgcctgtgccagcaaagtgcgcaccatcagacagcgaacccgctgtcgctagcaaatctctctctccagagctctctccgctcgaaggagacagtggtgcgtgttggtgaccaacttttctccactcttctctctcctctccgctcactcttcacttctaacatcattcttctacaattttatctcattatatactttcattccccatcctatcgtccctcctcttcattttatcctacacttcgctttcttctatctttctctctctttactcttaatttcccaatatccattcttcccccatatttctctcttctcctattatccctccattccattttttttttcactttttaatctattatttatcatatacttcccacttacacttcttttcattcttcactcctctatttttatttactcccttctcacttctttctactccccaactcatcattatctcttcttccacctatctgtccaaatattcatcttcaaactactttctactcatctacttatttttgacccttacactcgcttatcatatatcttattcctatcacacaactcttccactctcttttccttt

SEQ ID NO: 5375 - DNA, 6960 bp, Emericella nidulans
agaaaaattatccacatcaaaaaaggtgaataaacagaaaaaaaagtaaaaaaaaaaataaagagagatgaaaaatatataaatattaatagattaaaagagcaaagaagcgaaccacctatatatgttggacaaaattgaaatctatcccggcccgaacacccttaataaagcggaaacaaatattgtcacgaggaaagggttcctcgcggaggaaaatcaaataatgtaacaattgtcgggagggtgctcccaacaggagtgaaagggtaacaatataacaagattaacacgcgccccagttttggatgtttgaaaactaaggaaccgttaaaaggatcaactcgtcttaagcgccattgttaagccaatacatcccgtcagctggttagcttcaaaagggctttgctagggaatcaagcttgtctcctggaaacaaccagttgcatcagttgcggtcgactcggcagcgtgaacagattcgatatcattggaattaggtttttcgcttggcttctcaactatctccgcagctggagccagaaccttttcctcggcaacttctggtgtcggcttagtaacggtcgtggactcagcttgctcttctacagaagttacaggctcggcgaccgccgcatccgattcgttgggctgactgtgagcgtcctcaaccagaggctgagtaggctcaacaacagcctcagtggctgattcgacaggtggctcggctgtagcttcgtttggcttctcctcgacaacgacagcctcagtaggctgtgctggtggctcgaccggaagctcggagacagtatcctccacagcctgctgcacggattcattctttcgatctctcgcgacctgcacctcagcgggttcaacggcaggctgttgttcaacttcagagggctttttagatccaaccttatctcttgccgactgcgtcgatcgagtagatggtattcttcttggggcgcgagcaactttcgttcgagggggactcttgacgtccagcttctcgtgtgctttgctggccgaacttgctgttggacgcatcatccttgctagaaacccttcatcgattggtctggaggctgtgctcgctcgagaatgagagcgttcattccctgatggaggggaccgcgaggccggtttgcggacagtcgagacagtgggggtattcgcaccttgacgagctcccgttgcactcttcaagctagacggcttgcgtgaaagagtagacgtggctgctcccgcagtgcctgatctcgctgtggatgttgtggatgtggtagggcgagctgacctagctgttgatgacgatcgaacttcgctagagcgaaccgctgccctagcagtctcacgaggcgccggccttgtcggcggcttgttggctgtggcaagtgatgcccgactaggcttgtgggcagcggttttcagtgagtcgttctttgcacttgtggctgtagttgtagacggcctagaagcgcgggtcctagttttctcactgtcgggcttggtagcggaacgtgatgtgcgagattgagtggaagtcttggttggggcttgcgaggcagactttgtagtcgaggtagtctttccggcttgcacatttgacgatatcttcgaggctgtctccgctggttttgcaggtgcggccgtgggcgacttaggcgctggctgtatttaaaagtttgcggacgacacctcctcagctttttccttctctttagcctcagctagattctggacgatgtctttcttttccagtccgctcgctttctgcaggctacctaagccattcgtcgcctgcgcggaggattcgtgactcttaacgctgctatcaagatcttcgggactgacgctcttgaccctagacggactagaagcgccctcactatgcggactcacacggcggaagcctaggacgggactggacggggtccctccttcgacagggacaaagcttgcgcgcaccttagacaggttctcggagccggcgggagatcgatctcgcgcgggaggagtgacgttgttttgctgattgttttcgaaccttgcgagaaggctcttcacgcctgggtgggcgcctttatcggccatggcaaggatgatggggttgcagtagggcgattcgcggtccggaagcgagagcagtggccggcgggccagcgcaagttagacaaaatagacagataaaccggatgagtacggcgcgattatatctgctatgttcagtgggctgaagtagaaatatgggtcgagatcgcgctgcgtcgcgagagccaggacacgttggtctgatggtagcggcgaggagagcgggggaggaacgggctataaacagtggcgacagtaaacaaaggcagagagacagagtcaatagtgcggttggacaaccagaggaacgttaggcccagcaaacatgatagatagacaaaggctctagaataaccatggaatgaataagaacaaagtcaatttagttaagggagaaaggagaagctgacacaaggctaaggcaggagtgggtttgcagcctgaggccacaattcaaggggtcggatccgcggcttcatctttgtttctgtgactgtttcaaggcgactgacctcctcaataatctcggcatcttatcctgttacgtgccccaagctatagcgtcgcactattggcctccatatcggtacaggaccttatgaccacttgtcaacttgcttcgctcaagaggcagccacctttcaaggagttttgaacgccacccttctggcccttgggattcgataattgattgccggatactttggttacccaactccttaaggcctataccgggagctctccaaacaaggctggccatccagcatgcgcctgggcaatttcctgatcttattcaactgccaaccacagggtcgaaccggacaagcgcttcaaatgtagctccaaatgtagcttcaaagtagtatgtcgtgattagttccaagggcctggaggtctgtgcaaagccgactagaataatgccgaccgtttgatatgtactccatgtcagtgacaccgacaatgaacaatcagactgtagccctgatttgataaagcttggattgacggcagtcattgcattgcatagccgctgcaatgcacggcagtcaaaaccagggttcatgcctggttcccatcggaattcagcaaggcacagcggtgctacagaccagatgcaggaacgatttggcgagacgtccgtgtcgtgattgacatagtcgacaacagttgacagcctcgcgcatccaccgtctatctccattgggccgtcccagacggatgtgccatgtatttgctcgaaaggagaaactgtgcattgacgcatgcaatgctctgatggcgcaagtgcaggggcgcaggaaggtcgacattcctcaggtgacgaggcaaggatgcaagggctcgacaccgtcgtgctaatatctcctgtcctaggtacccagtaatggtgccatgcggaaggcataggatgcaactgaatctacaccgggcaagtcagcgagagagcaaataggaactgctccgactaatatcaggccaccaaactaggcttaccactctcccatccagcacatgaggttaaagccctggccttcttggaaaagcgaaggggcggccgtcgatgcaaaccccccatgatcttaacgtcaatcaactatcaaccaaatgggagtgagacgtcaggcccagcactcagtatgtggtaaatttgattcccattcacactgctcatgaagtacgcagacgatttggaacgcccacgagagcttttgcgtgacttgagggatgaaaggccgcaggttgtgattcgaccgttcatgggaaagggagttaaaaggcgctacagccttcagacagaccacacaccatagcatcgctactaggatctggggttcgcttggtggtccgcacagatcaccctggcttcttaatatcagaatgggtgtccaccatcagctggagccatccacataccagtcatcttggtagcgtcatcggagctctgatcgagtttctgttgaataatatgcaaggagacgaggatataaccaaaaggcaccgtgaaagataactgcggtgaacacaaaaactgataattgatcgctcctcatgcctccaatgtagtagctgagacctgagagtgcatctcttcaggctacggccaccgcctcgtcagatcccaggtcatgcaggatatacccgtttcccaaatgaccgctgacgtctgagttcacagcagatcaatccaccggctgccctatactcttgagtagaaagagtagacaaatcagacagacaacagacatcaactggccatctataaagtggggctgacccagtgaccagtatcatatacgttttagcgttgcttgaactcgaggttcaggcttgcttcatgtttgtgccttgacaagagttaacggaaacatgcaccttctgactctagctgtgtttgattctaggaaatgaagcttcttcagcacataatcttgctcaggacaatctacgaaaaaagtgtgcgccaaagagtgcaccatgtaaggaagaatcgtgacttctgtgagaattatatataaaacccatgtatcacgtgacttatcatacgtccccattgtcatcaggctagatatgctatccattcctatatctcgctgcaagtttatcgataccggatcggaagatctatgagatatagccttgtaatgacagtttgaagatgaacgggttgctcaacctgaaagcccgattcctcggcgatatgcccggatcattattcttcccgtcgccatacaaaatcaattccctccgattgcggacgttttcctagccagcaggaaactcaagatacacgccatggctgctgctaggactcttcgcataggtcaatcgctcttctcttatgatgtgctctaaggtttatggacaattgcttactgacgacgtgcaggtctcatccccggtgacggtatcggacgggaggtcatcccggtaagtcggatatgagtgcagacaagcggtgcaaacgagaccgatactgaactgctcacgtaggccggtagacggatcctggaagctcttccggcctccctgaacctgaaattcaactttgttgacctcgatgccggttacgactgcttcaagcggaccggtaccgctctgcccgacaagaccgtcgaggtcctgaagaaggagtgtgacggtgctctgtttggtgcagtcaggtgagctgcacgagcttgtatttgcttattggacagacctaaacttctcttggcagctctccctccaccaaggtcgccggctactcctcccccatcgtcgccctccgcaagaagctcgacctctttgcgaatgtccgccctgtcaagaccaccgccggcaccagcgccggcaagcccatcgacctcgtcatcgtccgcgagaacactgaggacctctacgtgaaggaagaaagcaccgaggagacccccaatggcaaggttgcccgcgccatcaagcagatctccgagcgcgcatcctcccgcatcgccaccattgctggtgaaatcgccctgcgccgccaaaacatccgcgatggagccgctgcctcgggcctccgcaccaagcccatggtcactatcactcacaagtccaacgtcctctcccagacggacggtctcttccgtgagactgcccgtgccgcccttgccgcgcagaagttctcctccgtcgaagttgaggagcagattgttgactccatggtctacaagctcttccgccagcctgagtactacgatgttattgttgcgcctaacctctacggtgacatcctgtctgacggtgctgctgccctggttggcagtctgggtctcgtgcctagcgccaacgtcggtgacaactttgccattggtgagccctgccacggtagtgcgcccgatatcgagggcaagaacattgccaatcccattgccactctgcgcagcgttgctctcatgcttgagttcttgggcgaggagcaggccgccgctaaaatctacgctgctgttgacggcaaccttgatgagggcaagtacctgtctcccgacatgggtggcaaggctaccaccaccgaggttttggaagatgtgctcaagagactgtaaattacgcttaacatatatattgggtcagtcgcgttagatgaataaagatgaataaaagtccgttacaaccctgttcggtcagcagggttctgttcggctgtacgattaagtcatttattggtagtacaatgtcaaatgcagtttatctatggtattgaactagtcaatgtggtctctatactctgtatacaccccagcaactcctactcaacatcatcagcagacggttctgcctcccattcaaacctactcccgttctccttcgactccgtagactcatcatcatggccgtcactggcatggaccaacgtgaacagaaccaccaggtaaacctccccagacgtccggctcttcagcacataccgcagagaatgtgtcttctcatcaatataatgcaacgcattgatattgaagccgggaagacgaagtgtgaattctgttaatttacaagtatggttgtcagtaacaatgcaccagaaaagctgcatgacagcttgagaaagatgacggggtccgaagggaggattgaaacgcaccgttgaaatccagatactggttgccgaaatctgcataatacacccttccttcctcaaactcccattccttccgcctctcctcattctgaaaatacgaccgtctcccattcacatcctcagggaccccttttgcactccggacatccaccccgtcctcctcgccctcttcaacgatccttgcacatccggcaacttctccttctttcctacccgtagtcgatccacgttgccagcgctggactatagaggtacggcttgtctgcgta

SEQ ID NO: 5376 - DNA, 2454 bp, Emericella nidulans
actcatataatccattgcaatatataaaagacttgacggcacaggatacagaacgtagtaatccgttggcggtaacagtttggtaaatttctaggatgtggtatcacaggtggaaacctgagtctcttggttattttttataccgtcacactcatggaccactggaatccctcttccggtgttgggacgtgtcagaagactggattctctctcttggtattcctctgtttctttgtgagactgttaacctttctgtccccagaacgaacgctttcctattcgatgctgaagaggtcgcatatctacttgctcttgatgtcaatgaagatgtctaaagcagttcatcctagaagagaagaaaggcttctgagatagatgagaaggcagccttaattgctaattgtagaaagaacaacgctgagttccgaacctgcctctaatctagtacgtgcgtattccttgcctgcactatatacaagaagccccgtagcttcaaccggccaagcttagatatattatgaacggagcctccagttcgtgatacgagacgccccctaactgtgtcaaatccacagaaggtagctcgcaaaacatatacataacttcatcacaagcctcatctcgttcggagaagtcggagcaatcaccggtcggaccgtcacatctccagtagcagatggtcctagaggcaatgttccggagcgactatttccccgttagaacatccatggtaccagtaactgtttaagctcccagactccgaggcggggtctcatgtgtccatctctgagccgtgcaggtatctgtgatcgggatgacggctctgcctgcgtacgacattcagtcctgtctccgtctcgtttgtccgtctcaaagtagccttaattgctcgatgcggtgctgaagacttgataacgtgcccagtgaacactcagtcagcaaagtccagtctgcgacagcaggcaagttccaatattttctccccccccaaaaatatcaggagagttttcgggacagccttgctggtggctcgaaatctggcacagaactgagctttcgacttatgtaaacaaacccatgatagcagatatgacaatctgtcagtgtggatgggtaaacaaaataggcgcttgtatgttcacacggatgagctgatcatgcttgagaccagtgatgaccagaaaagcgtggaaactaaaggtgctcataacaagcctccctagtagagtgattagccatatgtcgaaatacacaagtctgagggaaagccagtggtgtcaaaatgacggagctttaagagtgcagagaggctaattattggaatggtcaaatacttcatcaccgactcgtatcattcgcttgctgcggagtggttttggtggctgtattctactcgtagcgggctcgcgggaagaaatgaaagccctaagttagaaccaaggaccacgtaacttcctatttttagggaatatcacaagtaaacatgtcgaatgcttacccctgtatatgctcgggccttgtcctttccggttggcggtcttttctcgcttgcgggtcgccttcccgcgcatttccaagtctgtgaagtcttggttacggacctagatccgacattacgggaagaattagtaaatattccagctatatgcatactttcacatgtgataatttacgcttggaaatatgcagtcattattggttttctggtggtcccgctatggacgtgcgtgatctgtaccgttgcctcccgagcaacatatgcataggcgagccgtatattaatggtcagatcaggatgacagaagtacgacgccgagtcatgaacaagtacggaatactttctcgggtcaatggcagcggtattccgatcgtcgggttgggtacgacgatatagtcgtggcagcttctaccgttggctatgagtaacgctttgtccaataaagggattgtattgtagttgatgagaaaagtctagaagcgtgcaggagtggcgttgtcaatgcagactgggacggaaaaggcccaggcgcacctgtacgcgcttaatcaagattcaaaaatcacaacccaacgggtcctgagcctagattgcctcgcgagctgtcggagcgttgcttgtcgcagtcttggccgccgagtgcaatgataagcgagaatagcattagtcccaaaaaagcaggcgctgagcaaggtgtccgaagtgaaacactcgggggacaatttgtgcatatctactccttccttcaaaatgccatatcaggcattccgacggacccggtcatggtttcattgtgctgggagatggtatgtgaggatgcgaccaagattcgggaggcctgggcaggcagccagacccgcaatcacatgccggcgtagaaactgtggtgctctagactcgaatgagctagttttagtcgcgaactggaagctatcaacggagctgataatcgactg

SEQ ID NO: 5377 - DNA, 4085 bp, Emericella nidulans
aaaaacgggttgggccggggggtgactggacctttgagcatgacaggtacttgctacttagccactagcctgctgagtgctgagaagaccattccagcgttcttcttgaatttgttgaagcgaattgtgtttcgcacaactcatctgctcgttcccgaagccccatatgcaacaatggctggactgatagcagactctgcttcattttaagcacatataatgcactttgaatcctcaccatcttccacttctcaatgggattctcctttttttctccaccagcatacctcaactctagaatctcaacttgatcagtctcgtcgctgcaattactcgttgctcctctgttggtgttacgtgccttgctcttagcccctatcctaagcacggtgcttaggatgaacctatatagatgtacgtatctcattgtctgttgctgctatgattctgggaggctcgatatggttcttgtcagccagcggggttagttataagctccccacttaacatcaatgagagatcatactcatcctcccgaagatttcaccataatgctttgatagttggtaacgggattaacaggtcttctgtcagtatgctttctcgtgctgtcccatttcaagcaaatattgaactcaattactgctctgttacttcagtttaagttgatgggcgctttcgactgcttacgggcctttcctttatatgttctgtgtacgctaacactaacagatccccttctattggctctcaaatcttgtcaatttctctttcttcatctgtgtaacagctttgcctctctggcaggcttataagtagtttggtgaacaattccagtaccgtctatgaaaggcatgaagaacaatttcaagtcatgtttccagtatagagtgtttgagatcctagttgtgcccatattcctaggccaggaactttcgaatacaaagacactcagttattacactaactagttgatgaaggcatcaacatgcttatcttcttgccttcctcatatatcgcctatgaatattgcgatacatatgcattgtattgtgaatggccgaccagtatatactaatactgacacagggttaatatgaaccttgtatgtctgtaataggctgcgggtcacggtgcagttatttaaaaagctaggcaggggctatgaagaggttatgctggcagatgacagtcaagcaggaatactcgggcagttccgcgcgcttttaagtgcatgatgataggatattcgacacaccgaagcaaaccaaaaatatcgaagggaaagctcttccaacttaataacttaatattggatattctaatgtatcagggcttactatttaatagccgagttttcatagcatctcctgttttatggcaatcgtggttctttactggatgtcaactttctcaggtggctctcaaaatgagaagaaacccctcctcgctttctgcaatcatggaagcttttaaataaaagcctgaacactgtagtagtgcaaaaggaagccaatgttcaagtagaacttcatggcaccaattccctttaacagaacatggataaggtagccagctaagctgagaatatctactcccactgaatgggatagatataattctgtgagcatgttaaaaatcaattaaaagcgtcttaaccatccccggaggaaattataggagcgatatgctgcaaaataatccaatagagtaggatgtccagtgaatggcatctggacgatgtcagacaaggaaaccttcagttctatctgagtcctgtgactagtcaatcgcttccatgactgtctctctggtctttctggctaaaggatctttgggatattccgagcattcagacagcctataccaagggtcatatatatatatattcaaaaagatcttagtctattcctagcattcaaactcgtttcccaattccctctggggcttttatttccctctagctctaagacatgtttccgaacacttcacaggtaaactgaaacccaggataaggtattagctgggtcccatataaggcggcgagccttgtcatatttaaagagtttccccggtgtcgcgccgtgtggtaaatattgtgccggggcagtatactcggagacaactggataatcctcccatacctaagcattgtgcagcacctattgtatgcagaattctgcgccttaacctaggttaggaaggccttgcgaggatggttctcggtccgggaagcaatgggaccagtgggtaccaacatctcaagcagatgtcactgtcaatgtacaggcaacatgtagtatatgcctatagagttaacaggaagtctagagcagtctacctaccccggattgggcttcgattctgcaccatttccctgttgaggaaagcctggggtcagtgcataggtctgtctactgaatacgaggttcatctcgtgttcgtgccgtgcagaaagtcacacaaacaagcaattcccctgccatatttaccaaatgatgcgaatgctaccccgcaccaatttatccgacactataatctgcatactctgcggtctgttcactgtggttcctcatggtccgcaaggttgaccgccgtggcaagtaacactacctagaaagcgaagaagttggctttgagcgagctttctattttgagaggaatttgtccttcttcctgcatgattggatgcagtctactacattctcgccgtattcagatgctacagttacagcagacaatgccgtgtctcagtcacattcgcatgaatggaatgggaaggtaatatcgaatacgacatgcgttgcagtcgaacgatttgatggatgtatctactagcatgtccttcagcattagtgcgaatctcatttcgctccgttatatgatatctgatctgaatgaaatataaaaaggaggattctaacctcccttcatcgagtttcatcccgcaacctactcagcattacgattttttcctgattcttccgcgatcaatcaactaataaccataaaatcatgaagttccagctcctatctctcgctgctcttttttctgttgctctggcggcacccaccgccgaaacctctgctgaactaaatgtggcggatttcgctactccagtcgaagccagggacatttcccccgaagcgctgggtctcgtgaagcgcgccgtgcgtgctatattgtcaattctagctccggcactgtcaattgccgttctggccctggattcgactacggtgtcgtgggaagtgtcactgttggatatagctatccattcaattgctacaagtcgggtgactgctacgaggggaactggttagagccctcaagcttgttttttatcaatagtagtctttaggattgctgacaggaacttaattagcacctgggatcaggttcccttgtccggtggtggtgtttgctacgtcaatggctactatactgatagcaagtgtacagttggtaagacagataacttgttccggtgaaatcttctactgacatatcgctagctgctctcggaaaatgctgaatacctggtagccaatgtgttataggtggaatggaatgacacacactggggccgtttctgggagattattttaggggaagctgcgagaacgttgacatttcgatgtgcatgtctagtctaggatctagcagaactgaaataattcaacggtcattacattggtctagtagtagacatgccattgaatgctttgggtcgtaatttggtgacacatgttgactgatttgctcgattatagtacatcaagcatgcattttgaaaggtaggtaggtattgacatgtgatatcgagatcactatcgcatgaaatatgcttgatagaatttcaccatgaatcgaggttgacattaattcctgggaaagccagagcaagataaggaacataccagtggggaaaaacgtagatgaaactggcacatccacgcctctataccaatttagcatcctcttttccaagacgccgagacccattcataaaccctgtctgacgccaaatattatccattaacaagccatataaaggaggttgtatcgtttgatgaccaagtat

SEQ ID NO: 5378 - DNA, 3420 bp, Emericella nidulans
  unsure (1)..(3420): unsure at all n locations
agagtagaaattgaaatatagattatagtgaagatcgataatgaaagaagataaatagtaaagaaagataagtagaaagaatagtagaagagaaagaaaagcactaggagaataaaattaagattaatgtgtatggtgacaaaagaatagcaataaacattttataaaccagaagtataaagcgaaaattaatataaagaagcggaaaggaggccgcgtctaaaaattcataaaagaagaaattctgttccttaccaatagagtgggtaaagaataatatcaaataatatttaatattcggaacgccacaaacctttaatgagggtattcggattataccgaaaaaccgaaagggggttttaggaggaggtcattaaaacaccctcttaacccaagttttggaacaacaaagggattggagttacctggcaatctatctgcaagctggacgcctgaaaatcaagagaaggcgcaaggacactaacggaaggcgcaaggcttggaggagatcggggagatcccgagatacggaggtacggtccggccaccctgaagaattgttatagtctttcgatgctgacgaactgggcctatcatggctgtagtaatgtatcggcgggatttgttggcaaactttttgtattgctgagcccggcatggccttcttcaggaaatacttacccatgcttatctagacatgctgtaccggctttaagggtgttttctatccggtacaatggaaacagcctatttacagaatagaaatcaaaccattctatgatatgtaagcagggagtatggagtccaccaagtgtgaggaggacaagagaaaaacaataccccggctacctgcaaccacagtattgagaattatcttgaattagtatacagtaacagtaattccctggcaacagtatatgtgggaccgcttaaaacggcgtgttagctagacattgcgaggtggtagcctcacgaccacatccttaaatatttctaaccctgcgtacctaagaggaagaattgagcatatgcagagtccctgacttacctcattgatgaccatacttcagctagtcaacagcgacacgatggcacactccaagcgagatctagaccatccggacattgacctactagccctatccagattaaacagattcaacccgtttgtggccaccttcgctggaggcactcaacctatcccctctatttactaaaggaaagctaatgtcctcttctccgtcaggctgggccacccttctagccggatccgacagaagagctcactcacagggccgacgtgcacatacagattcaatctgaccccgatatgtccttcaaccagccctcctgtgcttcacatgcagctggcgcttctgcggtgcagggatggcttggaatgactgcatctacctgcaaattgacagacaggtcgcacggacatagaacacgccgcttgcacggggggccgtcactgcatctgaagcgttgctctggatggccgctcagtatggcgcgagctggttcttggtttcatggatgctagaaggggagaatgtgtatgttgctgccaaccttcaacctcaaactgtacaagccagtgagttgttgaaaactaaccttgagaaagaccagcagcgatgctccccgtaacgctcagcacgattctctacccctttgctaaacgacccatcttccgccgcttacacatctacccccaatacctcctcggcttcacactagcatatccttccctaatcggggtactcgcgataaaaggcctcaaccagcccctctcagcttccatatccgaatctctcccgctagcaataatggtcttcacctggacgctctacctcaacaccgcatacagctaccaagacatcgaggatgatcagaagatgggcgtgaactcttcgtatgtgttcgcgggctcgtatatccactacttgcttgtgctgcttgccggactaacgctgggggcttgggggtgtcagctggctgtgcaggggtctgagtggcttggggaagtgaaagggnnntctagcttttggtctttcttggggcacgctggggacggtttgataagactaggcctgagagtgggggcggtttgcatagtggagaattttttgttgggggtctggacaattggtatttgtgctgttgagttggttctttgattctcgacttcaccgtgtattcaactacgcctaaatacctgggaaagatatggttgggggtgtatacagctttgactagattgttccttctgcgtcaagcagttgttcaatagtgattgatttcttagaaattaagttgagtctgtcaagcagtatgcaattcacgttcttgagaagattgcagtttttgagcatacatttggggatttatgtattcaatgtacttgtacgtttgtggcatttggggctaagctacaactctttatcatgaacttcggctttacattcatttcactcccaagaaaattcaagtatagccaactacactaaatatctatctccgcctccctcctcttaaccctcaacatagccctcttatccctccaaatcatcatcccgtctgtctgcgccccagcaagtgctctgtccactaggtcaaaatcatacttgagcaaaatatgacacagtgcgacctttgtctccgcgccggcaaagaaccgccctgggcacgcgtgctttccgtatccaaagcccatatgattggcgcttacgctaacgaacgaaaggccaccaccgccgccgacagtgccagtattggcacccctctcctgctcacggagctttacgaagcgatagccatcgaatattgcggcatcgggatacacggatgagttccacatgttgtctgttgttagacggacttgtgcgccctttgggatgcgggtgccgtcgtttagaacgacgggttcgcgggcgatgcgggagagggtaactgtgcaccattttatcagtcactgcaattgcatacaactgataaagttggtaagagggagggtgacgaacagctagcaagcggctccaacctctgcgtctccttcaagacactatcaagcagaaccatcttcgccaaagcggcttcactccacccatgctcttttacgacagtgacgatctcctcgcgaaggggctgtattagctcctggtgttcgcagagcgccgctaccactttcgtcatcatgtcactggtcgtatgcacagcggcatacgctagtcggagctgcgtgagcgtagcatcgtatttggtgccattctcaccagcaacaccgtcaatccaggacaatgcatcaatgctcttatcttcacccttaccttgtgtggtcatacgagcgttccaaaacgcgctcgtccctcggtcttgcagccctcacacacccccaggacgccgctgcaggctggc

SEQ ID NO: 5379 - DNA, 10563 bp, Emericella nidulans
aggacacaatttaacgggataagccaacttacggatgaactcaagacagcggtcaaactcctgtgtcaaaggatcaatgccattgtcctgcactttggtaatatgcatcagattttcagcacccattcttgcgatgtccgagtcactccacgttacagcttcaccgatgctgagaacacgcctgataccaagctcccagagcatttccgggttattggcatgtgacagatttccgaggtacatatatggcaagattcgacttggcaaagaaccgtcgcagtatttgaaccattgcggatctgacacgcggtatgttggaggattcgcggggctttcttgaagtattcgctcttgaacattctttagatatgcgacgtcggaagggtaggcgaagaaattccgcttcttttccctgtgaagcctaagccaagcttcgctcgcagaaatgccttcggcaaacatagtgtaggcgataactagtaaggagctttcggtatacccatctgggcaatggattaggatcctccgtgtcttcctgggagggatgtccatggagacgtcaccctcagcatccgtttctacaacctcagggttcgcgaggtagtagatccaccgaagtgtattaatcaagtcgtcaagatctctactctctccggatggagtcagaagggagccggaggaggggaactccattcgttgaggctctttcgcgagacgcttagcgaggttcgctaagtagcgagggccagggatcccagcaagatcgtttgcgtcaatcatcaggtcaaatgcgtcagcagagggagtaccggaggcaccggcttgtaggagataatccggcgtaggaccttgccaaacgttgtgtgcaaactcagtcgcccgcgacatggtacacatctccaatcgttctaactggactagacgcttgttagaccgaattctcgcacagcattcagtagactcacaaagatccacaacctgattagtgagttggccgctagagttaaccgctaccaaattaggagctctgcgttcgatatctgaaaatgggcctggtattcgtttagttcacgattcgtgacacatttgatacggtatttggaaactcacaggagacaacaaatgtattatatgacggcaaggtctgctcatggtcatgcttgagtctccagtgatgctgtgcagttgcgatcctgcttgcgacttcgagaagctgcttcgcggtcacgccatcctcgccgtaaacaacaatatcggacagcggagccacctttgctgtctggatctggaaattgcgcactgagaacccttcccgtgggtcagtggcgaggaattccaatcctgacggagcgagaatcgcgtcaggagtaatggcgcctttcagcctcgatgtcgataaatcgccgcctactttgacaattgtaaggcctctcctacacttcggtgttcggcgaagagaacgccgtcggttggtgaagaacccgacctgtaggtggttctcaggatgcagtccatgcagccaagggaacatcagatttggatctggcagcggctgcgaagaacagtgatcgacagcagccaccagtatttcaatttctatcgagtataaaaggggcgactctgagatcttggggaaagcatcgggggggtgaagaggcgaagacgtcgggaggacgacatcatcctttggagcaggcgagctagttcgtgaagaaacgggcgacggcccggtaggacacacggggatatgtttatttggcacaggagaagaggttctattgagggtcaaagccggggcgacagttccaggcggaggagtggtgtggcgtagcggttgctgcaccacaacggttgccatgactggcaagcgtgtttgcgttgggtagctgggcacagatgttaaggctgaggttatcgagttctggcaggtacgaaattgaatgtaaagtcaaggccacataattcgagtctcgcgatagcgccttgtaatgttctagaaaatgcctttaatgaaacatcgtgtgttagtggtggtgggatcgcgcgattgagttgggcatcgtacggttgagcacgtgtaggcagtggagaggcgtgttcactcactcatagaagaggctccaatatcaaacagtctatgccaaagatgcacatcggtatagcacagatgaacgcgacggtcgcttttggaggctatcagaagctataggaaaggatgcgggggagatgatgttgcgaacttgatgatgagaaggcagactggcagagagcagtggaaactggatgtacccaccaagagatagtggaaaacccaacctccacagtgataacagtttccagcgacagattacaaatggaaccagtcgcaattggcagataagacagagagtagaagagaaatgacgagcagttgatagcgaagatatgtacagatcaggagaccgtataacagcagtagagcgctggtcttttacgtgagagcgaggcaagaaataagaacttaaagagagtactccgtacgggggtggggaggggtagcccgctagtgcaattacttggaggctactccaggctagtggctccgctcgcctgccgtactatactcgcacacactctctagcctacagcttccaagatctcgctttgatccgtcccatccttccacgagcttcgaatatcagaagctcatccggattttgatcttctatctgtattgccgtcctcgtcctcgtgcttggtttccgtccttgtaccacaactacagaatccggcacagcggccatttcttcatgtacaatcacatcacgtccacacaaacgtcacttagccgaagcaaccaccccttccatcgcctagaaagtgcaattctaacactctataggtcttctgttatttctcatcttgggcgactttcggatgcgcagtatatctccatgttgttgctccacaccaccatcacaattaacccgggaagtcttgacgccaatagccaagcacgaccttgttctcaccaatagggtcgtaaaggaagtcagcgtctcggtctggacgtagctccagtctggtcgtggctctggctgggccaccaaactgtcaacttgcagcgtacacaatgaccagggggggctttacaggaatccgtcattagctagcgagatctccattctttccgaaaatattgccttgatgcaggacttcccacaaatagacgttccagctttctgaatcagctgcgattactagcgattctttgatatcgttggcgcatcggttgtttccatggttgccctacagtcatgcgcctaccctttggtctgggtggcctctaaagacacagattaccctgctccgcttgcgttttcaagcgcgggttttatttaatcgtggcatcatactggggcgaggctttagcactaatagctattcttccgggggaagttgacatgggccgtctgaactcttgggcttgaaactcgaactcaaaaaatccctcggcggaaaacctgacgttcgccgtttgtaaggggttagtccagatgactctccaaggcggatttatccaatagcacccttgaccgggtagcacaaggtgttcccagcgtctgtatcgagcaatgcgacgaaatcaagggcgaaaatttatcagtcgtcctggtaacctgcatccagagagctgctttgcctccagcgccagcctagatcggacatctctgttttattggcattcaagctatcgcgggggatagattaagccagacatcagctcttctagttccagtccatccccgctcgtcctttcaaggctgatgacgtattgcccttgttgttggcgaccgcccgacctgtggacaataatgtccgttcagagtcctcccttctaaccggtttcgcttacttcctattggtaccttctcaaacaatgtttgcgctgtcccggttccacagcataatgcagttgcttgcctgcataagccaaggcggtactcgtgcggcgctggacacctgaccgcggcgcagagtctaaagagatactctacttttcgccccagcagactagggcttataactaagcgctgtgcaaaaaagcacgacctggacattgaccatccggcacgcagtccgcaatgatgtgagcgaagacaatgatcgtttactgttcagccgtttcctgcaattcatccgcaagccgcaatagatagaaccgagccatatccggcggcaggccgctaaacgactttaccaacttctcgaggtctttcctacccttctcataagcttgtacatcgcggttcccgtacacatctcgtccaagcgcatacccttgcgacaggttgcgaaaaaagacgttaaccgcgacgctcaccttccctgttggggcggccgtatgcagccacaagggaggaatgaagagaatatcgccacgcttgagacgcgcctcgtgaggcgacgtgtgcggtatcaaagctatcgctccgtccgcgcggttctggaatacattgatattagaacttgacgcgccagccggaacgtcaaggtgcggcacgtcgcttggcgggtagaggataagtcgtttctcgccttgaatttggcagaggacgtttgccatcacctagatcagagcctgcgtcagtactctattgacccgtctcaaaaacaccaaagcatcgtgaatgcagacttacgtcataatgcaaccaaagcgtaaccggtcccgagatcctcaacggagagctatgggcattctcgacaactgtctttagtgcctccggcagccgaaagtcactgctcaaactggggaaatccgcagctagattggctggtaatttggcaggctgcttttcagagatgctgcgcagatactgtcggccgccggcgtggacctcatccatgaaggttccgaatgtcttgctttcatacttgaagttcttggtccggaagctcattgtctcggtttcagcggcatggacaattacctgtattgaaaaccattggttaactattacttttaagggatttatgcaagtgaacgcctcaccttgcgatcactcccaaccgtattgacgaggtactccttcgtccaaagctcagtgcaaggcccgatatctgcactctcaatgatgacaggctgggcatcttccaggatttgctggaactcgtctgcggattcaactgtgacgcggcggattggcgtcactttggttgtggatttatacttctccggtttatactttttgctcgctttctgctttttcgtcttcgctggtatctgagcggccgctttcgccttcgtaggcttttccacgttctcacagaccagtgcccaatcattaacggcacgttcgcctactggacataacatccaggtccctcgcgtccaaaatgtcccgaaggaaaagcagacagcgccgccgcctagaaggaggacttgatcagtgctaatcgcgtgagagacgtgtccgaccagtaatggccgtggtccggtaaaaccagcgtcaagaccaattgtagatagaatgggagtggtcaatggtaagccattcttgatgcaatcgagcagtgtcgccgagtcgaggaggagaatctcgccgtcgaagggaacaacccgccgggggatgataccaccagatacaaccaacccttgcgccgtggaacttaccgtagccccaaagcgtgggagaatgtcaaaacccagcgctatattcctgaggctcccagtttggtcggtcagctccatacacaaagacccatcagcttcctcgtataatttccaagtccagaaatcttctagaattgtgccatcgggcccaataccaccaaatagcaaaccgttcgtgctatctatactagccaagcatgccccaaaccgggcctttggtgcgggtgcgtcgttcatagtccgaaccgtaactgagctccatccctctccattatcattccacagcaaccaggtatcaagcgttgtaccatcgctggtctttccgccgtagataagcacgctgccgctgctacgatcagaaccaagtgtgactctcgtcgcacagtgtcggaaccgagcaagggggaggctggaacctgcttgccacacattgttcttgcggacccaggtatcctggagcgcggaagcgggggacgtccggcccccgacaagtagacagtcgccgtcatcgctgaaagcggttattgtgtggcatagacgtgcagatatatcattcgatgaagggaatcgggcatgagagtcgatgttatccttcgatgtcttgtatacatcagtatcagcgactcgtgtctgccgaccccatcccgaatgaatacctatgaccgcctcgcctccaggaaccaacgcaccgaatctccgctgaccagtcggtaaagaagtattcgggatgagcctgaactcattcgacctagtaaccgcctggcggctgggacctacatcagctgtggcagcagcagactttgatcccttcgtccctggtctcgtggaagcatgcaagaggaaataatgcgacgcaaaaagcgcaaactcctcccactcatcaaatgactcgatagaatccaacgaggtcctcaggacggcgggtacgaactcgtcgtctgaccagaggtcccagaggcttcgtgcatgagcatgcgtccacccggcctctgtgaaccggcgttcctggtcggacagggatgggaactcgtgaatggagtgtaggggcgctcctagcttgccgaagtgttccatcatcgtcgctgcgaaggggtggctggggccgtccgggaagtattgctctaggatgcagaattgggcatctgaacaagtgattagttcaatactggtaggggaggatcgcaggaaagggtacgtggtttcgcaccattacttagtctagaggcccagctaactaccgcgttggctgatttgacgtccatgtacgtgagggacacttcagcgaggaagaggacagcgcactccgcagggagaacctcggctctaagcacacggtctagtttatccaggttcttgagatcacaccccacagcaacgtactgcccgctgcgtatctgcacagcactctcatccgggccaaactctacatcctccaggatctgcgtaagagcgcccgcttctcgaagcgccgccttcttattgagcataagtttctcataatcgatatccacgaatgttgtctgactacacaaggaccgatctgcactgagaaggataaacgggagaggatcactacgagtcaaaaaggtatcttagtatacggccctccggatgcggttcctctacgccagcactcacaatccacatcctaggttaaggacaaatttgggtttatctggagattctcgcatgaagcgccggacagactcctccatagcgtgcatccgaagccagtatccgcggtttattaacggagcgcgtctctggggctttttgacgaaatggcagaagaaatggggttctgggtagtataacatttcgacactgcgtttagatactatactgctgttgtttgtctggtaacgttagactgaatccccaacgaacagcatatagattagtttaggcgacggtactcactgccatgaccaaatccgccgatttctcctcctttgtcggaacggccgacttcgcagcctggtttgactttgagggggccatcgccttagcgggctgttctggaggacacattgtgaagtccggtagttgatggtggggtgagtgggatatttagattaagagggcatctaaaaatctaagctggtccgagcgtccttcctgccgctaaccgtactgtagccgcgcttagcgcgatgccgcggtgaaaacagcgcggcgatctttcagatcctctgcggtcacacatctgcttgagttccgcctctcccctccatacagggctttttttcgttcacaaccctgcataacatatataaacgagacacaaaagaccgcgcggcgcgacagaacagcgagtcatatgcactagggacgggatgcgtggcgactactgaactgagcgaccctactgactgtaccgttcctggaccctgtgatgggcgcagccgaacccctccactctatctaggctgaaactggtcccaaaggtgcccgctgaatctcttatgccgcatcccatgtcagtgccgctgtcgctcttcttgtctgtttatcttttcgcttttaaataaaaacgacctcgctacaaaacaaaggagagcacctgtagaccgcaactatttaaaagaggaagagaaagaagaaaaagaacaagagaaagggagcgactgggttaaccgagtcaccggcaagatgacgatgaactttgtgacattcaaccaggactatagctacctggctgtaggtaaggcattctcgtatggcttgtactcgttatgaaaccccgcttgacacccgctagcgacctccaagggatttcgtatattcaccactgatcccttcgcgaaaagctacgagaccaaagatggcaatatcgccatcatcgagatgctcttttcgacgtctcttgtggccctcatcctctcactcgtcgtctccagatcacaaatactaaggtgcgtagattcattatgcttgtagctcttcctcgacctaccggaaaggttgactgtatcatgactatagcgacaatctacaatatgcgagttgacttttccaacgactgtgggggccgtgaaactgaatcgaaaacggcttgtcattgtccttgaggaccagatctacctctatgacattcaaactatgaagttactatatacgatcgagacttcaccgaaccccaatggtaaggtctctgtgcagttgaacgagcctagtctaacaccaacagcactatgcgcgctatccccatcctcggaaaactgctatcttgcctatcctctcccccaaaaggcggccccttcttctttcaatccgcccgctcatgctccgccgggcaacacgcatgtatccccgacaagtggcgaggttctcatctttgacaccttgaaattagaagccatcaacgtgatcgaggcacatcggtcgccgttggcatgtatcacgctcaacagtgacggcaccctgattgcaaccgcttcagacaagggaaccatcattcgagtcttctccgtgccagacggccataagctataccagttccgacgcggctcaataccatcgaggatcttcagcatgtccttcaacaccacatcgaccctcctctgcgtctcctcctccaccgagaccatccatctcttcaagctgtcgcagccatcccagcttcaagaaacctcttcagcgaacacctcatctaccggacgacgacggagcctgagctcgcttagccagtctccggaaagggaggccacggaggaagacaacggttcctcagatctagcgtcccgaaagcacaatggaacactaatgggtatgctccgccgcacatcgcaaaacgtcggcggtgcatttgcggcgaaggttggcggatacctacccaaaggcgtcagcgagatgtgggaaccagcgcgtgatttcgcttggatcaagattcccaagcccaaccagggccagggtccaaatgcgaacacgggtccgctacggagtgttgtcgcgatgagcagcaacacaccccaggtcatggtagtcactagtgacggcaacttctatgtcttcagcattgatctatccaagggtggcgaggggacgttgacgaaacaatactcgtgagtagccaaccgaaatttgtctcatccgatctgtatactgatgcttgttcctgcagggtcctcgaatccaatgacagactgggatactcagtcgctgattactgatctgtttcttgatcgtccattgatgcttttgatactatggctctcgttctcttcctctctcccctataccttgcatattgagttgccttctctggacttaacacggctatatgtacatccgacagcgttgactgctttattgtttcgtacgagcttatatactctggcatatcccccttggcgttagtccgctgaggtgagtcgtggctgtcaatcgagattatatctcctccttaccctggactacggtgtaggagctactgcacatgagattcttcaaggacgagtagtcatgtcacatttggattagatttagcatcgttcaaacacccgatacaatcccttcaggtccgctaccttcacagcacccctcaataactgtgtcgtagcaaccaatcgcgccctcaacgcggtgaagatcacatgttctaacgcgctcgctagctgcaccctgcgcttgctaacgaactcattctctgcatcggcgtctgcgtcaccagcgtccgagtgcccctgtgatgctctagactcgtctctcaattcttctgatggcggcattctaggcagctgctcgtgtgtatagaatgccgagagctcagccaaaacgtgcggaacattcttcctcgcttgtcagtccatgcacggccgagacgaacagaaccgcgtagttacctaggcaaggacatagcctcacaataggtatagtagcagtatcgccgctgagattgatgagaa

SEQ ID NO: 5380 - DNA, 6450 bp, Emericella nidulans
ttgcgctgttcaaatgatgtttgcatattctacgtatttgctacttcagagcctttacggccatgagacaagaatcaccaatgcctgatggaaacactatttatcttacaatgtcatgttttctcaaagtgagggagtgtaactaacatgaattgacaggtcaaggaaacagcaccggaagtcatatacccgaaagagttctcgaaacttgtgggtacatcgaccgtatttagcaactacctgctgactgaactctagctcgtcttacctcgatcagattggtacatgaccgccctccctgccatttcgaccaagcaagctgctaccggccttccacgctatttagtcgaccgcgtgcacgcctatgccatatcgctactcgagaatgaaaacaaggtgtacgcagaggctcaacaggcctcggcatcctcctcatacaagttctacagcaccattatgacgaccggaaccctcagtgacaaaatctcggctttgacgctggccgtacaagagtcgcctttgcacaacacaaaatcattggagaacttagtcgcgcttggaaagaagcgcagccgtgcccaggcggtcgaagttcttcgttcactgaaggatatgtttgcgcagggtacattgctgccgagtgaccgtcggcttcgttcgttcgcgaatcagccagcccttattgctgcgtttcaaaatgccggtagcaagtaaactgaaggtgcccccctccctggcggtctcaaaaacagccaccgtgagtgtctgggcgtatgagcacttcctaaaggaccagtatttcgaggtgctgaagatcctggaggtgtggtgcaatgatgagattgagttctctcgttccagagcggtcagctacgtctttgagctgcttaaggagaaaccagagcaggaggccaatctcctgcgactgcttgtcaacaagctcggcgacacatccaagaaaattgcgtctcgggcgtcatacctactcctgcaacttgaacaatctcacccgctgatgaagccaaccattatcaaggcggttgaagaagttcttttccgaccgggtcagagccagcacgctaagtactactccatcataaccttgaatcaaaccgtattgagcgccaaggaagaacaagttggagttcagttgctcgatatctacttctctctctttgtggttttgcttaagcctaagaaacatgtcaaccctaagggtgacactaagcatggaaagggcaaaaaacgaggtgggaaggacaagaacaacgctgagacgcagaatgaggagatgcaggacaagctgatatcggcggttttgaccggtgtcaaccgagcttatccattcactagctcaaataccgagaggctttcgaagcacatcgagaccctcttccgcatcacgcactcatcaaatttcaatactagcatccaagcactcatgctgattcagcagctgacatcaactcatcaagtatccagcgaccgtttctaccgaactctctacgaatccctgcttgaccctcgggttgctacctcttcgaagcagtccatgtatctcaacgtgttattcaaggcgctcaagaacgacgtgaatacccgacgaatcaaggcatttgtgaagcgcattgtccaggttcttggcctgcatcagcctgctttcatttgcggagttttctatctgatccgtgagctggagaagactttcatcagtctgcaatctctttatgatcagccggaagacaatgaaagtgatgaggaagaagtattcagggacgttcctgatgaagatgatgtccaagagccagcaccagtgcccgaagagaaatccataccttccaaccgctatgacccccgtaagagagatccagagcacagtaacgctgacaaggcgtgtctctgggaaatagtaagttcttattttatccatctacagactgccgcctgctcacattgtatagctcccttacctatctcatttccacccgtccgtttcagtcaatgcaactcatctactggagcaccagccgatgagcggaaagcccgacatgactctgcacacattgacacacttcctcgaccgctttgtctaccgaacgccaaaggcaacggcttctacgcgcggctcttcgcttatgcagccacttgctggcagcgaggcaaaggacaggttagtcactaccagccagcacagtcaacaactaccgctcaactcggaggcattctggaagaagaaagccgaagacgttgcggcggaggatgtcttcttccacgagtactttagccgacttggtaaggacaaggagaaggcccaaaggaagaagaagagcaaagacccggttgagcgggatgaggagggcgatgtggatgacgacgacctcagcgaccaggagtctgaaatctggaaggcacttgttgattcaaggccggaggttgaaggcccaggtgatagcgatgatgacttggatcttgatgacctcgagtcggcttacgacaaatccgacgatgagggtgacgaagacgaggtcatcttcaacgatgaatctgatgaggagatggaggacgttgaagaggaagacgctgcggccaaggtcaaggcagccaaggctaagagccgaacttccaaggacgacgacctcgaggatgaagaggcctttgacatggacgtttcagacgaggaggcctttgtcgacagcgacgaggacttgccgtccgatgtcgagctgggaggagtggaactccccaaggaagacgacaaggccgggcggaagaagaggcgcaagctcaagcacctgccgacattcgcgtcggtcgacgactatgcggccctgcttgctggagaggacgaggggatgtaagagcttgctgtatttactctatttctgccctgcatatattaatgatgaggcacatattcttagtatccagtagttctgcgtattatccatctgatctgttgcctgatatgacatgaccgtggtatgactccttatggccccttgcttcttggtgcatgcccatggtaggttcccacgcggaatcgatcaaagttgagattagcttagagacgtggggaagtggcacgcacgtttagagtcctaaatccctccacttgcaggcccgttgggggcgggcgccaattacgtcatgcctgttgtgaagtgggattccactatggcgcgattttagaacgataagacaccataaagcttatgagtttggcatatttactatatcctggcatttgcaagctttcaacaaccaattctacgataaatagagaaaatccacacgatcgcagttattgaaccatcgtagaatgaatcatcatagaccgaccatctgtgacaacccagccagagtcatcagagcctgctgcaagcacccggaccatggacggaagcgggtcggaggaatccgccggcgggccctgagcggcgccgggttacactctcacctcagcgcatccatgcaacccccgaatgcagactcagatcgcgaatgcgatcatctcttttaccaacttagccttcctggtcatcgagaccgagtctggcccagcacgtcatgacgtctcacggctgtcgccatcgggcggctcgccgctgagtttttcattcaggcccggaatacccgttgcaaccagcgtattggtttacgatgccttcaatactgtagcagtaagaaattagggaacattatttcccgccgtagatagagatcatcgtatcacaatgtccccgatctctagataccgtaccctcggcggaacccgtctgcttcattgcttcatctgctttatctgcttctttgctaattcgcagtccaagcatcatcccaagacgtcccaagacgtccaagccttccaagccttccaagacttctcaagcattttaaaccacctcggcgtcgccgcttggcttaatcttagcggaaatcaggaagcacgaatcctgcagccagttcattcgccgccactccggcgttggacttgttcctcgtttgtagcgatctggtaggctggcttgtcgacttttctcatctgccggtccttgactagctcgagccagtttaccaacgctatccaccacgcgaattcttcccctctgggctgcttctcgcccctcaatctcgtgttcctactcttgacagacttttcctgccatagtttatctaataattttttggcagaggtaagcgatgggctttatattcccttgttcattcagcttctactcctgtcccttcagattgtgcttgcttgattgtgctgaccttgtgagaagtccacctagttcagctccagaaaagcagtacatgccttcgaaagctcagaattacttttctttactttactctgttcgatctttccatcgccgattcgtgcggtcgctaaaatggcgggattcccgttgttcggtacagccagagagcagttccgctcgccgagctctgacagctccgccgacaagttaaaggacaaggatctcgagagaagtccccagcttgcgggcggattgtccgattcagactcgggagagatcggcagacaaatcgagctggaggccgagaattcgatcaagtaccgtacttgtagctggcagaaggtgtgttttcagatctatccaatcttggttgcgacgggaagtctccaagatctgtgtttcgtgctaattcgtgaaacgttagacggccgcgctgctcttctctgagtatatctgcctggctatcatgtcatttccctggtcgtactcgattcttggccttgttccggggttgatcctgactgtatttattgcgggtgttgttctttatacatcgctcatcgtatggtgggtttgccagccactttttccacattctcaatggggatttaactgacattgcccaggagattctgtctgcgtcatccgcatattcgcgacgtctgtgacattggtcagcacctgttctgggactcgaagatagcctggtactttacagcggtcatgtttctgttgaacaatacatttattcaggtacatatccccaggcacatccagtttgaccggctaacgttgtttagggcttgcactgcgtagtcggcgccgaatatctcaacacgatttccaaccacgggacttgcactgttgtgttctccttcgttgtagcggtcatatctttggtctgttcgattccgcgtacatttggcacactcgccaaggttgcgacgatctcagcgctcgccacttttgtttccgtaatgctggcggttatcttcactgcgatagaagatcatccggctagatacaatagcacccctgaatattctggtgaaccgattgtcaaggcattcccggtccccggaacgaccttcgtctccggtatgagcgccttcttgaacatcagctacaccttcatcggtcagattacgctacccagcttcatcgcagagatgagagaacctaaggaattctggaagtctgtcactgccgtcacgatcgcagagattattgtcttcagccttgtcggggctatcgtctacgcatacactggaaaccaatacatggcggctcccgcatttggcgcgatcggcgacgaagtctacaagaaggtttcattctcgttcatgatccctaccatcatcttcctcggtgttctgtatgcttctgtctctgcgcgattcatcttcttccgcctcttcgagggtacccggcacaagggcaaccacacctttgtcggctgggccagctggatcggtatccttgcggctttgtgggccgccgctttcatcatcgccgaggttattccgttcttctcggatttgctctcaattatgagctcacttttcgattcgttcttcggcttcattttctggggcgtcgcgtacctccgcatgcggtatgatgaccacgggccgggcttctacagaaaccgagggttccgaggctgggttggggccattgtcaatgtcggcttaataggtattgggctttatttcttagggcctgggacttacgtatgttgcttgcccgttcttatttcgatccacatgcacaaatcaaggactaacgtatatccgtataggcatccgtcgaaagtgttatcatagattacagagcaggaagctttgggggaccgttcacatgtgctgataatgggctctgatcagcaattggacgtttcgatacccttgcttttgtttcattgacgaaattccagattgtgtctgcgctgttatggcttttatacgggttatggccatctgatatcatatgagtgggcttctaatgaagaatgccaaattggagcctgatgatccgtagaccctttcggcgatgatacgcatctaaacgggttaaaagctgcatataaggattatagattgttacctagtagaccacagttctgaagcaagtagtagagagtgggtcattggtagcctgagtacgggcatggagtgggaattta

SEQ ID NO: 5381 - DNA, 6183 bp, Emericella nidulans
gtgtgctcgggcgagggtaatgcatcagatgcacgtggaccggggagcatgggcaacggcgaggagaactcaattatcttcgatggtgagaacggcacgatgaagatctcgggggggccgaacagtctgtttgcgatggagatcaagcacctgatcaagttttgggttgaggagaggaaagatattccttgcttcctggctgcgatgacgttggacttttacgataagacgaccagggcggctcgaatgtagttctcttttttttttaacactttttttttattttgagcagtaaagcttatcttgcattgcccgtctcttccttttgtttatatgatacgcttttgaattggaacgatgatatatatccccgtcccagaaacaattctcatcccatttcttgatgctttgttaccgagcaaaccagcttggtagcttcgattacactggggcatttggcaataatacatatgcgatgagagtcatgcagtgaaaagtagtattgttggggcctcgaatggcgtactcattctggcaagtatatatattccttctgccgagggatataaaacagcacagtccaaagtcaacaaaaagcaccatggcaagttatttacagaccagcatccacaatactcactatacgcgaccctaatgataatgagaaggcaaaaattacaaggaaaaccaagacagaggaaacaggatgccaagtgtacgagactgcatccgaatagacaaacactatgtagaaggagatataacgcacaaaaaaagagagctaaagaagactgttgatgcaggggcatgggatggtcgtacagtgatcagtcaagcgcagaattcccatacgccattgacattctcaattgcgaggcccagcaaatgcattgccggtccagggtggatatcataagctatgaagaaacgtacttcccaacagccaacttccgcgttgtcgggacatgactccattgagcctgagcattatcctcatcggcaaaaggatcagacccagccggcctcgaagcagaactgatcccaaggcgagagccagcatcaggcgtgcgaacctcgaattttgcctcgaccttgcccttctgcggccaactatttgccgttgaaaagcgaacgagcagcttcccatcggatttgctgttcacctcaaattcagggattttccagatcaccgctgactgcttgcggcgaaagacagctccggtgttggggtacatgacggcgttggtggcgtgggcgacttcacggtcctcttggggagagatgtccagattgacggtaagaaccaggttggtcagcgtaatcgagtctttcgacgcggcagatgcgaatgaaggattgagggagtagaagattatcacgctggcctggaattcctccagattccatgctggtctaaaaatgactgggcaaaaggtagataagtcctcgggattaatatggacttgatatttaaacgcgacagttggtgcagagcgcgttatactagcaagagaaacgtcgtattcgcccctcttgtcctctgactgatcttgtacttcacggatgaaattcgggtttgcggctaccttctccaacactggaaaattattcaggcgaactcggattttgtccgacaggacatcaggagcagcattaaacgccagcgcgagctcgccgacaacaaatgatttggtaaccgcaccttccgagaaccaggcgttgactgtttctattatagatgcattcagtccagaatcgtgcagttcagggtgtgcgacggggcctgagatgctatgcaaagtatgcgacgagcgtattgacgttgtgtcagacaatgcatgctcgtctgtagcattgctgagagaagctacatgtcttcctggcgaggttggagaggtaggttcagagacgtcctgggccacagcttgatttgggactggatggactggtggcggagtgctagggatgaagacagtattacggacgtcgcggcgtccacgtatcgtgcctgcgttccgccttatcccgctttgctgcgcttgctgcatgcaatgttagtactttgcgagcgtgttgaatataaacttaccagacgcaattgactggccatgtcattcatggcttgttgggcttggttttcgtcttcgggaataggctgatctctaatcgtcaggttcagacccgactcttcgtgtctatcgcgttgttagctcgcccttctgcttgaacctgttcttgaattacacatacccggctgcctctcgttgtgctagtgtgatttcatcaattgtctgcggtcgttcagagtagccctctgcatccactcgtggctaaacagagcattagaataacggagttgagagcgctttaggaagaatatacctcattagtgacgccagtgagacctgcagtagccgcaggaccctgagatgcgaatccgtttgtatcaggtgtcgactgaggcggcgggctcggcgaaaatcgtgcacggtcttctcgttcgtaagactcgcttggctggcgagcagtttcgttgtagctatcttgtgaggtgatggccgtatctgggcgctcaggaggatcttctgggatctgcatgttgtgggaatcgccccgtttaaaggaggaaaacgggctgcgatacttcttgtccgatgacggaccagaaggcagagccatacttttccttctattcatgaccgtacctagccgtctaagacccccgaagggtgtaccgtgccgaggttcaggaactagggcatgtgttaacattctcaatgatgagtaacaggtcgttggaagaattcacctggaggcggtggtggtctggcgcgaccagagcttgtagagcgatgactcgcagcatcatcctgagcacgcggtggaggtggaagaggtggctccgggcccggcggaggtgatgctactggggtgggtgatgttgtttgctgtcgaaggggcacaactggtcgtcctccatttacctttgcggcgaacgtcttgatttcatccgctgtctccacgttgaggaggacattcaagcagttttccgctgcttgtcgacagcgttcgatctgatcagactcgtgggtttccagttgggttaaaacatctcgaagatggttgagtcggccctcatctgccgcctgaagctgctcaaaggcaaatggcgctcttgattcccattgctggctcatgtcgtgcgcagcagacacggcggcagctaacttgtccgcgcctttggggcccttctccttcgccttttcaacctttttctgcgagctttccacgctctttgctagagctgtcaggtcattttgaactccgggcatcgacgcaagctccttattcttggtattgtattccctcaaaggacgttcgacgtcttcgtcgattttctgcgcaaatgtctcatgcgacgtagccaccgattccaccgaacttacaatgcgctgccatggtatttggaatatcctatatccagttcggcaattgtcgtcagctcccttgtacctcagcattacgccggcgttcggcggataagaaaggagtgaagcagaaagtagtcagccttaccctaaggcagctgcattatccaattggggtcgattggcgagtttccgtagcccttgcgcataagcttcttcgatgcggcggcgttcctattgtggttataatgcaagttaggccgtcagaatcacaattgacgacgccgggcagaggatcatacctgcagccaatctgcgatatccgcattgaccttgttgatgacacggatgcggtcagctaatacagtggcggcctgagtgggttgtaaagatgcctagaagatgagtaagaatgctgcaataccaaagtcgcatgaggggctgagagaaacggaagggtccagatcggatcggggtgaccgtaccagcaaggctggatactcctgtcgggagagatccattgcttctcacgagacacagcgggggaggcagccgccagagaggcgcataatcagatttcagaaattgaaacgagcgtagggcctcttgagacaagcagataccacagcaggccgacgaggtctgtttccaggtctacggaagcggacggtgatgacgatggactccagagtaactacggggagagaaatgactaagccggagcgggagagacacgctaaccattataggtatagatcaatgactcgcaaggtcccgaccgagtctcattgtctctcaagctttccgccctgcttggtcagttggagcattaataggcacaggcaaaatgccttgacaaaccttagaaacgacatcattggacacgtgtcgcacatgactgtctctatcaattactagaacccttgtaacgagcaggtaatggttacctcaatctctcctgcaactggaggtcaaaaattcatttaacgatttttttgtaagacaagaacaataatattatatcttgtatatggcagaagaagtgctaaatataggccgttttaagcaccctcgatgaaaaggcatcctgttcacttcgtacgagaaaccacgaacaaggcaacacagagaaagcactgtagtataattaggggcaaataatcacccttgatttataccacttccaggatgctcaagcagtatctagacgacagtatcgtccctttccgtgcttcccattgaaatccatgccaggccttgctagtagcggtggcattgcttcgacttagctttccttgccgctcgctttagtgtttgctggaaatagtttgtgggtgcctggagattggcgataacagcatcttcgcgcaaaggcctggctatgccatcgtgcctagtaccctggccttgttgacgagggaggtcataatggtcctagcgattttcgacgtgctgtgtggcagcctcacaaaaatgtttgttacggggtcccctgaacgtaacccggcatcatcaccaactcagataggtataatcttatggaagtagatgaatcaggtagagttattgaaatctttttttgttatttttaaaaagtaatgaatatggctgccagtggcagtctcacctagcatcgaaggatatcacaggtcacaagttaggttgtatacatagtcaaactccagaggctcctcgaggtcgccatcgagcagatgaggaatcatagtaaagaaaagccacaatgggctaaaataactgaacatatatttataaatgtaatttcgtacatgaaatgaaaagggggtatagcccgttaacgtcaactggagatatgcacagaattcttctttagagagcagaagaatccgggatgaggatgcactcattccttggagcttcttttaaagaagcgtgatagggcgtcaacaacgttagaaggggaaatcgggataaaaagttcaagtgcttgaaaggttggagaaaagaagtggaatgaaagatttacgaaggtcaaactccatgtgagcggtacactacggtaatggtgtgcacgttatcatcgaatcgcctttgtaataattgacgttattctgtggatgaggcggccagcagaatcatgcatcgttggacggagcaggcactgggtttgcaggaattgctgggagtgcaccagctggcggaggcacggaaggagcagctaagggacttgatccgggtccaggagcggctcgagagttgtgaatagcacctcctgtactgttgctacgctgtcgttgattggcatgtggcatttccggtctctgtagaccgggaagcccatagggcccagggctcattgaccgtggcggagttggtcgaggcccaggggagtgtgaccttggaacagctgggaactgggcaggagacatcgggcgttgaggttgagcatgcgggggtggaggtccataggcaccctgagcaggggacattgcgcgtgcaggagacctaggacgcgaagagggtgaaccgggcctgccaacatctccggggtataagcgtggtgattgtggcatgcggccaggaggtcccatcataggcgagcctggggctcctgggtgtccggtagggccaaaaggtccgcgggcaccaggaccaggaccagctccaggtggtggctttgctcggggcttgactgtacgagctgataggcaggaacgcgggacaactccttgctgcgaacggtcgagtctcacgcagagagcccagccatcgtcat

SEQ ID NO: 5382 - DNA, 6811 bp, Emericella nidulans
gaaactctccgaatcaacagggtcacaattcatgccaatccgtttgccacttgaagtgatgaacttgatgtcgctatggtcgaaacactctgcccttctcttgcaatacatgagctaggaatgcgaggacacgcagcaacaaaaagaggccttcgcgcagggagagcatgatatcaacggatacccgctctcaacctgactgtcgtgtccgattcaaaggtccccgagaacaggaccactcatttggacatggacgagctttctgtcgtcgcggctcccgctgctcaggaatgggtagtcgtaaggcttcacttgccaagcatgatgagacgaaattcgagccttgccagtcaaccgttcgtgttgagagaacaaaatggacaaggtgtgaaatgggatatgtttatactattttatcataaatacgacttctaaactgactttcctaccctatacgaatgcttcagaagcaccgggaaacaacacacaccgaaacatagatttacacgtgaacatagggacatatgaactggaccgagaatcacagcttcgggcgccagaaaccgctgcgggtaacctagctcgctgtttgatcgcttgccccgtatttggcatcaactatatgggggctcatctgttgcaacggtgccctaaacacctagtgcccccctgacggagccaaattcagttgcccaacgcttgatggtcaatgaacatatttgaatcgaggcaacttttagaagacctgcactccatatatcttccgcaagccttctcagctcttgttcagttattcctaaggctttctccaccggctgatgaggacggtaaacaatcttgtcaaaatgtagatccagctctgtagtggttgtagctgtgccatcggtgaaagacgtcaagacgtcaagacaagatactgattccaagcttggtctccttaaaccgctcgttgatcgcattccaagaacttttgtaatctctttttggtgccccaatgctgctgcttcactttctttccaattgcgcaagtggattacagatatagattcaagttacgagaatccggagcatgagagcgcacaaagacggtaattgagatatgtctggggtgaacggacggaagtccatggttggtgacaaggtaggtggaaagtggaaagagccaggcaggtaacgagagcaatccactaggcttcgaggccagtataacgggtacggcgccaagaccaacgatatgatacaggaccttcactatatcctagcatattgcctggcctgcgctcatttggtcgcttctgtgtactgattgaagaaaaacatctccatctctatctgctggatgttcgggctcagacagagaaatagcttttctaaacaagtgcatctgagagtggaagcaaaaccattcctattctcctttgcagacatggatctttgagtaccatgtccatggtatatttctattggtcatcaccgcatggcagagaatgactatatcctcatcatgttacctgaatgcttgtacctaaactggtcaaaacggggcgagcagaagtgatgctactaccaattcatgcatactgtgcttagactcaggtagatgattcatttccaaactcgccggaatctgttacggcactggaattgcaaggtggagatgcgagtcgtgagactggcgcttgtcagggcatcgggaagtttggcgtgcgctgcagtaggattaggacataccagtcgcaagcttgacatacagtgtaggcttgcacgccgtaggaatagtggcagagtgaatgagcttgataccaccataacgccgacgttacaacaggggctgatgactgtacctgggccctaacttattcatatgcactaatacacgcactaagtccctagctgttgatagtgacacccaaggtagcctacaggtaccgtctattaactatatacaaaactaccactaccttcaccaccagtgccgaattgtagccgccataaagaagctcaataaaaagacctgcgttgtggcaccggttcagagtcaagtaatgaaatcctcgcttcagggatcgtgcgtcgatatttctggccggacaatatgcggaatgcgaaattggagcttaatgtgtaccttcaatagtggctcagatgatccttatagaatatagattcattatctcaaagtagttgacaagcacaggaatcagtatgctatggcattccccgttagctatggtcaatcttccaactagtcattgtgccacattcatgatcctcccagtccattaagctgtccattcggcttctatcgtataccagccagtctagcactgaatgggaacgccggcgtacagaaccgagtggcaaccggtgacaggcacagtgaacgaagacccacggcagttgcttccacccacgtcttcacggtgcagccacttttcacattagcccctgcctggaccaaagcgaagggaaataatgatctactttttggaagagaccgaaatagaccgcttgttggtgacagcaacacaccgataggagccggagtcgacaaggctgacagagtcaactgggccattacagagatcgccgccccagaatttgaccgtaacgtcaacattactcgccgcaacacccatcatgttgatctcaaggggtgacgccatgagggcagcggggaaaatgccgaggagaagcttggtggatcgcatgatggtggaggattgtgctttctgcttgtctataaaaagaggagacggttcctatgtagaggacaagatttatgcaagcaacgaagtgatgataaaagagctcacaagcaagaagatggggatccttttatagatttcagtgtgtcttcaacggcgagttactgctcccgtaaatcaatagagtttgtccgtagaattatcttgcctagcaaggctaagagccaaggaggtcttcctgatacaggctctctactagacctgaaagctatggtgcgtaatgatacgcatgaagcagttgaggagctcgagtggcaccatggtactgcgcgctccacagataatgctatcctggcagggcaagggcatctagtgtggtcttaagctacgtcataccccattcaaggcagacaccaatgtcagtgccagtaggaagatagcagggctatattactggtttcattcaatgtacattttgtgtaccttgctcgggcaaggatacctgtcttgacatcgtctctggaagcttcagaaaattacctccgtttcgatagctattggcagccgctgcaaaggttctctcttttggaggaacaccctctgatccctgtactggcttcaaagggctggacctcttgtggtatgattcacattcctactcccacatagtttagcaattgttgatgttttctatggagaatcatttatttgctatcccaatgccatgaattttagccagaattattcccggcggcatagctgggattcggtgtggtctactgatcttcctgataccaaaatttccaaagaatcgatatcagaggccttatggtgaaattttggggaggatgagaatgatctctcattgacgttaggcggggagcttttaaccccgctggctgaaagatattccataaccatatcgagcctcccagaatcgtagcagcaacagacaatgagatacgtacatataggtaagagcaaggcacgtaacaatcgaggtattctccttttgaagaatatatttatgtagtatacacttccacgccttctagcccgaatctatgtctgggcacatacagagacagggaaccactgagggatcaaaacatcaaaattgagtgctaacatcaccccagcgaaaatagcccatggtgtttctggaagcttttgcgtagagcaattgataccacagacttggctgcctttggattcttttgacatcaaattgcagagccattactctatattcccagggaaaaaaaatatcatcagagtttacactcatattataaaagcaatctactgaatgtgctcgcaacctctccagggccagggtattttacaatctaaccaatggttctgagttcagcatcattcaggtcgcctattgtatatgaacaatagcctaaaattgcctatatccatatgtgtctgtactcatgtagaaggagtttttcaatcaaccttgtgcgggagtgcactaagtcatagaatgtaaagatattgctagtattgtccccagaagagagaagccgcattgttctacagactctgatccttgattctgttcctgtatccaagacacagcggaacaaacacacgttccttgttcgatcttcgggtcagtataccctacatacaggctagcgcgtaggtagtagggcgctcaagaaatggggcgttggtagacggactaactcgtaagccatagtatgctacattagactaaggcaaggcgtaggctactgacataggtatgagcttttgcatgtaaaactagtattaggtaaccctcttatattaacatataaatcaggccatagtagctgatagaagatagataaccatgtcagcatgcaaaaactggttgggtgcgcagctcgcttacatacacagcttgctttccaaccacgtcgagaaggcactctaggtatgtacagcctttgccttttcatagagaagcattcagcggcatttaaagtctataaccccagccctggcgttcatcagaagagcgacaatcaagccgtacaagcctgccatgccacggcagctttatcagccctcctcgtattgatgcaactgaatttacttacctaaaacctcagcaaagatcaaaacgaggatcatgcccacgtagagtctcggctgctgggctgctcctctgacgcctgcatcactgacaattccaatcgcaagcctaacatccattagacacgatcacccaggaaagactcgaccttaattaccctgcagccagcccgcaaagccctaccgccagaccagcacccagctggagcagactcgtatagagagcgacctcttgggcaagattgttggcaatctggaccgagaccaccagaccgtagatgcgaggattccggccataacgacaggcacgatatctggaacgtattagcttatagatatctgatatggtcagccagagggcaggggtagaggacgtttgacgatcagttcaggtcgcaggacccccgacgagcagacgccgacgccggccttagccgtcccataggctgctccaaaggtcgtgaacacgatggcgctggtgcatccaaggaccccgaagaccggctacgtagattagcatctaccggtaaaattgattcaagtcggatcgagctgcacaacactcactccatagctgggactgttggcatggttaggtacttgaaagctcgtaaagaaatttgtccttgaaagttctcaccagaattctgatagcatcctttccttctttgcctgagtagtatgcaagtcggcctggccctggctccgctccaggtcgttacgtagactaaatattggaacgacctggggccggtggattgaccggcgtaggtcagacggctcgttagatggctgccttatataattcaccaactacaggccaaaaaaacttgtctcaggatagtcaggcccttatggccgtgcgtcgcgggccgggcctgctccgttcaggtaactagcagggttccatgcctccattcttagataggtcggtcccttgactccggctgcagcaggctgcagctcaagctcccggccaaccgggttgtcagtggctcgattttttgtattgaagttatagcctagtattgcctgggcgcctggagtattgaacaaagtacggtaggtaagcgacgcgcaggcaaccacgattctcatcgagcgaagctgcgaagataccggtaaaagaggggagtctcacatacccttattaggtactagctctaacctatagaaatcagggtctgtcgcacgctcctgtatggggcgagagcaagagcaatatatggatgaccttatacaccgtagagccagttggagacgtcgacttcggttcatgggtttcatcccggtcccgtagaatgtacgtttacttggtgaacgctgcgaccttgctaggatatatatgtcgcttgacatggaagtgatatctagtactgtaagtggttggaagagggtggaaagcttacgagcccaagccaagcaatgccggccaagtacacagtagaaggcattgaatctaccaaagactttgtcgcaaaagctctgcgacaataggtctacttaccatagacctcggagcgagtcaacctggattatcacagaagaatcgaaaggaccggcctaatgagattgattgggagaaggataaaaggttcgatgaggaatggtctcggcatgcgcaagtgtctagtgagtggctgtcgtatgatacgtatgatactatgtcctatggtgctgatggcgctaatgtatccttcatgaggtgggatggctggccgggctgcgattgaccaaaaaagagcgcagaatcggttatagataaatgcatttgctgaataaggacagtatcctttccttcgaatgcctgctttctcctgcttgattaatctcttttgatggtttatctctattccaggaaatcaactgccttatccagtggattttttgtccttgctgctgagactcggaagtgaaacggaaaagccagcctggacaatatgagcctctcgtgagaacctcaagaaccctggctagctttcatgtttgtgagatacgaaggcctgtaa

SEQ ID NO: 5383 - DNA, 4850 bp, Emericella nidulans
acgcgtcgatcataaggtatccggctatgtgtgcgactgactgtactgaagatgtggccaccagctctgcgggctggattacaagggcccggacctgagctgcgttgtctgtcgatgtgtcaatgaagacatcgtgaagcgggcattttctccacgcgacgttatcatggtcttgctcgtgactcgtaatgatattgagcgcagcgggccagaaagctttcgggttgtcaaggatattgagaccgccgggcacaaggcggtttctgggccgcatatcaaggtactggatttggaacatttcgaaatggagggtacttacttactttaatagtatacgaatatacgcgtccctgcaaagaatgtcctctgcactcctggaactggagccgagattatcactcacaccttcgagatatccggtacgttaatctctcctcgaagattgacgcatcgtctgaacagagacagccatgcttgtcggcgccatgggcgtaggaatccagcgagccgtcttcgatgcggcactagcattttcgcggcatactagagggggcacagtccctatcggccaacgtcagtctgttggcgatctgctgatcaacatcaaaacgcgcactgagacctcgcggtttctcacctggaaggcagcgcactgtcttatttcaggaccaggagaacattccgagcgccgcgaacacgcactcctggccaaggtccattgcgccgaagcggcggtgcagtcttgtctggatgcaatcaatgctgttggagtgtacgttctttccatctctccattgactcaagcccctcccccttaatagtgctgactgtcatcaataggtctgcgtatgattcagggcttcccttcccggacttgctctctacagcgttggttttgccgatcttcgacggcggcaatgttggaatgcgcaggcgggcgttgcaggagctgatcatggcggacggttatcagccgtggatggcgagctttggagctgaatctgggcagcagtgagcgtgtagattcaagccaacaatatgatatattgattctctcaaccatggacagaggtaaaactgactctgaatgagttgcaactaactggcgaaattaaacaggtccgtaaggccttatccatgaaatggattgtaaacctcaagcataatggtttctgatttttcagatgatatgctggcgcatcaaatcaactttgaatcaagattagagaatatatagggggtagtagaaggcagttcgacagagtgcccaaagtgtttaaaaccagttgggggagaaggcaagcatgccactcgactacgaccagataacacggcggctgccactcattaaccatcatattcaatcaattacactcccgctatagttgcaacttatcactagtttctcacgcttgtttcgaatcttcataaccgcgatgctacctgttcctctgattcaactgctgtctgggtaactgcgttccagttgcggttcacctgcacccgtcagtatgttctctccatggcagtgtatcatcttctcgctcacatctgcaatatgatcataccccaacagcttcggagcaagccccggatccctccaggctaaacactctccctctggcgttggcaccatttgcatctttcgatcccggtcctcctgctccggcccgtcgtggagatgatacaagtactgctgagtgtttccccgcttgacgaccatttgcgtacgttctttgcggcatttctcgaagacggccagggcatgacgtttctcagccaggtattcaggcgaggtcttgctgatgaaggggtcgttggggagacgggataggacttcgccgaggaccgcaccgtcttcgaaggccattccggcgctgcaactgttaacgatcgtacttggacatgtggagggcatacccagatgctaagtatggcagcgtcgcgtgcacggcgtctccaatgttgacccacgccccggacggatgcgtccagtcatgctcgccaagtcggatacacagctgccatttctgcacggatcggcaaagctttagaagtttttggatcctaccccggaatcagcgaacgctctgagacgtcagtgaggacatacttgggatcccagccctcgaacagagaacacatctcctcgacattgccctccaccgttgtcgccagtgaatcttcaagaatgtcgtccggcacgagcaggaccatgttgaaaagctttcctcctcgcaaaacatagttcaccgcgtgcttatccggcccaagccagtagttgacctgtggatccgtgacgaacgatctcagctctgggtccttgagcatctcgtcagtgtctaacagcagtctataggcaagatcgcccgtcttgagtggcggctctggtctttgcagtaacgactcggtgagcttgctgaacactccatcgcacccaatcactagatcacccgtaaattgtcttccgtccgcagcaatagctgtcgatgtggttccatcttcgctcgggatgacgttgatgatgcgcgtgttgcacgataacaccgcgtccagctcgactgctctttctaccagacatctatgtagatccgcgcgatgaaagtctcgataccacgtccctggatactgcgcctcagacgccttaaagtcaagggacgagattagattccccttccattcgttaaagttgcaaaaccttgggaccgtggcatgtttcatcaacgctttctcgagaccccagtgctgtagaacgcgagaggaattaggaaggatctggataccggccccgatctccccgatttcttttgcggattcgagcagatggacgtcgtgaccggcgaggagacacgctatcgtcgcgccgacgcctgctaggccggcgccgaccacgacaatcttgtgttgtcagcaaggcgggggggatccttcgcctcaatcttcgacggctcaccttcagcttccccgactcgtgccgaaattgtttctctgcaactgggatgggcattgttcttgttacgtacgatagacctgatcaacttcataccacgatgtgctattctatttatgactatcgatgcatatcctaccccaacggagcgtgagtgcaagagtgggggaagaagtgtgaagtgttatcagacacataaatgggacggccgaccgtggataggaaccccgacatcatcccacatcatgtccaaggtgagactcttccttttctcgcagtggtacagtgctgatcggacagttctccttgaaaggccgaacggcgctggttacaggtggtgggcgaggatgcgggcttgcgtttgcgcgggggctcgctgaagccggtgcagacgtggcagtcttcgacatcatcgatccacggccagagtttcacgcgattgagaaggactataatgttcggacggcgtattacaagtgagaactcccgtctccgcggaaccatttgtacgaagctaacgacgcagggtcgacgtctcctctcaggattccttgaaagacggctttgcgcagttccaacaagacttcgacggcaagctggacatttgcgttccctgcgcagggataaaccgccatacctgcttccttggttttacctacgaagaacaccacgatctgctgtcgatcaacgtgttgggactctactttaccgctcaatatgcagcgaagcagatgatagccaacggcacgcatcacggcagcattatcctggtcgccagcatggccagttacgtcgcagtgcgcgaccagaactgctcggcgtactgtggcacaaagggtgcagtgcgcgcaatgtgtcctgctatcgccaaagagttgacggagtatgggatcagggtcaactcaatcagtccggggtacgtgaatacggagatgacagcggcgttttcgcatttggtggaagggtggaaggcggagacgatcaacaagaggatcgcggagcccgaggatatcatgggtgcttgtgtgttcttggcgagcgatgccagtagttatatgacggggcaggatatcgtcgttgatgggggagtgactagaatctcataggtaatttgaaatcgattccggctgtgttgagccattatgctatgacaccttgggccaattcatcgtatggttgtaatgctgacaactacttgcgattcattgatggctatgcagcttaccaagctctgcccagaattgcacgaggtgagacagagactccgtattatgcagacttccgccatactctctcactgccagaggtgggggtttggaattccacccgcagtcgtctccaactccaactgccactcccactctcactccaattcacctcaacgcagctcccactgttggtcaaacgccgacatgcgcccatcataccaaaagtataagtcatgaagcgcactgcctctcaagccggtctcctcgccggcgaaagtgagactcgcctacccaacacaatggctcgcagcgcagatcacgaccaaggcttcgcaaacatcgataccgatgccgcaccagccggcgagacgactgtcgtaattgtcggcgcaggaccttcggggctgatgcttgcgtgggtttacgcccgcccgttccttcaagtgcggatgtgttgacaattgccagagtgaacctcgtccgcttgggtacccccatcgtcctgctcgacgatcggcccgacaagacgtcaaccggaaaggcagatggaatccagcccaagacgattgagacgctgaagcagctcagacttgcagataaactattgcgggacggggcgcgtatctacgatatttcattctgggtaggcccactccttctacggccgtgggggcttcactagactgcaggga

SEQ ID NO: 5384 - DNA, 3980 bp, Emericella nidulans
tcatcatcttcgctcgccgcactgctcccgacatatgtgcgttcgccgggctatcgaccgacgtccaattctacgccctcaccgtcctgaatagcatgagcttgctgggcagggtcctccccgggtttgcgccgaccagctcggccgttttaatgtcttgctctgtttggtcgctatcacgatggtcgctatggcggcggtgtggctcccttttggaacccgcgacgaggctacgctctacgccgttgttgccgtctttggcttcggctcgggcggatggctgtcgctagcgccggtctgcgcgggccagctctgctccactgaggaatacgggcgctactatgggaccgtctactttgtcgctgcgtttggcgtcttgttgacagtgccagtcgggggtgctctgcttcagtcgactacgcctcgtgttctcattggattctattctgcggttctgatggttgggtttcttgcgcttgcgttgtcccgatgggcgttgttggagtggaggtggaggtggaaggtcaaagtataaacatttcggcttgctgaattctccctcagcataggaacaacatagaattatatctacttcaattgtagttgtcttacaattgaccattaccataaaacagctgcatgcgcctaattgactagagtccatatcgcaggcagtatcctaccatggagacgttgccatgcacatacttacggttaagacggccttacaacccgccttcttggaccgcagaggagctgttacgattgcaactaggtggctttcgaaaaccgtctaagggcggccggagtggcgtcttgtttggccttgtgtaggaggcagcattggaggattattcgcaggtaacattatttaagtagccaaaataaaatccttcaactattgcccttgagtccatattctcatcttactactaacgtcaggcacgcttcttaccctcccctttataccaaaccccatgacaaacaaagagatacttagcaaagacctcctgcgcaaaatcatcgaaatgttcataactcgctcccagccgatacgctgccgcaatcccagatatacatgcgatttcatgcatattctgccgcaccgttagtattcaggtagccaagaagaaaatcatacaaaacaagcagaggatgaagaggagattgacataccaccatcgtccaagcccctgcaaagagcgtccgatttttcaagctattcacaaacatcatccccggcacaacgcgcgcataatgctgccagcggtgcccgaactggtgccaccatttcttgccaataaccttgtcctcgtcgatagagtcccacgtccataggtcctgccgcgttttatccaagaagattgtctggtagacgcgctgccctgctggatacggagaatttccaaccccaaccgcgtcccggaactggtgctgatagttggtgcaatcgaagcccatttcgattttgtcttgctcgttcgcatacgagtgggtgtagtacatgggattgaagcgggcccaccggtttttttcgcatttggagggtgcattggcgaaggcaagttggtcttgacgtttggacacggttgttcaaaaggggttgtgaacggtccggtgcccgttgagaccagttcggcgcgtattcttgtctcaaatatactgttgaagtagtctgcgtcgctatgcgtgactgtcacatcgtcgaagaacttcacacctccaagcacccacctttctttccacgttgcgtggcggccgagcagtttcagtgcctcgtcggccggcgtacagaggaccatgtagtcgaatgcttctgtcttcttcccatccggtgtatgcagagcgagcacaactgcgtcgcccgctcgatgcatgatctcaacctccgtccctagaagcatcctcacccccttattcccctccaggtcatccttccactgcgcatagaacatccccagctgcggaaacgtatacatccgcggcaagtttgtcatcagaccttcggaatcgtactcccaaagcctcatcccaggatcctggaacagcctctccaacagcgcacagctcacattgggcgtctgatttcccgtgcccaggaacagcgccagcagcggcaggagcatcctattgccgaactccgtactgaatcggaatagtttcaagataactttcactggtaggatcccaagcaccgggagcccgtacttgatcactttcaacacacggcccaacttcttgatctctggctggaacccgtcgaccagcggactgggaaatacattcgtgaagaagctgtctggtccttcccgaacgcaacctgcagctttacctctcgcggggagtagccgtagtcctggaagaacttgaatgtgtgcttgaagatgctgctgccgccttgcaccccgtcgttcagccaggatgcgccgtatttgctgctgtcgagtggtagcgaggttgcttgcccgccggtctgggacacactgtcgattagggtgatatcgaatttggcggggtgttttgagagagttgtggcgcaggactgaacgtacgatcagtaggatacttggggtataggcgtgtatggctcaagggagtagggttaccattcctgctgccccggcgccgacaacggcgatgcgcttcctatttgaagtggccatggtctggagatattctcgttgcagctgcctgattaaagctacaatacaagtcctgggtatgatttctattcatgttctttgagttcgtgcccgcaatagtaggtgtagtcgtaggtgtaggtgcgggtgtcatgtggtgatgtcattctagcagcatagttacagtgaagaaaacttcaaagggagaaaaaaataatagcaacccgtatttaaataggtagaagggatatttgaattaggatataatccactgcgcaagagaagctccctttgctagagcttgtgatagtcaaaaggacaaacgctagcgctaaactcatctcagacctaccattcagtgatcgacggatagcgtactatacgacacataaaacatcctctgctgaatcccatcaccgctccaagtatatataatagcggtgccaggctactgcgccttgagacgaccactttgacgcggagcaccagtgccattggcaagcaaggacacaatctcctccccgagaacatgaagattccacacagggacaacgatccagaggccactaggagcgattagcaggtgctgcgcagatcttcaaacagtacaacgtacttgaggatgatccaagcagtcattggccagaactcattgtggccgatgttctcgaagttgctgaagtattcttgcaaccctgaaatcgttagctttaaggtattatctttttatcttctgcgcgcaagtgaattgcggacgggtcgtacagtaaagcacagtcttcgagactgtgctcacagaggagctaaacgccgccaacaacgccgtcgcccccattctccccgcaacgaccttatctgtggccagcagccaggacagcgtcccctgcgacccccgcgacccttttgagtctcccgcgacagtcccgtgtctatacacaacccacaagtaataaaggtatccgccggtctccagcaagtttaagacagcctgcgcatttgtaaagccattgttcgcattgaacgccggccagccatagatgtaatccacagtgccgtaccatttgtatccagaccaaaaggagtggtactttccgccgggcatggagtgcgggcgcaacaggcagtagccggcgtcccagagaacgagggggcacgagatgagcagccagagcgtaagaattgcggtcggcgtgtggaccatgttttcgatgaggcacgcttggctcagacgttggggataaaggcgatgatgatttggatgtaggtggtgggaagtcgtctgggtgatggcgggtggaaacatgatgatccggggtctggccgtctggggttagtgaa

SEQ ID NO: 5385 - DNA, 4302 bp, Emericella nidulans
taacgtcaagttgataccttagatgagcactctcgcctttgaatctccggctctgtggcgctagccctgagtcagctctgtactcttgcgccaaaggaccgaagtactcgggaaacagtctctcaacgacatcattttcggcggaagttatcgagtccagtgcggtgatgaggccatcaataccgaggatgacagatatgagaaagttcaccgttattcgtgaacagccccggcactgcaggattgtgtcgatcagctgctgcagcactcgttggcgcgtaagaatgctgtcgatggcaatggaaggaccggactgtatggcataggcatttattcgggctagatcccaaacggcttgctcatggttctggcatgggaagatattcggaaaactgttgaagcttgctttgaagtctttttcggcaaaaccgtagtcgtgtggccgtttcgtgttgacttgaggaaaaaagcctgatggctcagcaaagtccccacctaacggttgcaagggctgtggttgtgaccaagaattaacatcctgtttggtatggtcagaaacgtcgagagcttggaagagtcccaggcaccgtggaagttggtcgccgttggtcagctgcggctaatacagatatactggagatgaggcgggtccagtccttcagatgtcgagtctgagaaaccttccgatgggacaggaacgctgtccaagtccatcggcgttctgctatccaccttgccgtcgttctcgaacgggtcgatgaacccgcaactctgattcgggtcggtgatggacatgaactcgtggaaccagctatccgagaccgtgtcaagattatctgacactgaagaaagcatgatcagccaagaggttatcagggtactgggtggactgacttgagaagggtgccgctgtgactatttccatcaaagtgggggtctgcaaactcgcgctttcgacggacatatcatcgatttggctttgttcgaatgtgagggtgtcaaaaagtggcttgtcatcaccgtcaagagacaaatcattcgcggtgaaatctgccataggttcttccttgactttcttcttcttgggaccccgtgcctttttactcagaggtccgtcattctggcctgtggaatcaagatgcggatctctctttttagccggtcggccaagacgacgagatatactgtaaatacagtcgatgttgtgtttctgacatcttttgcaggaggcctctcatggccgcagcgaatcttggcttgctgacatgcattgcaggtttggcgaatcttgacacttttgggcagcttatcagggaaaaagtcgccttctctgggctgatccatgatggatgtaggtaactgcaaattggacaaataatgaaaccagtccagcaagcctggtgctgtatatatgcagcagagtctaacccatcacatttctaccatccaccaacatccctccgactttgcgcaggaacgcaacaaccaggtggagtctgggtagcaatggcactgcgttgcttcctctggctggcctattcacgttacatgctccacgtaccacatggtgtgcccacaagccccttgaaaactgggtgttcgctctgttgctggcgaagagcacgcatggttcatgctatgctaagaaaaggatgcaaatgcttatcacgggcgctgtggtaccatgcagtgctgcagctggtcgagtttctgcaagttcatcacgcctagcttagagccagcctcggaccctgcccacaaccagaaaggagttacaacaaatcaacgtgtctggattctttacgactccaacccctaagcaacgactgtagcctgcatggttacaccatgtcttgaactaattaactcccggaaggacgggatcaacgcggcccattcaaccgccagcggatggtattacccacccgtccagatatacgcttgtgctacatgacaatttgacgcctttgcgcccctctcacatgctcccgagcatctgctggagtcatagccgttgcaatcaccggctggcgacagggagccgacctcacccacgttgtcgttggagtcgtggtgggcgtgcttgacgtccccgtcacagcgtggtcattgttgacgaagaaatagttcccggccacgggacgttggagaccagtaacctctacgaactggcgcaagtcgaaaccagcccttgcgtccatcgtttttggaaagatatgcgcgaaacaatccggaaacgtgtattgctcatgttgctcgaacgcaaggtagacgtatcggtgatgggtgttgggcgggggttggggggcaatatactccgccgggtgtttgccgtagcgccctttaccagggctgcctagctctaaccagggtttgtcgtggcgaactaccatatctgcttggtaccaatgcaggatgaccgtcgaaatttctccgtactgaacatctagatcaacaaagaccagcaggtaggttgagtttgggttcagaccccaggtgctgatttgtggcaggggatgcgtatctgtcacgatcaatattgcatcaggatatcagaatagcggcctgagccatcttacccgacatggcaagcgtagtcccggggagtacccatggtgtgtctgggtatcgaagctcaaggatgggcattccggatggcagggggtttatctgcgcaagggccgcaaggaacagagacgtgagatagacgactctttcaaagaacatcttgactatcttcactcatcatcagtgacctcctcgttggccattatgatcccctactctttatacgagctgcgcagagtccagatgtgtaactcgtggcttttccagacttcggcgactattatccccggcgagttaagtactaggtctactcatttctacaccgttctatctccctcaccgaaacttcgattccctctgtactctccactgtaccccattgacatacacagttcccagcaccggacagcacacaccgactatcaacgccgcaaccattccatatgtcctcccaccgccgaatctttcgatcatcggcgtgacgagcgctgtactcaccgcgcccaaaaagcaccggacaaagttattcgtggccatgaccgttgccggcgtggagtagtacaggtccaccaagaggacgttcatcacgttgtaggaggctgtaatggagaatgaaaccaggaagatcatggccagggagagtgcaaggggagggtgtcggtccagcaccaggccgtagatgaagatcacgagtgagcagaagagctataattattatcaactgtacatcagagactgatgcagataatacggaatacactccagttatactcacagtcattggcccccctacctgcagtcttgctcgttcaacagggaattcccaatcgctttgcgttccttctgcagctccactcacttcattatctccttctgcagtcactttcgtgtcttcatacattttccttaccctccgataattccaatccacgagagctccattaaatgtcgcggacaccaacgacccgactcccgccggtagaaaaaccagcccaacttccatatcagataacccataaatccgcgcaaactgcgacggtatgccggccgtgacgcgataatagctcgcaaagacaagcccattcgagagcaagaccaggctagttggaaagtgagctaggaggcggagaggcgtcacgggatttgggaggcctggcttctttcttctcttgctttgctggttgtctggtgccgctccttcagcttgtcccctctctaccgatccaacctctaaagtattcactcgtgcctttcttgtttctggcaaaaagaaacccagcacgagcaagacgacgacccccccaccggcaagaaagcaaaagacccccctccatccacaatgactcgtaatcaatcccccaagaacaggtcccaagctcggcgcaaggatatttcccagactcgtgagccccatgtacgctcccctctcgtgagagtcaactatatccgccgcaactgcagccgagagcgcgacagtgcctgatatgccgctgctttggactgcgcggagacctaataaggaggcgtaggtggtacaatttgaaaggagaatgttagagaaaatgtagattgtgaagcagatgatgtacgctggtcgccggccggatgtatcggagagggttgccgttagggttggggagagagcttggcagatctgtggatccaaacaccaacgcccccggtcattatttgtcaagatggacgacgcgttggggggggagataaaaaaagtag

SEQ ID NO: 5386 - DNA, 6647 bp, Emericella nidulans
agaaacacagctccgtgtccagtgcacgtggggcccacgtaatctggagcagcgatgatctggagggtgacctcggttatgcggcggcagagggaatggaagggaaccagcgcaaagttatcgtcgagcgaatagaggctgttaagagtaaaaatcctgtttttacttggtgctagcgctgggctttccatatcaccggtttctcctggctgtcggccacctttatctatatactagctgcaagacttttccctcttgcatgagcttctctcttcttcgacctgctcttctcaataccgccgaggttaccaacgtcatgacattatattttcgtctcattttcatttagcgtctttgttacggcaaacaggcatgaggagtctgatcagccgctaggagtggctttggctgggaaataccgctctgatgttgtattgtatttgtacatagacatatagctagtttctctactaataatcatgatccccggaggaaacagcgtcatatgatgaaatgacctttgaatacgaaggtaagacacggtgtaagttgaagtgaggtcgcgagtgtcctgtagcacagttctctctatcttatcttagtatcggaatcttctcttggcaccgtcactgtcgaggcagcacgactatttgcgacctcgtctttgcttctctccctctcagcgtctttcccctctctctttctgttcctacactatctcttcctctttattcctcgtctctggttttgctggcatagagttttcgcgcttagaccgtttctcttcctttgccactccgtcattctcctccacttcgagtcaaagtcctatccctcccgataaggacgcatggtcaccgcggcctatatcggtttttaacacccttttaatacatcgaatcgcctatctttgcttttcgctaccttgttctgcctcaagtccaataatatcacatccgacagcctactgccgtctaacgtctccatctgcagtggggaggagctatggcatcccacgcccacatgctcctcaaccccagggcctacaagaagcaattacaaaagaatggtaaggacccagatatcctttcgtgcttgtcagggttgcaacaagatcactgcactggccccgattcccaaaatgcaccccatactctccactcgtcgtacagacgatcccccacccctcccgaggatcctgaaggctccgattcagaaggcttacttgccaccacagtaggccagcagggaacaaatagccagcagcgcgatatcgccccatctatgacaccgcaaggcacggccgtcgcagaccgtctacttagcccgcagcgtccgtcctcccatcgtgcaagccgatcgcgggcgcagtatccttcatcggctgggtcgacgaatacaagcacatcccctcaatcctcgacgcacgtcaccccggaaatcgatgtgcagtttacaaatacctctggcgtggacgattgcgacgggaaacggagcgcgcgtttcgttgaactcagcaacgatgccgacttgaggcctggaagcctaatcgaaaatatgtatggggtagaacgccgagcgggtaatccgtacaagcgagtgaaaacagagcaagagaaaattgagaaagcgaaaagaggatttactgtggggaacagcgaacttggagaatatatgaggaaggatgacggagggactgggatttccactgcgattactccagatattgttgatctgaccattggtaagaagctgactgcgtgatggtcttattgggcacatactaatggatggacatcagatgcatcgggaagcaacgatgatgacgaccttcaagtgacgggctccaataacctcagcgtacagagagtatgttatggaaagttggaaaatgccacaattcaggcgtctttgattcctatgccagcgccgcaaacaatccttggggacatagcgcactggccctcgatgaagcttggagttcatcggcaagcgggccaaaccaacaaccgcattgaggtctccgatccgaacgggaaagtcttcggtgtcgtcgattccagaaccgccgcggtgatagttcccctcctggattctccagctcttaaggttgagattgcggcgcgtctggatgtgcgaaagaaactaccaaacgaagtgccgtggaccccttgctcgtctattttccgagcttcgataaatctttacggcctccgtcaagatgcggaaaaggtgggcaactaccttggccagaataatgtctggcttgccaccccgttctctgttgaacaaggagttcctgtctttaatcctcatgccgagagaaggcgcttgcaaccgtcatatgcgccgacagggtcacaacgaaaccggtcgggcgtgaactatgaagtaaggtccgctgaagaagtgaccgatgcagttatgaaaatgttcgatcagctccaaagtgcagacaacctccctgaaatggaccccccggcggttgttaccacaccacttcttcgccatcagaagcaagcattgtggttcatgacggagaaagaggcccctcggaaattcgggcccaaagaggaggacaacaactccctctggagggaagagtatagcgccaatggaactaagaagtaccgtgaagtcattagcggcatcgttcttgaccaggagccaccgcaaagtctgggcgggctgttggccgatatgatgggtctgggaaagactctaagcattctgtctctggtgatctcctcgctcgcgcaggcccaggaatgggcgcgcatgattccacaaccgggactggtgaagagccggcctgggattcgaaacactaagaccactcttcttgtggcacccctcagcaccgttaacaattgggtttcgcaagtcaaagaacatctgcgagatggcgcacttacgtcgtatgttttccatggttcatctcgaactacgagcgtggatgaattgtctaaatatgatttggtgatcacgacgtatagtatcgttctaagtgagctttctggccgcggctcgaggcgagcagggtcaagcccgctgaccaaaatgaacatgtttcgcattgttttagatgaggcccatacgattcgggagcaaagcgcggcccaaacgcaggcaatttttcggttgaatgcgcagcgtcgttggtcagtaactggcacgccaattcagaaccggttagatgatttgctttcggtcaccaaattcctaggaatctatccgtatgatgataggagtcgattcaatatgcatattctaagccggttcaagacaggcgatgcaactgttctcgcaagtctgcgcgtcttggtagactcatttacgctccgccgagtcaaggataagatcgatctgccagcgcgacacgacaagattgtgatgcttgaattcagtgagtcagaggcacagctgcacgagttcttccgcaaggaatcaaacgtgatgatgcgggtgattgcaggagaagataagagcaaaatgaagggtcgcatgtaccaccacattttgaaggccatgatgattctccgtcagattagcgcacacggcaaggagcttctggatagtgatgaacgagcgcggattaagggcttaagcgtgcacgatgccatcgaccttgaagagggacctagcgctgacgctgtcgctactgacaagaaggcgtacgaaatgttcaccctaatgcaagaatcatcagccgatatgtgtgccatctgcagcaaacgtttggaggagccaaatccagacgcaaacggttcatccgttcctggaaaagttgacattatcgccttcatactgccttgttttgatgttctctgtccagaatgcttctccggtaggaagcaggtgttcaacaacagagtcggagaccaggattctttcgacgtcaaatgtgatgtttgcgaaggctggatttcagcatcgtactcggcgatcacggccgccggtctacaggattacttgatggaacaagcgcgagaaaaacaaactcgaaagcaagccaaagtcttaggcgagtacgaaggtccgcacactaaaaccaaagcactattatcgcatctcctcgcgacggcagaagagagcgcaaagctgcccgagggcgaagccccaattaagagcgttgtcttttctgcctggacctctcatctcgacctaattgaaattgcgctccgagaccagggattaacgggatacacccggctcgacggaacaatgagcttaccagcgcgcaacaaagcgctcgataacttccgcgatgacaataataccactattctcctcgcgactatcggagctggaggggtgggcctcaacctcaccgccgcgtcgcacgtttacatcatggagccgcaatataacccggcggccgtggcgcaggcaatcgaccgcgtgcaccggctcggacagacgcgcgaggtcacgactgtgcaatttatcatgaaggacagcattgaggagaagatcgccgagctggcgaagaagaagcagcaattggctgatatgagtctgaatcggggaaagctggataaggccgaggttcaggaacagcgaatgagggaataccgcagtttgttcaaatgatttgttttcttatcccaaaaggggttatgtcgcgcggtttcggttggtcacgtttggtccggttgagtttggcttcgtaataatgatacccaaatcttctgttttgttgcctattgtcatttcgattcctattttgttattcccccatctcattgattgttaatgcatcaaggatcatgtttttagaacatagagatgacgcaagtcacggacggcatcatagctataaaactaatcatttgaaccgaaagtctgccgaagtatgaaagccatagagttgtatgacctagtatgagctccccccatagatacccccctctacggcccccaaaacctcttctaccctcctcctcagcactctcaactccctaacccttttctctctttcctcctccaccgccctcaactcctcctccaacttccttatccgccgttcctgctccgcctcggatgacccaattccgggcaatacagaaatcaaatactcaatttgctgctccttgatgaccaaatcacgcgccaattctcgctgtcgcgccgtgaatgttcgcggtgagtccggacgaggggggagcccttcttcttgtcgtgctgctcctgcttcgccggctccagatccagcacttgcattaggtgctggcgggccgggcgtcactgcgcctgttgcggcgccggatggagaaccttgtgatgcgttgagtattgcggctgcaccggcggggataggcgggtttgtcgagtttttctggatcttggcgagggcgggtgcggacgtagggttgtccggcggtattgctggggaattgtcgtggtaggttgttaagtaaccgattgtggcgtagaattgtgttgcaagctgggttgatcaatacgttggactgtttgggactggaatgagagaggggactcggaaagtacagacctggtcaaggcatgtttgtagctgggtgaggatgtcggccatattgatctcccaactcgaaatatctttgaatggaaggaggagggtggtaggcgagtatcatatggatcgggaggtggagttgagcttggaaagaggagctaaaaatgacattgcttatccatcttccatagcagacacaagggtcggagttaaagcaaaccgcctacgtaccttcagctacagctactagatctcgtatctagaaccaaacaaagcctttaaacatttttatacaatgttcgaatatgcacccaacgcgcccgtttctctccacccccctctctttcccatctccaacttatttcacaactgaatcttccataagtgctctaacccgtcgcctctttggactcccttcaccccccgctccatcaacctctctccataacgaccttccttccttcctttcctacgccaagcgcaatggcctccccgagaagagttcaacatatcaaggcacgctctacgaatataccgtgcaagcgcatcttcgcaactccgccttcgacctccaccgcgttggcggcaaatccgacttgggaattgacctcgttggaacatggcacgtaggcccaaaccagataatcgaccccccagtgcgtgtgatagtgcaatgtaaggcgttgaagtcgaagattgggccgcatgtggttcgggagttagaaggggtcaccgcgaggcattttgcggttgcgctggcaaggggatctggcgctggtgttgggattttggttggtccgagggagacaagtaagggagtcagggaggcactgggcaggagtgcgatgcccctcatttgcatgatggttgaacgggaagggagggtgaggcaggttttgtggaacgggagggtcgaggatttagggctcggtggcttgggggtagaaattctgtatccgaatcgcgaggagggagagagggaggtagaggctaggctgacgtgggaagggaaggaggtgcagactatggatcaggtcgaggaagggatgcgccgattggagagagtgtggatggaaaagtggaaggacagtggactgggtgacgtttcggtggaggaggtattggacgcagtcgagagagttgcgccggg

SEQ ID NO: 5387 - DNA, 4873 bp, Emericella nidulans
atgggctggctttcaagttaagaaaatgcctttaggcgaactcacgacccagccgtggacagaccgataggcacttttgtacttctttccagaagcctttgccgccggcccgggtagacaactagccaatgagattaagcaatgagatcataccatgccgggcatattctcctccttgtggccccatgagtcttagcgttggcattatcatttagtcaataatacgggtttcatctcatggagtgagactgtcaagaaagccccaggccgtctggatcgactcatgctccttcgtcttcctggctcaggtatgttaactatggttaggcacaccgcccggcagtacggtccggttgatggcgtaatttcttatttgtcagatacagcttgctaggagagatagtaggctgacttgtggaagccaatattgcttttcgtcctagtaaccgcttaaaggcaacttttactggccctggagagttttattagcgtcgacattgctgtttatcgctcgagtgattaggaagtatctgaaaaatattacagctgttctgacaccgacaccggcgatctgccaaaattacacagatgtacgtaacaaatacactagcgggctgggctattcctagtcagcttagcctgatgccttagtgcccaggcactgcccatgctcatcattccactttcctcccagagtcgcagtgaatccagtttcgcgaatcaggccagacactggttccacacctctcgatcttccgacgtgattctgtccccctgctttcttccgctaacaactctttccgaacaatcagacctctgggcctattttcgaactagcgtcctaccgactggattatcctccctgacgcaacgcaactgccgcaaccattctcttatcgattcccgcaggagctgaggaagcgctttgctgacgtccggttaatgttggcgatatcgaaaccgtcaccttaacttgctgattaactgcgactgaactaccttagcccgatcccggtcccttatctcgtatccatcctgcggacttccttcgtctttctccaacctccttcctgcatcaatgagcaacggtagccagctacctaccttagcaatttgcctcagaggagcttaaatccttcaacatcattatatcactctcgctctggtccaggaaaccgccgtcatatcttttttttttttttattatttttgagtcaacgcaacgaagtccgacgctaataagaacattgcgcctactatcagccgtctttgggatagcgaaaggggagggaagaataattatcagacatctgccgtcttcttacctcgatttccctgaccgctgggattgaatacctgccgtcgatcagcggtcgcacttatagacgacggcattcgcttcgccttgaacagctttcattctcttttccatactcttcatagcgatggctgcgacgattgatcgccctctcttcgaaccgatcgcgggcgggcctgcgactgatgcagcttcgataacacctcctcacagcatcaacggcaagaaggatggcccggatggcgcgccttctgaactttccgatctcgaactcgattctaaacctaccgatgcccaggaagatatatctgtagaagaaggagatcaggagatcgagccggatcattattatggaggcggaaaaatccccgtcttcaagccggtcagttgccctgttgcgggaagcttcgtctgggcttgttttggctaataaagcttgctatagacgatggaccagtttcgcgatttccagtcttttatcaagaggattgataaatatgggatgcgctcaggcgttgtcaaggtcatcccgcccaaagaatggtagaattgtcctaactatagataatgtggagatagctgacgcattttcgctgcaggagagatgcccttcggccccttggggttgcagtgcaccccatttgtgttaaaaacccccccatgcaggagtttcgcggctctcatggaacgtatacccaggccaatattgagaaacaacgatcctacaacttgcctcaatggaaagctctttgtgaagacggcagccatcagccacctgcccgtcggggagaaaggagaagaaaccaagaacgtgttacccgtgcgccgtcagctcccaaagctcagacaacccgagccgatacccccaagcgaggacctggacgtccggcgaaacggtcgaaccaggccaaggtcaaggaggagcctgtcaaaatcaaggaagaacccgccgcggacgaagtaatggagaaaatcaagcctgagggtccgcccacgccggtttcgccggaatcaatccctgccgagacaaagtcagaggcactcagtgatggagagtctttgagtgcgccgaagtctagaggacgacagcccaagtcagtcactgcgcgaagaaagcagaacaagggtgacacagtagagcacgttgacgaagaagcgtacaagaatttcgattaccgtattcatgacaacgaggactatacacctgaacgatgcgaggaactggaaaccgcttactggaagtccctcatgttcaacaacccaatgtacggtgcagatatgccgggttctctcttcgatgaccgtattacgtcttggaatgtcgccaagttgccaaatctcctcgacgttattggtcagaaggttcctggtgtcaacactgcatacttatacctcggtatgtggaaggctacattcgcgtggcatttggaggatgtggatttgtatagtatcaactatatccactttggcgccccgaaacagtggtatagtatatcccaggaagatgcgcctcgtttcgaacaggcaatgaagagtaagttggttccgcgaggaccagtcccggcaggcagcagctctaaccacaaattataggtatctggcctagtgatgcaaaaacttgtgaccagttccttcgtcataagacttatcttgtttcacccagtcttctcaagtcccaatacggcattacggtcaacaaaatggtacattatgagggcgagtttgttattacatacccctacggatatcattcaggatacaatcttgggtacaactgtgccgagtccgtcaactttgcgacggagaagtggcttgattacggtcgggtggctaagaaatgcaactgcgaggccgatagtgtctggattgacgtggaagagatcgagcgtaaacttcgcggcgaattaactcccgagtattacggtgaatacgacagtgatctagacggttatgaggctgcttctgatcttctcacccctccgcgcagcgtaccagagaagacgtccaaccgtggtcgtaagcgcaagcatgatggagacatgaacaaggccaaacgcatgagggctgatatgggcatcccaagacgattaccttgtctcctgtgccctaacgatctggactacgaagatctgctgccaactgaggacggaaaatcgcacgctcatcgccggtgtgctctgtacactgaagaaaccagcattctgcgcgatggatccggcaaagaggttgtttgcgatatagacaaaatcccgaagctcggatggggctcaagtgcctttattgtcgcgaggtgcgcggggcttgtttccagtgcaatttcggcaagtgtacgcgatcttatcacgcaacctgcgcccttctagctggagtacaggtagaagagggcttggttacagttgttgcagacgacgggagtcaatactctgttcccagcgttgatttgaagtgcaaataccaccgccagaagaaaccgacttggatgaccagcagcgagtctccggaaaatgatcgcaagttgatggacactgctcggcgtctcgttaccggcgacattttgcagttccaggccgacaaggagatttatggagcggtcgttatcgagaatcgtgttgcggaacgcacgttgcaggtcaaagtgctcccccgagggtaagtcgaagaatctcccccgccctcagtccgatgaagtccgatctatagtggggtgatctgtttgtctttttcctctttcggacctcatgaagctgactggtgcatttgttcagggacgtaatcgagttaccataccgctggatgctggttgtacgtaggagcaactttgctcccttggcagcaggcatcaagccacttcccgcgcatctctcccggaagcccgaaggtcggagggaattggaatctgcactgccggtggcaggaaatccgtttggcgacgggcgatctccgtatcagtgggccgagtttgagacggtagacagcactaaccgtcctgcagccccaccagcggtgcaggtcgacttgggcaagatggaacagatctggtattatttgggccagtcatcgactgagtgtagggctcaatatacacacaaccctagcgttcccatccacaacccgcggtcgaatttcctagacagcgtcaagtcccttggcgccgtgatggcccgactcccctcttacccccaccaccgtctgccttcctatgttttgactacccctcctcctcacctcctttcttctgccgccgcaaccaccaccgcctccgctgtcgctgctgctgctgcctcccgccctttgctgccgccgcgccctccttttgcccctcctcgctcttctcccgccgctccgacttctgctgctgttgctgcttctgcgatgccgtcagcctatcgctctttgccaaatcaaatagcccgtcatgctccgtatccccaagtcaccaaagcccatcttcaatcccagcagcaacacagtcatcagcagcagcagcagaacacgaacggctcccactcgaccgctaacagtcacctccccgccaacaattttgccaatgtccgt

SEQ ID NO: 5388 - DNA, 3217 bp, Emericella nidulans
gagccagttcttgtcaactgtcaacaagttaatctcagtgtccatttctgaacagaaacagaccatgaattccatgtagttaaggaaaacattgcatattaccatgataccaatgttcggacaagctggatactgctgctattgctgaaattgaaaatgatcctgagataactgaatctagcaaaaagtttattgactcgaaaaaatagctcgtcagcttcataagtataagcgtctagcaattaaaagctattggtaaagtgaaagcagcaagaagcaccttcttagaaataggagtttatcaagaacttgtggaaggcctccaccatgactatatcatgggaaacaagtttgataagaaagacccaacgaattttgacatatactacaaactattgccagaaggaaccagctgcaacagatgctgttcacgagaatgtattatagagacctttcacggcacttgcagatatgcctaaccttcacaggaacaagaggcatatcgtcctggtgtattgccaacggacgggatgtgcctaatctagaagagaaatgtctaatatgttgctttctagtgtaattattttgctagctgaggcaaccaagtcaaccattagaacgggttggccggatgacccgcgtacaggaattagggctacacaatagagtatgccagtttgtggatgcccataactgggggaaaggcaccaaccaaacccaattcagcttactatagctatccaaatagtgctgacacgctctggcttagcgggaaattttgagatgtcagcggtaatattaactgcggtaataatgcaccaccttaaaatagcctttactactgattttgctgcatcaaggccttatttgctgcttttattatattgctattagattcccctcgagtgacacctcttccatgtgacagcgtggcctcgatctctagctatggcatagagtacgtcgtttgtatgttgcttgaacaagagctaggctactgcaacgcctatcaggccacttccagtcaaaccctgccttttccctcccgatcatcatctccaacacaatgcagaatttttcgaaacaagacagaaaacgcgcccaagacagagccgcccagcgagtacaaggacccgtatcaaggattggctggcccgtctggagtttcagatcgcccagctccagggcggcgctgaccaggccctgctgaaggaagtgaattgcttgcgacaggaacggtcacagctgcggaccttgactgatcagttcctgaacgtcgccggcgctgtgcacatgactctggaccccatggacgacggccttggcgtcttgtcgcgccagtcgcgcagtccacggccaaatctcctcagtaccattattcaagcttgtaaggtactcaaacccacgcaccagacgcctctcaggaaccggtatcccatcctttgctggaattctgaatggctggaacaccccagaacccgacaaggagaaactggtccagcgcctcatggccaatcttcatcgcagcctcatactcgagcgacccttggttcgccttattgaccagcttgctattctatatttggcgcagatgtcactgttggtgagatttggccctctcccggtgacttttctctgtctcatcggatttatgtcccaggttctgcttgcccaacacgaggcttaccgagttatctgttccatatccctggctggttgtatcccatgtaagaggcctaaccctaacccttcgaacgtttgctggcctcgcgaatgacatccgcagaccagctcaaacatcgatcgcgcataatgtcaccatcgacatgatcccatggtgagttgcccttggtgcaccaaactaatagatggttgatggaaaccaatcaaccctaggcaccagctacgcatgcaccctttctcttagccggacgtcgtgagttacgacaccaagccttgcaatgactttgcgacggccatcctccgtaacctgcttttcgtgcccgaaatcaacttcgaggacgcttacattgtcgatgcagaccatcgactaactttaagtccgcgattcagccagctattctctcccggggcccctatgccgccgtttgccgtgaaaacggtgaacacggcctttttaggtcagtatccggccttgcgtgaactcgttcccgagtggcaagcgcatgatcatgtttcccaaccccacaaatttcgccccaagggatcccaaaatatcaccgcactgcctaaccagtcccgccccagcggctccagcgccggcgacgaccagcagagactcgagagactcggccatgccagccctggactgctggagggcaagccctccgtggacgcgacacagaacgtgtccgccggcacccatcgtgaatcgccgcttctcaagtgggcgatgtgtccctttcatcctcgatggctcttccaccggcgtcccccagacacagtatgtccgggcttgagccaatagggaattgggatgaagcgtttagtgtgttggcagaaacggattccatgcctgcctggttgctagatcctgctggcgacgggctggatagtctgtgatgagtcctgtgagagaccaggaggtaataagttcagattgagagaaacgcccttcaggttttctaatcattcacactactccatgtgttataaccacatagctcgcagctggataggtgcatctaatatagccaccctccgacaacaccgtccaagagaactacagcgtaatcaacatccataaccaatctcgggtcgcatgcgcaggaaaaaccccctgaggcacctgtatagatgactgttgtgaatatgttctttactcaccatcacgcgaccgctaatgtcttttacaacttcatggtcaacatggggctcgccccggtggccgcggggtactgtacgattgctcaggggcggcactggatctagtggtggatgttgatcatgctagctatcaatacgctgctgttattcttgcgtctaaggaacaaagtccgttcctacgttcctcgggcggcctagcaggcgtggacacaccggagcaaagcactgtccaaaagagcccacgttaagtccgccagcaatgctcaggccactgataagctggccaccgagccccatgccccagcgaaagctgtcccgagaacaaaataaaaatgatcacaaagagagccaattcaatcgggtaagcgtg

SEQ ID NO: 5389 - DNA, 3851 bp, Emericella nidulans
cagaaaccgggatcagacagatattgcgcttagaactgccggtcgcttcctggtacttcttgataacacgcagacctgcgaattcgccctgggcgccagagttcggctggaccgtaacctcggccattccagtgatgtcggccaactgctgctccaagtcatcaatcatctgggtgtatcctttggcgacatctgcaggaaggaacgggtgcatctgcgagaactcgggccatgagacaggaatcatctcggtcgtagcgttaagcttcatagtgcaggagccaagagggatcatagagtgggcgagagacaagtccttggactccaggtggcggatgtaccgcagcatctccgtttccgagtgatgggtgttgaagacggggtgggtgaggtaggcggaagtacgctccaggctcgctgggatagaagcaaggccgagttcctggtcaagagcagcctcggctttggcgtgagcggaaaagacctgcagaatggccttgagctcttcgcggccagcagtctcatcgagagtgattccgaccttggtagcagagacgcgccggaggaagatcgagttctgacgggcagcagcaataatagcatcggcctcttcactgttcgagaattcgatcgtgatagtatcgaaaaccgcagcaccgtcagagacgttggacttggcagggacgttgtagcccaaagccgcaagtctctcccgcaaagcggcagtcatcgacatgatgcgctgggcgatggtcttcagcccagaagggccgtggtaaacagcgtacatggcactcatgttggcaaggagggcctgagccgtacagatgttgctggttgccttttcgcgacgaatgtgctgctctcgggtttggagcgccagtcttagcgcacggttaccgagccggtccttggacacaccgacaacacggccgggaaccttgcgcttgtatttgtcagcgcaggcaaagaaggcggcatgaggaccaccgtagcccataggaacaccaaatcgctgagcgttaccaaaagcaatgtcggcgccgaactcgccgggcgctttcaggacggtcaaagcgagcaggtcggtggccacgctaaaggtaccgccagcagtgtgaatggcatcgctcaagccctggaaatcgtagattccaccctcggtgtcaggatactgtgccagaacaccgatcaggttatccccttggtccttaacgatcttgaagtcgtcggccagaatgtccccaatgactaggttgatcccaaatccttccgcacgcgagcgcatcaccgcaacggtctgagggtggcacagatgagagacaacgtaggtcttaccggccttcttctcgttcgcaaggggctgggtggccaacgacatggtcatggcctcggccgccgcagtggcctcgtccaaaactgaggcattggcgaacgggagcccggtcaaatccgcggtcaaggtctggaagttcaagagcgactccagacgcccctgactgatctccggttggtaaggagtgtagctagtataccacgccgggttctcgaggatgtttcggaggatcactggaggcacaattgtggggtagtacccagcaccaatgtatgtcttcccgctgacgtcaatctgttcccggtatttgtccaacaacttcagcatgtccgtctctcccaatccaccatgaacactgctccgcggcaggccattgtcggcgcttggagccgtgacggccagatccttcttcgagaggatatcagccgggagcacctgtttgacgaactcgtcgagagatttgaccggagggtcaagaacggcgagcatctcctcagcggcttctggcgaagggccaatgtggcgccgaggaaacgtatctacgggctgaaaaacatcgcgaggatgagggactccgtggtccgccactgagctagtgtagatggggcgcctagcggagtgcgattgttgtgatgagctgtgcacggcacggtatgttgggaggagtctgctgcgcgtgatggaggggtgaattgagcgcaattgagagcgcagagcgagctggcgagagccacgcaggcacaaggacgcggccatcctcgccgtcagtggtatcgagtcgatgtagggatgattctaggtcttatcgtaacagcataagcggcaaaaacacaagcaattcaggaagatacagatgacggatgaaatgcctgagtatggataggaaaaatagagggaagaagaaggagaagaagaagaaaagaggtgaagccgaagaaaaatgtcgaggatgagtgctgtatgggagaccgcggccaaacgggaaactgccccaagctcccgataacgtcactcggtggccaatcagaggaggcgaatcggctgataacggcgcctttccgcggaaaacctgaggcatcaaggcgcttatcgggtaatgggttatgaggtttggtagcgagcagcgatcaactcaacacttaacatataggctagttactcagtactatcactcagttcatttcttggccttatgcttgggccgtagacagctaaatcgtgtaccggaatcctggaactccctcaatgagcttctcccccctctccgctcgcttattggcgattctgaaccaaatactctgcaccacaacgataagcataagaagcaagttgcaagcaatggcacaccagattcccggccgataatgcggcttatcctgttcccggaataccaagctccctgcaatgccgccaatgcctccaaatccaacgagagtcgcgctggacagcgcgcgagtccactgcccacggacattgttggcctggtacgccatgacggcggggatgttggaattggagccggcgacagtgaagaagacgcctacgtattgtacggcattggatgacgcgaagcccatcatcggcaatccgatgatgcagaggagcgcgttgaaaatgaggactggtccgcgcatacggtatttgtcgcctacccagcttgtaccgtacatcacgaaaccagctgccgcgtaggaaggcgcgacaaggcattgcgaggtgccggtatcgaagcccattccctcggagaggatgatcgggaggaagtatgcaatggcatagctgacagtcgtgacgcagctggtccggtcagccatatttactgtaacatcgatcgggcttactcacaagaaaatcactgcaaagccccagatcttcaaatcaagcgctggcttcagaaaccgcttcaggctgaagggttcggcgtccccgtccgatcggtcacggttgatccggcgcacaacaaatgcgcattctcgttcgctcaagaacttccaggacttgtgggctctgtcggggaagtcgacgaggaagattatggctagaacgccaatggcaccggtgatgactccttcgaggatgaaaatccatctccagcctgccagtccttgagacccgtccagctgcatcagcccgaacgccaggattccggccagggccgaggccacgcagccgataaggtagaagatcgagaacctcttttggacatcatctggtcacattagaaaagccattttttatgagtagatacatacatcgtgcataccaactagacagcaggtagacgcagcccggaaagtaccctagttgaatcagctctgtggtactaaacgcaaaataactattcgtccgggcaagtctcttacctgcctcaagcagacccagaagtacccggcaagccgtcatctgcttccagtcctttgtgaatcccataccctatatcgccagcgtcagcagttgctcaagaacactgatttgcagagcggaagcttctcacgatcaaaatggcccccacgaa

SEQ ID NO: 5390 - DNA, 3715 bp, Emericella nidulans
  unsure (1)..(3715): unsure at all n locations
tagctggggataatcaaacgtagattaatccatacttcaggactttaatgacgggacgccgagacaaatcttatagtatactctgtcaggcggggacttcttcaaggattctaaaaagaataatccttgtgtcaaaagagaggaagcgctttgttttatttcatcgtgtttcttctactgcagaagccacgagaagagtaccatggaatgcacgttctcctttttctgagcgaattttaacataccgaagatcctcgactatccaaacattcctgaatctgggaaacaatgctccagcctgggtcagccattacccaacgccagcatgggaccgcgaccgaccatacggtccggcccaattgtaacagcgcttagagcaggcctggtcgttaggatcccagccagccagatataacggtactgtcgaatataaaacgggcacgaccgagatgcaggtacgcctctttgtttcaggaacaagccctgcaaccaatcaaacgccacgcggcacaacattgtttttttgctacccgcggttcagtcccgttctacgaataccaaaaataccttggtttgcgttactctgttcaatgcgtatttattccgatacgttatctaacatggcaccagttcatggtatagtttatggtatcgattcacggtatttgtaggtggacacattcacgagggaaaagaagactatctctagaacatagcttgtatggcgtattttggagcagtcccacccagtacccagactaatttcaggggnnntnnaaggtttaaccaccaaaacttggcactcggcagccgccttggtgtttcaagtgtccactgctgcgcccccgtcattggccccatcgtgctcccttcaggggcaaggtcgttaaattccatggcgccctccatcggcgcctacgcactcctggctccagaagcatcgacgattgtcgagtctggacgctgtggacgctttgtttgacttcatttcgtgctcgggagctctggaccgatggacagtgacatccttggcattttctgtatgggcgtacagtgcatgcattccgtatcttctgatcactgtcacattttagattgtctcaccctcgcttatctatatcgcatctgatctcatcatatcccacataaaatacgatgtttcataatcagatgatgcttgattcatcatcaacacaactacgggaacccggcaatattcgtaatgggagaatgagccccatatctgcctagaatctggactgcagtctggattcacgaccgcggcagaaatttcgagacggtcagcagccagcggtccgtctgcccctcagctcggcaagtcggataggctggggtcgaattttcctcagagtagacgttcaaaatgagtctccaactcgctaaggcccatcatttcatttcaggcttttcaaaggcccagcacaagggctgggccatatatacctacaagggcgtggatcttctggactctgctgggcctgtaccaagtactcaatagatactcagaagacgcgggatttccacaatatctcagtggcgtctgtccatcctcctgtagcttgtcagagcaaagtcgtcgggttaatctccggcgccccgaagctatgcaagcctaaagcgaatgacggtcctactcctgtctttaacttgcttatccttgtgcggtgggcaggttttgtatggttacgaacagtacaatttcccacgacctgggttccctggcctagggacctacgtggtaggctttagtcttacactgcataactttaactgcgaccagctgttgattcgagtagatcaaagaccagtagataacataggttcctacaccaaatcccggtccgagcatttcccgaattatattatcatcggcttgtgtacgatgatattctatcgatatagatgcaaaccatggacagagctctaaacaaacaaccacttacaacccaacttacccattcgagaaaatggtagtgcatttcactcccaggacctctggttctgtgcgcgtgctcccatagctgtgggtatacaaagtgtctctcgagcactggacggaaaaacttttgcactctataccatgggcaggtatcctggcattccagtatggctgcttttaatcaccttcagtgggtaggattcttcgtgggttcaagagaaaagctctgcgcgtcctaccgtggactggcaggtccctatatctggtattgggcacttaatacttggtacttgcttggtcattcaggtacccagtgcttctaccaagggacgggctgagccaatattttgccactgtacaggaagatttatgtatctggccagcagttgttggaacaaggcccgtaggcaccaagagaactttctgctgctattagcatcgatagtagcttcgaagtatcgtttgcaagctcacttatggcataaaatgcctgccgctgttcttgttatatcaggaacccccctcccccggctccccttggagggccgagtctcgaacctctccacgtcaccctgacaattgaccaagagctttcagcgggagtctgggtctatccaacctttattctcttcatcatgattctcgaggttgtaggtcccgaggttcgcaccctctctctagcgcgcctcctcacattctcaacccatctgcaagggtccataccaaagtatccattcgtccaattcgataaccatacgcgagcccttaaatcatttcttttgttccagtcgcttgttctggacccgctaagctctttagttatgaaagaaggcaggttagcttcgcgtaaaagggatttcggttcatgaggcagaatatcagatgccgttctcagcgagccgtgacaggttgagctggagcggaaagccgtcttcccaagtcggtgtaagctgattggtccttatgtacctagagtaaaaattcttgcttaagatggctgatactgcccgtcctggtattgctgagtacgattgtggcagcggatataatacttcttaaccacatcgactaaggttaagctgacatcactgaatgtgcactgaaaggctcttctctttcgcgtctctagcaagcgttagggtgtataggaagggaagacctagaggcctatgttcacgctcatgctggggagactgttgaaatgccacgatactagcatctttagattcggcgccgagtcataggtatcgccaatgccacgagctagattatgagatagaactatatcatagatatgacttgcgaatgatcttgaaggctttggagggatcgttgtcgatgtccggccggtttaccataggggaacactatttcctggtgtccgtggtgctttcagttatatatatactaatgcgcaagatcgtgagattcaccaattcgtttattccatatattttagggagtatatataactactttcaatatgcactcaatcataaattaactgtgcgacaacgcccttcctcacagattagcaaatagttcttgtccccagccttcaggtccttgaataacggatttcgtctgcgaagccaggaagacttatttccagtagatactccctgtgacgaatttcggacatccactaaagctgcaaccgtgtttgaagatgtcgataacgttgggcccgcttcagcgcgaattcttttaaccaggccatcccatgccgacgtcggtgtacctccttcggttgag

SEQ ID NO: 5391 - DNA, 7066 bp, Emericella nidulans
gtctgcgcaagcaaccttagctagattcgcaattgagtacagggccctgagaccggaggaaggagatcctaggcaggagataaactactctacctccttaccaccgaccaaagcagcccttctttgcctccatagacaagcgcagcacactgccgtgaaaaagaacatgatactgcaaaacaacactcattagcttcttcgcccgtacgcaataactccacatccccagaaacataccacatagcaatgctcaacccccagatactcttcgcctcaacacaaacccccttactcgccccaacccagctatcgtaatccactgagccgctaagatggcccaggtatgagcttagatgcgtggcgaaggtgtatgctgaggatccgtcgtcactgttgccgccggacaggatgtcaccaatctcaccgcactcgaggtacgagagcggcttgccgatgatcactgcgacgacgatgactgcaatcagcagaagtgaatccaggattccggacgcgaggaaagggaggatatcatcgatgtagaggatagacgtgattattgtgtaaatagctgagatggatgtctgcagaccacagattagcatttcaggctgcattcgcacttggctggtccgaagcagcgtatcagaggacatacaacggtgattgttccgatgaagattcccggcggtttcgcatcgtagcgcacgatttcggcgatgaagtttgcggttaggccgatgatggcgatgagcgaacaggtctggatgattcgggcgatgagaaatgttgcaccgagggcaccatgcgcgggcattttcgcggatatatttggtagaggtagaaaaatctgaggaaagagtcgttcagtcgtggggagcaagtcacgtagcgtcctgtaccagcaggtttgctctatggatgtcgtaaggaggatagcagtgagtgaggagttgaacttttaaagaggagatatatctgaaggatagtctgagtcgtcaaaggaacgtgggatatcaagtcaaagaacctaggcaaaggaagcaaaggagaggaccgctatgcttgagacagtgagtgaagtcgtgaatgaatgctgaagtttgtatctgctgctttgacgggcatgagctccttatgtacttatgcctggactccagagattctagacatagtatagacacaaattaaggttctaggcctttgtccagatcatgtatcccaggagcgaatggaagaaggcgcccggatgactgacactgggtcgcctgcaggctgatcattaagcgccagtatggatacacgatgtcgaaagaagatgaggctgttggagctggagctatggtggatacaactgctatggataggtcattgtcatagctgttcccagacggaaaaatgcatccagaggctgatattcatagtagcaatcatagtgggcagatatacctgaatggctccgcacagcgcctaacgacgtgcaatcccagccaacgcccccagtcgagcttaggtcgactagacgcagggtctggcgcctaatttattcatgatctccggaccaatcattcccgttgttgtttttagatgcgacaacgaaacggtttcgtctgccgccggctgcatgggccccgtctgtgtgtattgtagatctggatctataagatctataataagctgcagagtgcaaaagtacgttcgcggcccaggcttggcagctaattctcctttggtacatgtacgaagtacttcacgagttatcgtaggtatgtaaaaggtcatcgtatttaattcgtcttggtccatccccagatggcaaggaaatgaagagtggatatgtaaataggtatgacgcgactcctagtcgcctgttttttgcctccaagtagacacggatctcgtttctcttcagacgcctgagttgctgtacggtagagtagaaaggcctctcggatgaacgtcgaattatataattggatgcaccgcttcaagaaaacacacctgcgcctgatggtatcagcatcaaatgactcgaacgaaccgctgtgcggcttcaaacgcaccaaattgctgacagcaccgacccacccaccacatcaaaacaaatgtagctattcaagtacgatagcgagtctcatctcctgttcaggaaaaagaagatcatcccgaactgaccggcggaataatggcaacctcatcgccgccctggatcaggagcccctcgttcccacttttctccccatcggaaacaagatcaacatactcatcacccagactaatgctgcagcttgagagcactttctccttgatgcccgggtactttgcctcgagcgtatcgaagagcgaggagagtggcagcggggcagggagagactcagtgtttctgccggtataagtggacgcgctggcgaagtagtggatttggaatgtggacattctgtcttttgcttctcttttttttctcttatcttcctgattctttattgaggtgagacaggcagaactgtagaggtatgatggataggaagaggtagtgacgaggtgtaggagttgggtaaagtggggtgtggggatcttcattgggaaatcttatcttagtagactttctaccaggtactctgtttactcaagatccggtacgcgacgtaagtcattcatatataggtgtatctaaaccagtgctctaaaagcattcaccagatcccgcttcaaatcctcccagttctccaacccaatgctaactcgcagcaaccgtcggtccaccgtcttgtccgacattgtccgccattcaatcaacgactctacgccacccagactggtcgcgtgctggaacagggcaagcttgcttggcaagtggcgcgcatagtcttcttctctcatggtgatcgagaagacaggcccgaacccgttcggcatctgcttcaggagccaggactcgtcgtccttttgaaggctggagtggaaaacctgctccagcactttctgcgtcgcctcttcatcgctgccgggtgcggggcttggagtctgcagcgcgttgtgaagccacaagaccaaattcgttgcgttctggctcagccgttgcacacgaacctccagagtccgcaaactccggacgccgagccagccctccagattgcccatgacaccaccaaggaaaacgcggtctctgagcaattgctgcgcccagtccttgttctgcgtggccagaactccgcacaagacatcgctgtgccctccaaagtatttggatccagagtgcagcaccaggtcagcaccaaatttgaacgggtcttgcagaggcggcggggcaaaagttccgtcaactatcagataagctcctcgagagtgtgctttcttggcatattgctcaatattgaaagaggtcccctcaggattgactggagtttccaagtgtatgacatccccagcctccagctgttcggctgggcaatccaaatccagcttctgaagtccattcagacggttgaaaatgtcaatcacaccgtggcatccatgatatcctttgccgatcgagatcctacgagggtttagaagggtgagagccgcatggaatgccgacagccccgatgagtaactgatggtttggccgttgaggagagacgaaagaatggcttcgaatcgggtagtagttggcgcagtgagacgcgagtagatatatgacgattgctcctcgagggtctgcgcggttaacctctgaaaaggaatgattttcgggatacttaccccattgagatctgccgccggcatcaacttggccgggtcatcggaatagcgtaaggtggtcgcaacatgaataggaggcgcaacatcagtgacgacatttagcacatcgtctgcatgcagtgagcgcgtcgaggcgccaacgtccatgccttctggcagcattgcgtttgactgtgggttaaagaggggaagagggcgagaaccgcaaagcggttcataatgaggggataaatacacgtgaccggcgggtccagtggagattgcgtgcccgacgagccaccgagcttcgaagacagcaagcctgctagcaattccagcaactgattgattctaaacctctaccgccgcagggacgccattcgtgagggctcgcggacggaagcaggcgctgctgattggaagttgaatcgatctgatctctgtcgtcagttttaagtcttatggttcgtgcaagcagcactcaccagcctccgtatcaaaagcaatggtaatatcgtcgtgttcgctaggatactccggcatgtcgagattgagaaaagcagaagaggggtcatcatcggtctttggcaacgcgaacttggcgtcaacaatgcggactccgtattttccggagcggttgaaagcttcgaaagtgtcggtgctcttcaggacgaagttcaagcatttgccatgactaaagtcgttgaggaatgctagtagctgcacgaccttgtcctgacgaacaatctgaattcgagccatgctcgactcccacttcttggtgatgggaaccaccattcggcgtcgagaaatcatgaacgaagatgcaacactgtgacgttagactagaatactcaacagcatgaccagcatacctatcaaagaggaccgtgaagcccgtaacagccttctcgaattcatgcaatcctacgaagtcagtataattccgagtaaacaagcaaagacatacccttgaccgtcatgaaatcgaactttcggatcattggcttggccatggcaatttgaaggaaatcagccaacttgtcttgcatatcgggcggaatgaggttttcagcagccgatacggtcaagtcctgctgagctggcctgtacaaactgagaccggtccgattgtttatgtccaggctgattttcagttcaccaggaccaaggttgaaccgatctgtaacggacccccactctgaagcaataaaggcccgcagatgctcggacaacacagttgggccgtagccatgctcaacatagtcatgttcctggtcgataacacaaacggttcctgcgggaaattgcaggtgttgcttcgctggttggccattgaaccggtcggccggctgttcgatggtataggcacgcagagggacgtctgctaccttaagttctctctgcttgggtaacatggccagaagcaacgaatgaaggttagtgcgctcgcgagtttcctggaatgtcatcaacatcgaccgactgcggccatcttcattcactttgagaacaagtgccggcgcgccatcctcaccgcgaagaagcccaaacagtatcggcgcaccgtgacccaagatatgacgcacgctgcttaaggtctttaccttaggcgtggtcaataccgtaatacggaaaccacggtgagcacgtcgtgtgcccgtcccctcggtcacggttaccgaacgctcaaataacctgacacgacaccgctcgatagattcagctggaaatgcttcggtgtcccaggatccatatactggaacagcttcagcgtacactcaaatatcactgattcacccgcttctggctgcaggctagcctcggtttttagtgtgtaattgacaatgttccagagcatcttgaaatcatcttccttgaacatgacatccaactcaaatccgcgtgggagtttgaccgtcattgagtgtgtccgaacttgccagttaacgtcatcccatgtcggtcccttcttcttgtcgggctgaatcatcacattgaccaaatcgctctggctggtaatggcagcgaggacataccagtctgcgcggtcacggataatagacaaggcgcaaggcatagagaactgctgactatcatcctcactggagctcacagatacttccacaaacatactcccgtaactaaagtggcggctgctatcacctaaaggcatcatttgcacgaaggttgggccctttccactattgtccagcaacatggatcgcgaggtcgccccagaaagaactgctgacacatccggcgcgaagaacggatatctaacccatacgcttgtgtcggattcggtctccggaggtatggcggacaagatgttgtttcgtttaattgatactgccagagatcgcaggtgactcaacacagattgatgcacccccagcaggtctgacagttgcttatcacctgtggtattggccacagcaatcaatgcatcgacgcccattgcgccatagcgagccacttcttggtgctgagggacgatagcctcgttaatccacagtgccttggcgagatcaatcacagcctgctgcgccatctcgggagacgggcgagaatccggtcgtgagcgcgaacgcgcatatgcctctaatctcttctttcctcgcataaaccaccagaccgcagccctcacccattcggtaagtgacgtttccatcaaaggcttgacgctttcagctgaaagtttaatcacatcctgataccgccccgcatactctttaaactcaacataagccacctctccaaattgattcgcgacggaccgtagcgaatatttcggtggttgcggactcgcggacttggtacgactctcccgactggacggacgaagttcttcactagcggcgttgcgtaccaattccggctttggcggcgataggcttttcatacccccgccaggcgctaaactagctgaggacgtgaaatcggtagggctcatggagcgtgtcttctctggactcgggggagtgcgaagcggacttggcggcgacgcaggctccggttcagtattctgaggtgtctcatataatgagctagggctgaccggagttctctgatttagcgaggtgggctctcattattttggctgcgaagcacgaccttcttctagcatcatttgtgatcgaaccccctgagcgagcgaatcatgctccgtacatgccctgaaagacaacgcaatatccatttttgccgggaggttaaggcccctggtggtatcaacctgcgggcggtttttgataaggcgaggaaccctaacaagtgtgcttgatattatgggcggatacccccgattgtggcttagaaaaatggctagttttgagatttgccc

SEQ ID NO: 5392 - DNA, 4654 bp, Emericella nidulans
  unsure (1)..(4654): unsure at all n locations
tccagtttcctttgacgctgaaaacactgctaaaggcctatgtcttttacagatctggttgcgcaacgcctcgtcctctttccccctggaggaagcgaccttcccaacgtcgtgcgcgtgctgaagatctgtctctctcgcgggggcatcttccgcatcggccgccacggcttctgggatgccgcgaaaccgtcagtgattgcggcgaaagggcagaacattcgcacacagtggaacgaccagttcgtcgaggacgtgcgacgcacctttcaagcgaccgggatcttctgcttcttcccgatccagtacatcaacgacaatggcctcggcagcgccgccagtttcctctccactatgctcaagacggatggagtgccaaacgacctgatctcgaacttcaacccgctcagcatcatcttcttcgcgccgatcctgaactacgggctttacccgttgctgcgccggtggaagatccactatggccctgtggcacgcatggcaactggtctcttcatctcttccattgggggcattggatacactgtgctcaactactacgcgtacaaacttggtccctgcgggaaatgggggtcctcggatacttgcgttgatgagaacgggaatacgcgcgtggcaccgatcaccatctgggtaggtcctgcacaaaccaccaaccgctgctcttgttacctattatactaatagagaataccagtggatcgccattccctacgccatcggtggcatctctgagctcttcatcaacgtccccgcctacggcatcgcctactcccgcgcccccaagaatatgcgcggcctcgtctccgccatcaacctcctcaacacggcagtcgcctatgccattggactggcctgctcggccgtgatcaaggacccttatctgacttgggactttggcggcccgtccattgtaggctttgtcctcactgtcatcttctactttatgttccgccacatcgacaaggaggagtacttcctcacggagatggcggagaacgagaacgagacgactgcccagcctaaggagagcgcgctgagtgagaatggggataagacattaagccccgtagagaaggttgctgataatgagccggagaagattggggtatccctaaaacaatgaggttgactcggtggattgcatagtatgattgattcataatcagcttaaggtcggttgccatctttggcttgaggcgtgatgggacgaagtcgacctctatacaaataaatattaatcacgatcaccatcgaacaccttatcgaattctttttacaagaggaataagacttcatccatctcatgagtcgttctcatcggctctgcgtcccaattgggtcatactccgatttacagctccgcactacgcccaaccattatatcgaaaattgcgctgagcggcgaaccctgttttcacctgttgatagagtggagtcattaggctgatgctgtgatattctcagatactgctgatacctacctctagaagctcacaatttgttccaccggaaaccgggcagtacagtgataactataagtagtagcaaatcataacttgatgggccatgaggggctcagggttcagggttccctcctgtactcggaagccaatgaacataaggaagtgcataaacgtcggaccagctgtcaattctcaacttctcaccaacgtccctcgcggtttctgcttccttggaatctgctgatattcaggaattagcagagccccccctttttttatgtcgtcaggcgccatgaaattagctaattattgcttagatgccttgtcatgtccttcatcgagggcagcatttagggctaaactctggataacacgtcccaagggccccggtcaaccaccatgttcaggtattgtctgctgactctccatgtttgaacaacatccagcattgtcacctactctcggacagggttgtccaattttgttctcacgagcgtcttccctaacaaatcctgttccgggactgcccggtgaaacaaacacagcccttctcctaccgacagatttggtccgatgtagacacaataactgacctaattcatacacctaatcgacggaggaaaacaggatactttgggtgtccaatgcgctgctgtgtcttaaaaagtagtcgccaaccagccctatggaagattagacatttttacctggctttacagcggagcttgaaggttttggtgtaatggagattgagtaagggacaaactccgtctgtgcctatttgctgtcattctactgcacgtacttcttaccattgctgtttctcgtatagttacactaagtaggacactgctcataaagggtctgcatgctgcaccagtgcaatttagatgagaacaaggacgtatttgcgttgtctggcgcaagaactgaaggccattcaacttaggtagctgaaccaagaactcagcagagttattctatgataaaatgcttgggtgcgagacaaataacaatcagttggaatcatgtatctctctgataggtgccacaatgctaagactgcttcagctgcttggatgaaggggacaggtagtaaatggtcgtcgacctaagcttgactaggggtggttgccattggccgcgacacattctagaggcaggcctgaggaatataggagtaaatgcaagagtgttgaccaccattccaagactttccgtctaagcccttatactgtagctttatagtacgttttggtaggccgcgatatatatctcgctctacctagactctcaacataaggactgactttgtaacgggtgtaggcagtattattttcaactggctgtcctgtataaacgagtatcacaagcttagagaaagaaacaaaagatagaagcgcagatatcttcctcctccctttatcaacctttctgacttcccggacctgtatgccgacggatcccttttccaaagttatgaggacggatctcctttcctaagcttcgaggccgcaatttccgaagctgtacactgatgttgcagaaaccttatttagaaccaggttgagggcatggccgacaaccaagatccaggccatagcctgtgacagacttgactgacctgccactaagattgcgccgtcttagctttcatatataatcctgactctaggtctcaacccgggtctctttccagcttttagtattcaagctcagtcctgatttgggattactccagacttgcatatccgatcaatttacatttacgtacgcacatgaacaaacgatgccgtcaatctttactcacgagcacctctctcgttttcttcaagcgccagaaaggtcaccaacatatcaatattgatcaacaccagccttttcgttacgaactgggatccacgctcactgtcgtatctgatgcgcttgttagatcacgggtacaaagcccctcctcccttcactgggccattttttggccatttttcttatacgatgtttgcgagaatgtcgttggtgcttgaccctcgtgtgccattgattctcaagcagaatgctttggcggaagtagatggtgatgaatgcagagttgtcggtaatcaataatgagaagctttgagcttgtcccggggaacagaagtcactgtagatgcttgtgtttccttgctctcgcagggacttctccgcatagtaatgccccgctagccgacgtccttttgagaacgcgcttcaggaccgcatactcggatacttttccgatggatcggggtgcgataccccgaggactatcggagaaagaccgagcgaccgaggccgttattaatgaaccactgcggggaatccacctcaccccgccatgacaacacctgtccttgctcgactttaccgtattctttttcaattagttctctaaccccgttcaccaggattggtatatcgcttttcttatattgatagaagatggccctcaacacagccctcaataccgctctgcaaaccagcaagacagcctacggattctggcttacgtatgtcatgctttcaattcaggaacaagcctagttacaatagtacaaactagctgacgaatatactaactcttaccagactccctggcgccggcgttgcaaagacaatcctccgctcaacagcacagcacgcaaacagattcagctgggtcctagtagacgccgagcacggtctgatttcagataaggattattatgaggtagattcctatgcaaatccgcggtgtgagggagtagctaatggctatagttgactaatgccgtagcatctgaaggcgcaagcccgatcatccgcgtcccgtggggcgaagagtggttaattaagcgcgcccttgatgctggggcacatggaattctgacaccaatgtgtcatntccgaagtaagttgatctgccgagcttacttcttgaagccttgaatgaagcgatatgctaatgagtttgcttgtaggaggacgctgcaagattgtcagaattgcaagtatccccaaagggctgcgcgggacggacctatgttcgcgctgcattccttcctgagggtcctgcggcacatatgatgctggggccgataagacacagctgtgttgtgcagatgagtcgaagggggctggaagtgtaagaagatgctgcgtagagggctgac

SEQ ID NO: 5393 - DNA, 4026 bp, Emericella nidulans
agtcgggtcaaattgaacgacatcctgtctttggaccgggcaagggaccttactacagggggccgtttgctgcatgggcacggccaaccgggacccatccggaatttatggcagtgactgcgctcgaaccaaattacgaaatacggcagctgggtggcatagacccgaagcgtcgtaagggcctgacttctgcagcacgagaggaggttgaaaggcatataacccttgctaggatacgaaaccagaagcgtggtggaaacaagaggcgcaatccaagaatcacatacccggcaaaagacattatgattgatatatctagtgagcccaacatggagaagaagactctggcccggggcctcgtctgtgacacactgtctaagcgcagatacacaatgcgaaaagcaagtcttcccattattagcaatgtcgagccggaagttatcgaccttactggtgactccgacgccgaaagtcctgaaacatctaatatcaactggaaaccgccaggagtctctcgaagaagctctgagttcgaagacgaagcatgtgatctagaagaagacttctggtggccagacagcggcaaaatcgacccgaactttgccgagtagagttgcatctctgtacataacttatgtatttaatgataatgaatgcagtagcaaggcagcttcctactttgggccgtgctattacgattactatgagtccatgtgcagattactcactagtctgtgataagcaagtctggcccacgaatgccatatgacgctaacagcccagattctcattcatgattgctgggatttactcgaccgtacactgcacattaaatacgcttcggcacaacacccaccaaacatgcatcggcatattaaggtcaacttatccgcagcagcctggtcggccagtatttatccgactcatattacctgtggcttagacacacagccacagtaagcgcttcaggacaagggaccaaccaataacgtcactgcagacatcatgcggcaatcatggagtagagaagaatataagttcaagcgaagtgtccatcgcgatctccgcatttcaatcttgcatcgacatatcccaatatcagtcagctacctatctgttcacttgggttggtgacttttcgtattagacattctttcttgaatcgataatcgcttcaagcttgctttgatgtcgttcgccccacctcctgggcctcctcccccttctgttccagagggctggacaacccagtatgacgatctctattaacaatggtgcggttgttacctacatattctgttttcacaacaaaggcaactaatgacagtttcacaggttctttgtcgatctagccacagggagatctcaatgggagccaccccaacccacctccaccccagcaccgtctacccaagtgcacacgccagtcccaacctcagaacaagcacagagcagtactcacacagacatacccgcacccccgccctcatacgaggaatctggaccgggcaatccatccgccgtcgccagtgccgaggccacagataagaaaactgcccacaatttcccctcgaataatccgtacaacggcgagtctgcttccagccccggaacccccggaacgagtggaagtggatcttacgccagaaaggatacagtcgagagtgatgctgagctagcagcacgactccaagcggaagaagacgcaagggccggatctgccgccccgggcgccgcagcaggctattataacaataatgactccccgcattctcaaacattgacgccgtcagcttcagcaggcggtacagataagggcaaggagaaaaagaagggctttttcagtaagcttatgagcaaggctacatcagcttcaggccctcggccgggcttcgcgcccccgcatccgcattatcagcagcccgccgctttcgggcgtcctcctcccggcagctacggtattcccagccctggccctggatatggaggccccggtgggtattacccgccgcagcacgggtatggccctcctgtcgggtatgggccacagcctgggtacgggtttcctccacatggctatcatggcggcgggatgcagccgcagcggcgacacggtggcggtggcatgggtatggctggtgcggcggcgttgggggtaggtggtgggcttattggaggtgcgttgttggccgatgccattgacgacgatcatgactatggcggcgattatggcgggggggattttggaggtggagatgatttcggcggtgatttttaaattctattgctgtaactgtgaccactgttggattatgatgaatttgtatataatgatagtgttgcctttatgactgtttgatgattattgattgcctaaatttgtttccaaagtttaatgccggtagaagaaatatatgcgcagtatcaacgagcaaactgtatgcatacctataccctttagaagtatctcaactagttatacatcatggtatatcccagatcagctcaccttctcctcgcgccccctctattctccctcccactcgcggcaccagacccagacacaggaaccggctgtcctcgcggcgcagccccggccatccatcccgcaagatcaaagtttgcagggccaccaccagccatagcactctgcgcgccagcaattggcgatgcgcgagactgtttctcaaactcctcacgcagttcggggtccactggtaaggaccgttagcagccaaatccatcacgtaccagaaaaaaagagaaagttagaacttactgttctccataagcttaggcatcccaaaggtgaaagccagtgccacaagtgcaagcagaatcatgggatttttgagaagcgacagaggcgagactgctcagccagaaacatcagaattagcacacgttccaaccataactctcgaggcggatttgctggaaccacatacaagtctgtcggacttcgtagaaccctttccggccaacaggcctcgcttcaacaaccacatctccagttccaccaccaacctgcgccccagaaggcctaatgtacttttcggccccgcgatttccccactcattgccacgaaatgtctcccaaacacccttcacctcccccctctcatctagatcgaccctcagcggtggaaagacatattctgcagaccggatatcgagcaggtatgagccggaaatactatgttgggagggatccttgcactcggctgcagcgaagtcggagaatacgaatgtcgcagagcgagtgaggggtgctttgagcggtctcgcgagggtggttgaggtgagtgttgcgtgggtgtcggccggcagggactgaggattagggaggaccggggagggcgggattgtgatcgtaaattttgaagaaagggctggatgtactagaagaaccagaaagatgagggcattgatcaggtgcattttggaacggtgggagttgttaggatcaacgcggacgtggttctgagacgagttggagttttggaaggtttaagctggcgcttggcaagctaggtactagcttgcccgagcggatgagaaattaccttaagtattaaccgtacatcttccttcccttgcactctgtttagtgctttgggaatggtaaaatctattactaaatgtatcatacagggaaattttgaagatcatgcaaatgacgcccgccgtcaggcggaaactcgctatgtacaaaaggcagtcactgggttcgaattacagtttggccttcggagcaaactgctcgttgttggcctcttcgtatagctgatcgagaagctggcgatactttcttcacacaggggggcgtttaagcttaagactaaatcattaagttagcaatttatttaccattagaccagggatccatacgtcggtgtcagcaggtcattcttttatgaaaacggttgtccataaaacgcaaatcttcaccctttcatttccgcaagttgttctttttgctaccgcctcaaaaccctcaaacacttttttgatcttgtggcctga

SEQ ID NO: 5394 - DNA, 3693 bp, Emericella nidulans
tctgaatgtttcattgtctaaagatcattgtacgagatgtgggttacgcctttaaaagcctacctgatttggattccacccattgggatttcaatgaattacccaagctgctcgtaaggcagggttcctgaaccatctctcgatatagaccttgagtttgaaagtgatgcataatggacagagaatctcattgactaatgcattcgattgtctcaggttagaaacgttgattaggcatttcagcctttgtaaccgcctgaatagttgcttttagcccaatagcgaagccagtttcatcaaagttatatctttattcaggccaccattttacatcggaccttttatagtctaccaattactgctaaatgatattcgaaacattatctggttctcttgtagttgaaccttaacgcaaatcaactgcaaatagcttcatggcatttgattaccttggcaacctatttcatgccactgctctatatgtgcaggcctaggagcaactccacgggaaccaaatctaccaaggtctcttctgaattgtagatagcctgagagtgtttgacgttgtccttgcttatttggcagctgtctagtcactacagttaatcaaggcacgttgaaactgattctcctcactaatagttcgtattttgctattttgcattcaccccaccatcaggctttgctcaaactattcttcgaaatgtagttgcagcctagagtaatcacaccagaatagccggatataacgtcaggtttgaaatgaactagcgggaaagaaccttctcgtgcttggaccacggacagatatacggagattaatttggaagcctactgtcggcgcacatgcaagatatctgtctttgaaataaggtacactgttctctagggtccattgccgcgtaagttcctgactcagagatatctttccatgttgctcctgctgctttttataggccttataacgctcgatcactgcatccttactgaagaagagctctgggtcacaggccgggtcttcctcagtcaagccccagtacccaaggtgttcccacgggtcaaggcaaatatcttctggattgcttgcggaatcgtgctcgacgtccctcaagtccacaatataactactacaggttagtcagggattgccaaccagtagtaaaggagccaccatttttgcaggtcatggtcccatatcaagttctgaagccgtcggtctgtataatagaaataatgtgcaccaagatccctgcgcatcgttaacagactggtaggctatttactacgggggttgggcaacttgggggtcataccataggcattcaggaaagcaattcgcacatgatgctgctccttctcctccctttctccaatctctctaagttttctccgggaagttttctcatgccaatgtacgcaatatagccgcctgggaatatatcaccgttaccttgttgctcaatgcgatcacccagaagcttgggcgtacttccacatttttcagccgccttagggttgcaaatctcgttccagatttcgtcgctacattggaaagatcaggcttattactccagccaacaagcctgtcaagtttcgttatgattgccggaaacctaaactaaggaaacacctactgcgttttcactttcataatggcaggaacttcgcttaggccataatggcagggacttcgctaaggctcgggatctcatgtactagaacaagcttcgcgttcttagcgatctggatagcttcatagacttcatgctgttccgttgtctccccgcgctatcaggaccatactgggtccgaaactttcggaagagtttttcaccaaccctcaaggtcacccctcctaagctcagtgtggaaccagtaagctttccttgccctgaaagactcatggtagttgaaagtatataaaactgtgccttgagcttgagctggagggaaattcgtgcgtgacacctctcatgcacttgacacacagtcacgtgtagctgacagctcttcagtaagaaatcgctaagccaaaaaggtgccatggcttccaaattagtcttagacagtcatattttctagtcgacaaatagtaaattgtgtcactgcagaagcctgactccccatgaagtagaactgatgaatacctttctttctattgatccaatggtcactcttgaataagaatcgcacacggaggtcattgttccatctgtagcatgctgcctaagccatgatccatcagagtctttacgtgcggctgaagctcacggggttaggacagtccgacgctaaggagcgctcttaatttgaaaatacgaccctacatcgactgtactaggctgcaaggtatataataggtcaaatggtctcaccaggctccaaggtatcactagtggtatatgactcacggctttataaatctgtggtttgtcccaagcgtttccagtcaactactaagtcatctatacaatttcaacttagcctcgtctcatatacatacccactccaaggcgcaattactatcaacacttacatcgctatctgaggttccagcaagtactaagccactgcactaagttactgcacttatcattgacaaatcctgactcaatacaatgtctcacgaaataacactcgagcccttcctaataacggacatccgggaagccctcgatgtttccgaacttgcctttgcagcgctaaatcgattcctttatacgtctgctctaagcgaaaaatccatggatgcaatggtcgcgctacgagaaggacaattcaaagagccacacgtcaaggcatttaaagccgttcatactgcgacaggaaaattagttggcttaacgcgatgggcagtgtacgcagaagatcaagttgtggagaagagtgttgaggaggtcgttgaggcacgcttagcagccgatattcccgagcgccgggatgaggtcgcaagagccattttcacggaaattgagttaggaaagagagaattcctcggtgttggtacgattgaaaataacgaaaaaggggtcatcttgcgaaagagggtcgaactggaagccatccttgttcatccggattatcagaaaaaaggaatagccaagagattgctggcgtggggtattgaagaggctcagcgactgggcctcaatctttggcttgaggcgacagatgaaggaaggccggtttatgagagggcgggctttcaatctctgaaggaggtgaaggttgtctgcgaaggggttggcgagtctccggttactgtatgttgaccccgttattcccctatctggcgttatagggctaatcttcacagtttatgatattacctccaaagcggtcctcaaagtgaaggaggagatatgattgaccggcatttttcagtcatatttggaaaggacctaaacctggtgaacccataatcggaacaatagtatatgcccaatcgcagtatttcattgaacgccccgggccctgcaccgctaacagttcagttataaaagagtagtgtacccacatcagggcagacattcggcttctgctcttgccttcttgggccttcaattaacagcgttgagagatttatcagtcttgctagatagcccatgatagcgtgcttcccgtctccgtagcattataagacgcttcttagagctcaataaggctaaataaaggtacctttagtgcataata

SEQ ID NO: 5395 - DNA, 5624 bp, Emericella nidulans
ccgccttcccaatactcactctgtatggaccgagctcccactttaagtgaaagtctcaccgcctacccatgctggaaatttcgcgtcagacacaagcacgtccacgtccacgtcgcgagcaggaaacgagtctcgcgaatgttgcttggtggattctcagctccaccatgcctcgattctcctcttttgcctaagctcccctccaaacgatacccttatccttgcgaatgtataatgtcgttgtatgattgttttgtttatgggacacaatgactcgcagtcatgatctccccgaggtatcacgatctgagccaactttcctttcaccatctcaggaaattccttcgtctccgccttcgatagcctctgatgttggcttacgtcgcaagccgaagaagcctcctccagtcactcctcggtccttcagacgctttttcactcctcgttcattgcaggatagcagtcttggaaatgctgtcaggaccagtcgccaagcccttatggccctcagttctccggcagtcaaccggctgggacctgcatttacgaggacactgaaggctgcgatgagcataccagagcctacagatcattttcaaacaccaagcaaaaaacggaagttgtcagtctcgtccgttgtgtctccccttcaatcatcaccaacacgcagaatccgtgttcggggattgttagacgatgacgaggaggtcgaggtccctgtaaaagacattcatgtcggtgctggaatccgggtgaacgaagccaagcccgcaccaccaattaaaccctccaccaaggtctcccccgtgcgtcgatccatggctctgcagacgtctggggcgctgtttatgcgcagcgtcatgggaacccgagccagtcgagtgaccatgcgagcaaattccggcactggtttgtaaaaatccgctctgaatatatatgctgtttgctcactttgctctaggctggcaagacctaacatcgaccttctactcccgagctgatgatgctcatacttgcacaagctcgtcaggcgatcgccttgcactcccgttttgcactgcagcatgcaatagtacgtcacagttttttgttggatggaaacacactaaccactagtgtagccaatacactcgttgcgataggcgatgaggaaggtggcattcgattgctagattcagcaaaaaacgataaaattgggttctcgaaatcatacctaacgtttcgcccacatgccaacgccattatggacttggatttctcgtcggatgatatgctgctagcaacggcatcaggtgaccaaacagctattgtgattgacatggctactcaaaaacctgtgtattgcttgtcaaaccacgtgtcgtccctgaagcaggtgaagttccagccagcagccaatgataaggtcctcgccacgtgcagccgagatggaaatgtgaatatctgggatttgcgctgtaagggtttcgagagaccttctctacaagtgcaatgttctctcgaatctgaatctgaatttgaacctgccatatcctcaaagatgacctacccacaggtcttaaatacggtccacggtgctcatgcttggatgcctcagataatgactccagaaaaaactgagcctcaggtggctcgttccgatatcacagtaacgtcgcttgcatttcttccgcctggccgcgagaatctttttgtgactgcgtccgaagccaatgcttgtgtgcggttgtgggatctgcgcacagcacacagcaatcgtcgtggccgccctgctcttcctctttcgacgactcgagagccagatagccatatcaaataccgccggttcggggtcacctccatagctttaggcggcgatggctcacgattatattcgctttgccgggacgggacggtgtacgcctattccacttctcatctagtccttggccacgcccccgaactttcgttgcacaatgaccgtccacggcgctcgggcgggtctgataaagacggcctcggacctctgtatggctttcgtcacccgcgtcttcgggtttcctcattctatgtcaagatcggtgtccgcaaggcttctggggacaaaccagagatgttggcagttggcagcggcgagccttgtgctgtcatatttcctacggacgagaggttcctagacccttcgacacaacggctggctactcaaccagatcaatccccatcaatcccgtcaacacctttgttttccactcgctctggtctgcgccgtaccaattcaaacattgggttatcacaacgcctggaggacacgatcccaatttatcatactggcacacctttgatcgaaggccacaagaaagaagtctctggtgtgacgtggacagttgatggcgagctcgtcactgtgagtgatgactacagcgctagatgctggcgtgagggtcctgatgcaagggacctacgcgtaggcggagagacagagggccgcaggtggcgatgcggctgggctgatacgaaagactcttatgaagacgaagatgaatgattctcgtgaatgctttatctatcccatcatcttgcacctgtttacccgtttgttttttccacatgcgtgatcccgggtctgtctgtttctaattgcgagcatttggcggcgttgatagcatgaactctttctttcccattagcgggtgttagtttattgtttagaggcttgcaatacccatttctagcagtgactttgcatagaacagggtgtctgcatatggacaaaagaaatttaagtttcaattcacaggaacattttctccatgtagcttgccctgcacatatgctggatcatcagcgtaagattctacaggcattgaacgtcgagatggttgtatgctggtactagatcctattatacttttatctaaatccgtacatgcagagataggaagatctcacgtccaagagaaaatattactttagtggtcgtggccatgtccatcatcttccttgcgttcggggtccagcttgatcatagtgtcaatgcgcatgatggcaatgcaagcctcaaccgcactcttaagctgcttgagcttacccatgctaggctccaagacaccagccttgaggcagtcgtggacacggccctttgtcaagtcaagaccatagtttcggtattccttcttcttagcgacggccttctctttctcattagcttcgccttcctggacgcgctgagacaaggcgtgtctcttgcggagttgtgcgacaagctcggaagagtctttcgctgcgttgacggctagagtcttgggaacgataaggagggattgagcaaattcgccaatagccaattgctcgcgggagccctatagggttttgtcagaatgaatgagaactggcgggggccatattacgtaccactgtgacggcgaactcttcaaggtacatgtgaagagctgtctcgacagcaccgcctccgggaacaatgctaccgctttccaatgttcgcttaacggcgcagagggagtcgtggactgaacgctccatttcatctaagctgaaatcattggggcctcgcaggatgatggacgctgaagtgtgaaccttggtacccttgacgaggatgcattcgtcgtcggatatccgctcctgaacaacctcatctgcgtgacccaggtaggaggcctcaaatttctcatcgccgttcagatcggagagcgtgctcaccaacgtagctccagtagccttcgcgatacgtcttaagtcttccttcttgcatctccggacagccatggcacccttctcaacgaagagcttgagaaccatgtcatcaatgcccttggtagtgaggataacgttggctccagacttgagaatcttctccacacgttcaataacaatgccggattccctttcacggatcttttccagctggtcaggatcgtcaactgtgatttgaacgccgagcttcattctctccttctgcaggttcatgtcaaggcaggctatcttcgcgtctgttatcctagtcttcatggcttgggaggcaacggtgcagttgagagcatagccgttaacaaggactgactctgttccactcttcccatgggccttaagcagattgactgccttgacggggtatttgacttcgttcttctggtttgtggtcttgaccagcagcattgcatcgacgcacaagttcgcaaagaagtcggcatcagccccgatgatcttgctagacatggacgttttggcaatgttaaccaagctgtccttgcccaaatggtcaaccttcgtggcgatgttctcattcatatatttcacagcctcccgaagcgctagtctgtatccgttgatgatagttgtggggtgaatgcgattcttcatcaattcgtttcctcgtcggaggagttctgcggcaatgaggacgacggaagtggtaccgtcaccgacctggaagattcagcacaagtgctttgatacattaattatggacggtacgcacctccctatcctgttgttgggctagatccacaagaattttgccagcaggatgctcgatatccaacaggctcaaaatagtggcgccatcgtttgtaaccgtgacatcctagcactcgttaaaggtatagccatagattgcggggtccgtaacaagcatacaccgatctcgtcgaccatcatcttgtccaggcctgaggggccgaaagagctcttgactacatttgcaatcgcttgggtcgcaaggactataattcgtcaggggcggaccaacataagatgatacgacgcagatttcgactcgacataccgcactggtctcgaacatcggcaccagtgattttctggcctcctagaactgtgtgctttggttagtctgatcgtcgaagaagacagcaaactctgccacgcaggtggatgggactcacagagagtgtccgcgttacgcggcgcctcgaaaatgcctgccatgtttatacgtatgctgtgtgagcgaatgtcaagctccgacagctgcttttctggggggttgaatgggctgcgctaagcaaaagattctgccaggcgggcggtgacaatatttcgatatcccacttgatttccccctcaatgagtcaaatcctccacgagaccccggactgcctttcctttctttagaattcacgtttccaggtcgatattcgaggtttcgatacggtcccaactaaaatggccagccaagctcctgccgacaacgcgagtgtcccccaggaactgcctgaccgcactcagaaccccgctggggaggctcctcaggccgaagtctcgaagaacgccgcaaaaaaggccgccaaacaagctgagatggcggctaaaaaggctgagaaggccgcaaaggctggaaagtctgagaagggtcaaaagcccgctggcaagggaccgaagcaaaccccgataaggctttgattggtatcgatgtgggcaaggacgtggacttcccaggctggtatcagcaagtcctcaccaagggtgatatgctcgactactacgatgtctctggctgttatattctgaaggtgagaattggtaatgttattttctgccaaagagaagtttactaataccaacggctagcctgcctcgtactctatctgggaggagattcacaatgg

SEQ ID NO: 5396 - DNA, 3254 bp, Emericella nidulans
gccgtctaacccgcgcccgcataatataagaagcgcgttgtctccagaagttagtgaaagagggtgtatcggtccccgcattattgggtgtggattgggagccgagtgctggagatgggagctcttggcttgttatggaatggattgagggtgagcctgtcagggttattctggaggaatgggaggcatatttgaaaggcattgagagggaaaagaggctgggcttgggagagggtgtgcaagggagcgaggaggagaaggttcgcgggcttatgcggaggattgggagggctgttggggggttgcatagagcgggtgttatacatggggacttgacaacgagcaatcttatgctgcgccctttgggctctgcagatacgactgaaaccatagaggagagggatcagtcaccctctatggcaggtgaagttgtcatgattgacttcggactcgcgatgcagagctcccaggatgaggaccgcgcggtggatctctatgtcctagaacgggcttttgggagctcgcatccacgaacggaaaggtttttcgaggaagttcttgttgggtatagagaaagttataagggtgcggtctcggctctgaagagactggaagatgtgaggatgagaggaaggaagaggagcatgattgggtagttacctatataacaggtatcgaatggttgcattgaatgacaggacaaatgacaacgccgcgctcttagatgcaaaagaaaaggaatattcttaatcagaaataggccaggcagcccagtcaagcctcaacgcagctcccaacatccgcaagcgcaaagtagcccttgttctcaacaacccctcggtccttcaccacagccgtatacttaaccacccattgcgtctcaatatcccccttgaccaaaccaccatccttgccatccaactccggcgttggagccaggatcccggccccccgctccccaggccccagcaactccctaatcgtccccttgggcaagatatcgttacaatcattatgcgttaacaaatcgatcttctgctccttcgcatacagaatcaaactcttcggaacaacacagcagtccttcaaattgatctggtttactgcgggcttaacgcgcgtgtgctccagaaatcgggctaaccgctcgcttccaaattccgcaacgccaagctgcagtatcttcccctgctcatgtaaggattcaagacatttccacgtctgcacgaggctatcgaagtcgtcttcatgttcgaagctgctcccgccgtcaaccgagatactttcttcttcctcactgtcgtcttccgcatcaaaatggatccccggaaatgatacaataagtaaatcaatcgagtcgacgtgtagctctttcaggacaagatcgatcgcttgctttgtgtgtgcacaacgtcgtgtaacggggatccccgggaggtagaatagtttgacagtgatgtcgtactgtgagcgttcttcggcgagcccacgctgggagaaatctacagcgggaatgtagagcgtatcgtcttcttgttttgtccaggcggcgctgtctgctgtgctgggttcggaagggatggattgctgtgcggcttggaaatttgcgcgaagtgagttgattagttcgacatttgacttgaatgttgacggctgccggattacggacggacctccggaggtcattatattcctgttgagagggagaacaatgagtttggatagattcggcttggaggtttgagctgaggggtttaaagatgggatggcggggtaggaacgtacgaggtcgagagtaccaacttcattgtgcttgggtaggctgtatttgagggaggattgttgttgtatggtagtctaattgcctgttcacagcacgcaggtctgggtgagttgcgccttgaaggagtgagcgtggtggggttggactttgaagatccaaaatgatcgattgctaagcagcgggaccgatctactgttcttatcgagtaatcaatttgattacctcccactatacgtatacactacatctctcaactaatcataatcaagagtaggatcccagtctgttggcgaatactcccctgtatgcaaggacttcatatcctcctcgtccaattcaaagtcgacacctcggtatttcctggatgcgctaggagtgactgcttgggaagaggaacaaagccctggaacagtcagtatcaagacagtcttctatggagctaaacgaattcgagagcagaggacactaaccttctgcaatccccatcgaatcataatctgcgctggcgattttccatacttgtaccccaacttcttcaacaatggctctcgcatcctcgtcccatgcgctagcggtgaataagcctggacaataatatttcttttctgcaaccactcgacaatttccgaccgatcgagccatggatgtaactcatactgcccaacatcaatcttactttctctcacaccgtcatcgccactggactggatgtatgcttcaagctcgtcgagatggtggataccatagttagacacaccaattgactttgtctttccggctctctgggcctcaacaagcgctttccatgagccccgtcgggcttctttgccgccgtaaggggcgtgaaggaggattctacatgcctattagctgaggggattctttgagttaggtcggcgcaacccacaggtcgaagtattcctgctctgcagtccgtagactcgagtcgatagcccgtttcgtggcattataccccatcgagtctggcggaatcttggtagtgaaaaatatctgtgagcgatcaatccccgaggcagcaattgcgcgcccacaggctttctcattgccgtacatgatggccgagtcgacctgtattgctggttagacatttgcatcgagcaggctgaagaatggactgttgtacatggcggtatcctacgcgcaatgcttcccgggttgtctgttcggttttggacgccgggctggagcatgtgagcttagtgtttgtttatgagtgatggcgaagggttatgtacattagatagacctaggttttgttaatggcctatcgggtattattggtggaatagatgttactcacgccgtaacctaggaccgggatctcatgccccgagttcatgcgatatgtggaacgcagactctgaagggcggccatggttgctcggggtgctaggaattgagatggtgtgcctgaggggatgggggagctcgggtatttataaacatgagc

SEQ ID NO: 5397 - DNA, 5837 bp, Emericella nidulans
  unsure (1)..(5837): unsure at all n locations
tctcctaacactgtcacgcgctgactgattttctgctgcactttctcagacgactccaaggttatggagcccccggaaactcctgcgcctatttttgcacttcgcgcgtttcagagcgcgttgttcggaacccccaaagccgacgatgaagacaataccagcgttcacttgaaatccaagggggaggcccacaaccaacagttaaacaagaacaactccttgccaaggctgattgagcgaaatggagacagttcaaaaaccgattcaggtgaaatcgatctggctgtgaacgcgatggcatccccgactaaaagcatcctcatgacacccggcaccgtgtcaaatcgacggaagacagtttcttttggagaaggcgtgatcgacaatgaacgcaagcgcgatgatgtctcaaccaaaccggtgaagaccccaatacccgctacgggaattatcagcagtcagtgggcatcgagctcgtcggaaggaaagcgaagcaaactcacccaggcgctactggactcacgcgaaaacccttctagaacatctgagaaatcctctcaaaagccggatgagactcgctcctcaaaaggtactgctaatcctgacgcagcgcccgctcaaggaaatgacaatgaagatacgatcaacatgaacgagccacgctctcggtccggcaaatactggaaggcagagtttgacagctaccggtcaaaaacagctttggagataaggaggctgatccagtatcgctcggccgccaaaacgtacgcgaagaagaaggatgaagaggcctgccgcctagctgcaaagctgaaagaagaagaactcagggttgaggaaatggaacgccatgtgacgcaacttgcctccactatggttgcggagaacacacgggcagatatagagcaacttgtccaagatttgacgaagcagacagccctggcgctacaatataagcacaaggtcagcttgttacgtaagaccttggaacagcacggcgttgtcggcagcgacatcgacgaaattgctggagcatcagaacctagcgttgcccccagagagacgtcggaagctttacagaaatcccagcaggcgttagcagagcgaacgccaaaattgaggacatgaagcggcagcagtcagactttgaaaaactcaaaggacttgctctgagctccgaacagaaagcctctgacttggcgaaggagaacgcgtctctcaaatacacacttgcgcggtttaagcaggaagcatcaaaatatgaaggccgacgcaaagagagggaagcgaggctgaagtcgcgggagtccaagctggagacgcggattcaggagtatcgtgacaggctaaagtcagcaactcagcagcatcgaaagcaggaagaagagttaaagctatcatttgaccaagagcgccgccagatgcaggaacagattgatatgctgaaaacgaaactacgagctttcgagagcgcgacagagctcagggcgcgagctcgcccagagagccgcatagattatgatgggattcatacttatgactttggcgctaccagtccccaaaaagatgcccttgacgaaaccggtgaaactgaccaaccacccagtccaagtccgcggggcaaggatcgccctccgttgagtctagggaccgatctgacagactcggatctgagacaggcgatgaaggaaatgggcattgaagatattgatgaaaaattcaataatctgggaatatctcctctaaggtcattcaagcctcctcgttatcgagacgacaccgatattctcccgccgtcttcgccgcctgattttgggacgtgggccgcttcaaaccaacggcgtaatccagaaacccgtaactcgcatctactctacgtaccacgtcaatcttcagatgatagtcacaaggtccaaaccaatcgcctccagtcccgacgcgcagctacgaaatatgctcccgaccactcgtcctcaggaccggatacacatcaaatggaccgcgcacggagacggcaaactgttgctgctgccgctactacttcacagcgagattcattgtcgttggaccgaaagatggctgcccaggcgcgcctcagacgaagggatgactcccgcaaactaattagagatgatggcaaggagaacatgcggacaacagtgagagcttaagaccttttcttcttttgctatttaccatgtttcttcctaattttatatgcgagggaattgtaattatggtgctagattgcctctgtgcatctgagatcttcattccttacgttagcgggggttggcgtcttatcctgcggtttacgatgccccgggctgggatttaccctcattccggcaaattgagataccagtttttgaccttacaaatgctatcaatgtctgatgagtattattctctttctttgccatctagtcttccatctatatattctcgttatataaaacaggcataaaaagcactaggtacgtgcagtctgtctatctaactaactactcttttctacacgcattccaaccacttatcataccatctaatctaccccaattcgacttcgtattatctcagtgacgaaactcaagccttaccatcacagaaagagataacggcccacttcccactccacgcccactcgcgacctccggatctcgagccctcgtaagcgttgcgcagttcctcgtctttgccggctggaagaccgacaacacaatcggccttgcaggtgcggaatgacatgacacggatgccagagtgcgggcctagcgggccaatggcggttgcgaacggggttgtcgggtcccaggcagcctggagggattgttagtgtctcggaatagaaatagaaatatgaaaaattcagggtgtggtaggagttaatagtattgtgaacgcacatcgttaataagctttcggtagttaaggtcacccttgaacagaaccagttcggcctctttcaagtcttcgaagaggtcaggtgcgacgtgcggcatgcgccagtaggagccgcctgcagtccagaaggggtgagggcgaatgatcagcttgccctccgcatggaaatggctccactggtcgaagaggaacttcacctcctcgacctccttgtccgagagcgggctttgctgatttccagcctcgtcgggggcagtatagaagctctgggggtcagcgatggcctgaataaggtctgcgaagtcgcgtggaataacgtccgacacgaaccagggtatcagtttgggccgaaggactacgcttgtggcgatatcagccgaaaggagatatccggcgaggataaggtcgacgaagagctcgaagccggcgttgtcaagaacaatgtcgacgcggcgctcgcccttcttttcttccttggcttgtcgaaggacatcgaatgcggcattgagatcattgacgatgatattctcctctgctgccttgcgtgccttcgagccctgtagcttctggatatcctcgtatgtgagatttgtcagaagcgagaggtcagtggcattgccccacagacagatctcgcacatctcggagaagagcaggcgatgggattcttcggtggtctttccttcctttgcctccaacgctagctccttgtacctggcggccagctcgagcacggcaggtcgggaagacttgaaagtggacatcttttggcgggcaaacacatcgtagcctttccagtgcttcgaccgagcgaagagcgtgctcacgcgcctgtctgtttcatattgtcagcgtcaattgtcaagtacgatgcccaacgtccctgaactcacaaagataacactccgaaaaaagccatgacacattatgccacttagggtttcctcgcttttccaattcctcattatactcctggatacctggctcgccgtcgtcgtcgagaggcctagcacacaatgacaatcagtaccgtcaccccggagtaagagtacccttacgagagtaaagtaacctacgtcaactgcctatcatgctgaatctcatatttaagcttcgccaactcctcaatgatggtctttccctccttgcgcttctcgtcatccgtcacatcggcgacagtccgatgcaggtcatcaatggctccagtctaggccggctctaatatcagatgctgcatgtgtactcagccagaaatgtgctcaccacaatcacaggccatcggtcgttgacagacttgtaaccaaagctcttcgggtcggaggtgaggtatggagctggaggcggtgttagtcctattctccgtcctgcagaaaagatggctgcgcttacgaatctgggggtcgaactccattctgacggaagaacttgatattatgggagcaggtgatggaaagaacgagaagcagtcaaaagacgatagaagtcgtcaaaatacgcaagaaacatagttgtggaggagttgaccgatgactgcatttgacaacgatcgcggggtcggcggggccgtttccttctgcagatcgctaggtaaaaccgctccgatagagtacggagtacgctatacgaagtgtggccgacttattaatcgaatagtttacaaatccagactactaagcaagcgacgctagaaccgagcaataaatgtactcatttaaaaatgcctttttgtccaatgctacctagacttgcaaattctatcctaacatagacaccatgacatgaaatgggaagaagatgctccctatggtagattgttccgctatgcaaaatctggaaatcgtgagtaccgtatcgagtacattcgtatactaagacatctacccaaaaaaggaccagtaatgagagtctcatcccaaggtctcaaaaagtccgcaaaatgcgccacatttggcgaggccatggccatggtcgttctgcttcgacccggtagctagggtacctgtccctcaaccgcctacanctgcgaaaactcgagttcagctcacatcagagacatccncaatnttgcgcataggcctagatgctatcagtgcttcattcacgataaagaaggcaaaatacgtgtcagatcacgtgtaggactcaccatcggcttgatatctgggtgaggcaccgcctcgaaaacctggtattcgagcttgagctctggtccgatcttgatgaaagcacccttgttctctgtcgtatcgcagtatttcggagcagagaaaacggtgatacaccgtccatcgtgctcaacctcgtacccgttcatgcgcacctcgtgcgagcggatgatagcttccagcccgttgttctcgcagaagcgctttgtgacatctggaccgaactggagaccaacacctcgcttgctgggtccgcgaccaggctctgtctggggatccgtccatagcatctccatcatcaacccttgctgaccgggttgcttctggttgtggcggttgagctttcggatatcgtccagcgtcgtcttgtcgtcggagaataaaccaccgtggaggacaaggtacttgttgccaatcagggtggcaagaggtagcgctgagaaggactcggagaagaccttgaacattgtctcattgtatttggcgcggcattcaccttcgaaaccatataccttgttcatatcgtccgtttcgtgatttccacggttcaggaagatgccgtttggccgcagccacttgtaggcgtacaagaggagggcaatctcagtagaccacgagccacgatccacaaagtcgccattgaacaagtacgcatgagtgtcggaagggaatccgttcagccggaagatttccagtaaatcgaagaattgacctacgatcgttgtcagtttcaaccaaatcacctcacctctttccacagcgggaacg

SEQ ID NO: 5398 - DNA, 4004 bp, Emericella nidulans
  unsure (1)..(4004): unsure at all n locations
gcaagctatgtattgaccgtatgttcatcgacccaacgtctggcaaccccaggaaattccttatcgatgtcgactctactcttcatagtctgcttgagagagaggattcggacaggaacatgcagatcaccatcgaggatgttggccctaaggtgcgtactggctttatgatagtcataggacaagcagtactgaccttgattctaggttttctccttagggacagctgcatcccatggttacaacaggttcgacgtgcgaggcacatatatgctgtcgaacctcctccaagaattaacaattgctaaagattatgggcgtaaacagattgtccttgatgaggaacgtctttccgagaatcctgtctctcggctttcccgacttatcaagaactctttctggaactctctaactagaagaattgacgggcgtaatatcgaggtggctggaagggatcccaaggattggactgacgatcctcggccgcgtatttatgttccacccggtgctcccgaacagttggagtactacaggagaaatcgcgaagagaagcctgaactgcgtcttgatgttcaggaatnggctgcngaaatcacaccgngatatgtgcgagacttgaatgagaagcccgggctgctcgcattggccatggaggagaaatacgatgaaaagaccgggaagaccgacttcgctggagttcccttcgtggtcccaggagggcgattcaacgagctttacgggtgggatagctacatggaatcgctggggcttctggctagcaacagggtcgaccttgccaaagccatggtgataaatttctgcttctgcattaagcattatggaaagattctcaacgccaaccggtcgtactatctgacacgatcccaaccacctttcctaactgatatggctttacgtgtgtacgaccgcatccagaatgaaccaggcgccatggatttccttcgccacgcaattctagcagccatcaaggagtactacagtgtttggatggctgagccgcgtctagaccctgtgtcgggcctgtcaagataccgctcaccgggtattggagtacctcctgagacggaggcctctcacttcctccatcttctcaccccgtatgccgagaaacatggtatggaattcaaagagtttgtccaggcctacaactacggcaaagtcaaggagccggaactggacgaatacttcatgcacgacagagctgttagagaatctggacacgacaccagttaccgtttggagagagtctgcggcaatcttgccactgttgacctgaactctctcttatacaagtatgaggtcgatattgcgcgagtaatacgcgtctacttcaaggacaagctcgagattccggtcgagttccgaacaccagccaccaaggatatccaaagcgaatcatcatctgtgtgggaccgccgggcgcgcagaagaaagatgaggatggacacctacctctgggatgaagaaaagggaatgtactttgattacgacacggtcaaacaagaacggaccaactatgagagcgccacgactctctgggcaatgtgggctgggcttgtcacgccacgccaggcttctgcaatgatcaccaaggcacttccccgcttcgaggagtttggtggaattgtctcgggcacctgaagagtctcgtggtgctgttggactaaaccgacctactcggcagtgggattacccatacggatgggcgccgcagcagatgctcgcgtggaccgggttcgcccgttacggatatcaggaagaggccgagcgacttgcatacaagtggctctacatgatcactaaggcgttcgttgacttcaacggcgtcgtcgtcgagaaatacgatgtgacccgacccattgaccctcaccgcgttgatgccgagtatggcaaccagggcgtcgacttcaagggcgcccctcgcgaagggtatgctcccactgtttccatatttgactgttgtatgctaactatcgccaactaggttcggttgggtcaatgcaagctacgtttacggcctggaaatgctcaacgcccatcagcgacgtgctcttggtgcggtcactccatgggagacgtacagcaaggctgtttctgcgcagggtagtgacaccgttcttgaaaacagatctgagtgattgagtgattgattgctttacctaatgtcacatttcgttcggcttttcggcccggtccatgtcataactgaagcactttggacacggccaggccttgttaccaaaataccatagaagtagctgttggtttcaagtttcgagaatatgatggttggtacacggatatgatgtagactcccaggaaatctgctgttggagtgtcgatagacggttctagagagaaatgaatatataaattactaggggcaagcagggacgctctgcgagctctcttagtcactttcggcatctgcatcgaatttcacctttaaatcaatcttcaattatatcccatatggaaaactctcatgaactaccacctgaattcatacctcgattcttttcgtcacgctgcagacttaaaactgatagactctttagccttgacgctttcgtccacgaggtaatcgttattgcatcctgaatccagcacgtggcctggacactacgcatattgaggcgatacagacctagtttccggtgccatggcagcaagtaccagagctatgccagataagttttttttcgtgagtcgaagttttttgcctaccacgctgatacgtctctaatcgcgtttcggtatacatggccagaagttaacctccgacgatattggaagaatgttaacgatctgctcgccaaacgcctcctttgctcttccgtgtttcagcatgttacagacgcagatatcctcgcaaactgcgctcttgccccctgaggcaggaatgcctgccaacacagcgaagcgcacttgcaaggtatgctgacttcccagccatgcctccagaggatacccccaatgtctacccggcagatccagattggaaactacaagccgaagcacgcaatcttgaacaccgccatacagcgagtctcgaattcggaacatcgccaatgggcataagcggcgttcctagctgcttgaggatccccataggactactcagcggacagagcgcagaactctacaatacgcgtcgagcgctgaagagcagcggaattgaagatacatgtttatggcattgtgactctgaactgcaacgacgctggatatcagaaagaacagaaagtgtgctggggtcagtaatattgagtcacaaagcgagtcgattaatgatagctgctctctaaggccaagacctcactgatatcttcttcccatgcaacggtgatgatggcgccacgagagtggatggaagtctaccggtatacagcggcgtgggtaacattcaaggtaacactcattgtatgtactcgaaccaacgacaatggagctggaagaagaaaccgcccgactcgtccacccaccccgacttgtctcaagcacaatcacctgctcagtcgcaagtattaagtcaaaaaggtacatcgaaataacacgggccaaagctccttaatttcccgaggctgttctcgtggagccgcgccagtcattcgttggaagctgatgattcgacggtatgggaattatagctcgtggcttggcctatgatatctgcagctgatacagcagctgatagcttcagggcagtctactacaccgtagtctgatagacgtcggagcttgtgccaatagctcaggttgtgccgaggttgaaagagattcgcgctgggattggctgattgaacaagacgggcatgtgtgagatacgatacctgagtctggtcatatgctggcagagattgataggaagtgagagcttgaaagagggatgacctgagatatattggaaaggtaggtgtccttcgacacttgatgagagctcgggttgtgtctctttgagccaaggtgtgtgttgttacttc

SEQ ID NO: 5399 - DNA, 8707 bp, Emericella nidulans
acagtttggtcttggttgccggtcttaatcctccacccaaaaagactgttagtccccccaagtataagctgccaatgtggctttgcatctgattaggtcattcataattatctccagctcatcagccacactaatgaccttgtcgccgcagtggctttctagctatgtctagccagccggccatttgaaattctctagattcccgcgctgaagttacaatggcaagtacgtcaattgttgctagtgtaagagtaaagtcgttcttggaaaggctatcttggctaatcaccttcatttcccatatactcggggtaggatgagcatcgcgcatacctcaccccaggttcaaagtgggaattcagattgcgtctgctcacgaatccattcttcctaaaggcaacgtcgagaggcaatgcacatttttcaacctgtcctgccaatattcagccattgctagaagtaatagaggattgcgtgtcgtgatcagctcttgattactcccaccaaaaaaaaatcacgaagtcgccgaagcgtacacattgccggttcaatatagctgctcataacttcaaccctcttgctaagaaacgcgcaaaatgaatcggcttatcctcagtgtttccgtgccgagagttatatcgcacgccggcgaccttgagcccatccccatcaaaaagtgtgatggtgtcaccaccccggatagaggcaattcaggatatcaaagccctcagtatccatagaggtaaaaacgcgtttctagaaagaacctgttctgcccctgatgagctgcggactttccatcctgacagaggtattctgtggtctatgaggtttgccaggataacagattgcctctgattctctgatgcaggagaattcaccgctgcctgcctgatagttactgaatttccaataaagttatcaagcaggacatccttccagatcacttgagatatggcgtggcccaagagaactgtcaaccagaggccactccttactatcaatgtccacctcactcgctcgtttgatacatctgcccgcatgaaatgaactatttcctattatcgagaaccttttgaggtttgtgaaaagctataaatcatctacatagattgtaggaaatgaagaccttgcagtcattcgttgtagacattgatccccagtatcgacactagtaacctattgaacttccactcagccaaaaggcctacgccgcttggaaagctaagttctgactaatctactggctgtcgtaaccacctcgatagccctaggtgagactttgaggatcaataaacgtgaaatgacactgattattgagaaagttatcaagttgctatagtgataatatcagaacacaaacagcaagtattaatgaaaccgcaatttttgcagaatcaggataaaacgagggtttcgaaaacaaaatggtttgaacaaacttcagatacttatccccacaggctgatacaaataatggctggcggttgtgggcttccttctcatccagtgttgtcaaaatgtcatcacccaatactaggactgatttcacacatgtcggaagcctgtcagatttattgaaaatagattgaaataaataatgtgatgtatctaatcacttttgttcaagctagctttcaatttggcggtatattttgaaatcaaacccagcattcaagagcaattacagccatgtagatataactttctttttagtacaagaagagtaattatttattatcttactaacagatattagaggggtgaaataataattacttgtagtatatatatcttctcccctttctagcaggagccctatgatctgttcagcttattgtatagtatacttattttcttttgctaatgtccaagaccatctctctactgcatagtagagcaaagtatagctgttatgctggaagaatcaaaaattgtcagctgtgacctggctataatatctataattgtaaggggatgatatgcttgttctaagctatatcctgccgtatatacaagaagggtttgttaaggaagagaaaggtgtgtccagtgtgcgtgggtagaaatagggatctctttaagcgagggcccgctagtacgaggcctcccattggccgagtcctgacaaaaagggttcttcgtacgaggaacccataacagtaggtcccatcccttcgagaggtaaatgctttccttgaagtattgcgtcgtccaaggtacgggtttggtgcatgttggaggcatcggggtgttgggctccatgtattgtacggacatgtctgtagagttagcggtcagtgccaagatacaacacttccaaattgaaaattccttcttcttatcctcaaccccttttgcttcttctaagtcctttcccagtatctccctctgcagtgaccaccctctgctcctgtctctaacctctattgtctctgtccaagccattatgttaacaagctctgccaataaccctgacccaaatacagataatactcttctttactgtctatataatctaataatacaaggtactgctgggcagttcctgaacaagtttactattcctgtatctggtttccaggatgcccagactggccattcgtacgctgtggtccgtctcactgctaagggtgaccgggctctgtttgacctgtgtcataacaacgtgcaaagagaggtatagcggttccctttgtacgagtttgttgtccgggttggtgctctcactgtcaagcaggtagcctttcccactagtctgttcggtctgactacctattagtggtctgggctgaaaactgtttaggtccgtactgctcggccctcatacgtcaacgccatcctgattgcttcacgtggtgtcaagactctggagccatgctccatgaatactcgttctgtctttggggagcatgtacgaatccctggctattggaatggtgcttgtgctggctgcaagtggaaagatggcggagctcgttgcgacttttatgctgatcgcgagcctaagtatgtgcctcttactgttgcagagcttccccgtgctccaattgaggaactggaggattaatcttgtcgtacgatctggttctgcgcgagcctgttctcttttcttgttctgtgggttctgggttgggatggtcttctttctgttgttcctgttgtaattcataggcttgtgcagcctctgtttcttcaagttcgtgggctggttcccatgtaggtttagcccatccagtccatttaaccagatattcccaacggcctcctcttcctatcttcttccaccgtttatctagtacggagtcaacataatattcttcttcgttatttaccaagataggtgggggttgggagtcatcctggacttgcgaggggagcttgtcattatctgccagtcgtacgaggtcaacatgaaatactgggtgtattcctggtggagtattcaactgtagggcatgtgtgcctatcaactttgtgactgtatattttgcattcttccagtctagtttcttgctgggtctttccgtacgaatattccgaaggttcagccatactttgtcacctggtttataggtaggtgctggggctcgcttcttgtttgcctggcgttcggcttcttgttgtgagtaagctagagatgctttggcccagtccatggcttctttgatcgtacgagcaatattttccccgatctggatggggctctgatcggcagattgctctggtaagtcctcagtaaggccaaatggtgagaggtcgtagccatgggttaggtaaaaaggggacaccccagtagcagagcttgtacgagcattgatagccagttctgcaatagggatgagcttgtcccaatctccctgatcatagcaaacgtacgagcgaaggtatgtctccactacagcatttgctcgctctgtagccccgtctgtctggggatggaaggcggttgatagcaatcgtttaatccctaacagctggcagatccgcttccatactccactaacacattgactgcccctatcagagaccattgtctgcggtattccgtggcgtcgtatcagggttcgtacgagggtccaagcaacctcttgagaagtcgttttggccatagattcaaggattactccttttgtcagtcggtcagtcaggactagaatcaccgtacagccattactatttggcaggtccgtaataaagtccagtgtgatatgttgccatggacgttctgggattggtaatggttttaggagtccctttttctgttccttccatgtttttgctcggccgcaggtgtcacagttccgtacaaatcggcgtatatctttggacatatttggccagaagtaggttcggctcaccaccaaataggtctgttctcgtccggggtgaccgattagggcggagtcgtgggctgtcttgatcaggcttgtacgcaagggttcgttgcgggggacccatcttcgtcctcggaataggagattgtcttgcgcgtcaatgctgcattctgacatggaaaccttgagcagtagccttggtgggagtttcctagccccctctcgtacgagcttccgtatttccatgtactcgtcatcacctgactgggcttctgcccaggtggggacccctccttggggtgcaataggtaagatggtggcttttggatagggaatgtctattgcttcccccctgtgtttttcttgtaataactgcatcgtacgtgactctaaccgatcatcatttccttttggagagtcttggtcacgtcgagagagagcgtcggcacgttcattctcagagcccttccggtagtagaatttgaagttaaatctgcttaagaagaggctccatcgtacgtgtcgttctgacagcttccttggtgaatagaagtattccagattcttatggtcagtaagaactttaaatttagatactgagcggaattcagcatcccaggcttccaggcaccgtacaacagccagtaactctttgtcatagatctcatagttactccctgcaggggagtggcgtttagagaagtaggcacaagggtggagattaccctccaagtcatactgtgatagtgtccccccagttgtatggccggacgagtctgtttccactatagtctctcgatctgggtcaaatggagcaaggacaggctctgtcatgaagcattcctttaatcgtacgaagctctgctggcactcttccgtccaacagaaccgggcatcctttttggtcagttcaattaggggtcgcgttagagatgaaaaatcaggtatgaattgacggtagaagtttgcaaacccgataaatcctcgtacgcctttgacggttgtaggtgcttcccattctttaatggccttgatcttctctgggtccattgacacaccttctccagctcgtacgataaaccctaggtacttggtttccttgcgttcaaactcgcacttgttgatgtctaggaacagccctgctttattaagcttgactaggacctttcgtacgtgctccctatggagttcacggcttccatcagtgaagaccaagatatcatcaacataggcagagcaaaactcgtccaagtattcacggagcgcccagttaatgtacttctggaaagtgctgggggcatttgccaggccaaatggtgtaacaagccattcaaaaaggccatatctcgtacgaaaagctgtcatccactcctggcctttggcaatccggattttgtggaaggcagctgaaacatccagtttggtaaaccacttagcccgtccgatctggttcagtgtctcgtggataaggggcagaggatatcgatctttcttggtaatagcatttaaggcgcggtagtcaacacagaatctcagacctccccctggtttccgtacaaataagaccggagcagcagcaggtgagctgcttactctattaaagttcttgtctaacagttcagttagttccttccttaatacgaccaactcctcccgagacatgttgtagaggggcccccaaggtatctcaggctcctttccattggttcgtacgagctcgatcttgtggtcaatgccctctccccgatggggtggcaacgattttgcgttgtcaggttcaaagaggttaaggaaatccatatattccggaggaagcttcatacgggggtctgttggtgttttggggttaagtgccttttcaatgtctcttagcgaggctgcaaatattgttgtctttgaaccagtttttgttgcctgtctctttatagcttgaaatgctgcggcagtaagactttgtaggcttaggggtttgggtgggtgtgtaatagtgttatataggcgtgtcttggtcgtacgtagatatagtcggtttcttttaggctctagcctgccatcatggcgcttgagccaggggttgccgaggataaggtcatatcctagtagatatggtaggacataaaggtatgacccctcttcactatgacctccaatatccagtcgtgctcgtacgatcctggttatgaccaggtctccaccaataccatccactgggagcggcttgataggaatggttggtatcttgttccattgtacaaattcttgactgatggctctataggcaagacagcctgtatctaccagcgtacaagccagcttgatatggttcacaatggcctctagtttaaaaggttgggagtgcatgtgagagcgtttaaagtctttccatagtcttagttgagtagctctacctgggtacccctgtccatgacttcgtacaggggttattcgttttccgactcctctggttcctcttccacgttgttaaccatttgtgtagcagccacagtcggacgagggcgtagaggaggcagaaggtctcggacgaggtggcctttacttccacaacggaggcatgttccctcctcacgtcgtctttggagctcagagttggagacaaactgagcgcgccgtccggtcattgtacgctgggtcctttgttggttgtcagtagctcggcgacgctgctggacagcagcaacagtgggctcccagtccatgggaccatcagtggtagctcgggcgggtggaggctgatagctgcggctcgtacgtgcccgggtcattcgcttcacgcgttgtaggtcatggttgactcgacgtaattgattgcaatacccgtcatacaagtcagcttgttctctcccgactatagcttgaaggagtggcaggctaatggccgtttccaggagggacttcttctagtcatcatgccaatccatgccacctacattcagtagggcttcgttgaaatcatccaggaactcgtccaggtccctgttgttctggcgcatggtataatccgtacgagagctcttcgttgtcggtctgcatccaagtatgctttttccattgcctccataaggccttcgtacgagattgttggtccgttggcttccatccatggcagcattcgtcggctagccttcccctccaggccactaaagatgtagtaggcttttgcggagctgtcagggtagcaattcccatcaattgtaaacttcgtacggaggtttatcttgaaggcaagatagtcgtgggcgttttctccattaaatgttctcacgtctgggtgcatcggacgggggcgcatggttatggtaggggcaggtattgcggcaggggcagctggctgagcccgtaactgttggagctctgcattctgttcaataagttgcgtacgcaactggtgtagttcttgccgtagtgtggcattaatgttctcttgtccttccatctcttacgtagtaggtcgccttactacttccaatccagtctgttccgttgagagtgaacaaaccctaatgtaaggggatgatatgcttgttctaagctatatcctgccgtatatacaagaagggtttgttaaggaagagaaaggtgtgtccagtgtgcgtgggtagaaatagggatctcgttaagcgagggcccgctagtacgaggcctcccattggccgagtcctgacaaaaagggttcttcgtacgaggaacccataacatacagtaggtgattacctggttaatacctgatattaactgctgcctaatttttcctcaccaactatttttcaataaatttcaactgcttatatctcaggtagtatatctttaatttaagcagtaatagaagaaatcaatttcttacaaaagctaggcaatctaattaattatattacgattatgaaagagtttgctattaactggttaatattgtttacgtgctactgcagggtatagatctaagggactgctaatataggcagcagcaagttttcagcacctaccataaaaggtaactaataagctatataaataaacttactgattaaggcctttttatatcttataaaatgctttgtaatcttgtaaaggaattgtataataaagcctggaatataacggcctgggtgccttataaagaaagtactattaaaataaccttatattgacctaaacaactgctattaatactgtgtaaaaacaagctaattctgcatataaatatactttatatattaagttattaagtcagaagctataggaatataagttacagctagaggatctctataatatagataagaaaggcttttaaattagaatgctggttaagagccttaggatctttttaagtacaggatgtgctatcatat

SEQ ID NO: 5400 - DNA, 4321 bp, Emericella nidulans
cgtacgtcacaacgtccgagaattggttccgcaccagcgcatgtagtcttcaaattccatacgggccggaaggaaggtgctcaggttggtgaaatggatcaggcgatccttttggtgaaggtagttgaggaaggtgaagctgctgcgggggtcgcggagcgtggcgagatctttgatgaaggagatttgcatcctggagccgggtaccagcatgccagaatgccaggcgaactgtttctggcgttccaggaaggccactttggctgccagccagaggttggagcgcacttgttcagacagggatcgagggcatcgtgcaaagcgatcgcaatcgccaacgacgctggaccgaatcctacacagatcaggtcgtgcagctcctcaggagacgttggttttaagcgctgagtccgttgttgcgcgagaggcatcttgcgataactctggaagtcaagctctgacttccgctggaggggctccattgatagaatctgtgcagaaacaaatagcaaagacaagaagctgggtatcagaacgtctgtcacagaaacagatcggagagagaatgaagcttgcggaaaggaaaaagatgagatcgtcggagaggtggaagggctggccgttttatggtcggggtggacatcgaggagcagggaaatcagataatcagacgggacccatctggtaacggaggttggacttttcgtaaattgtaatggctcgaaattgcaaaattcaaataatacaccaggaacgagcccgaagagtgggtttttgacagcacggcgggccgtgagctgttccacaacaatcagaggatatgacgaacgcactgccgaaacacgccatgctactgcaccgcactctagtctctgtggctggcagttatacgcagtcctctgtagttggctggacatcgtcttcaggcagacgaagccccgcagtcccagcaccgaaggaaagtgggatgatcatgattcccgaagtcggagctcatccgagactactttccagaatattattgtgatttctggattttctgttatcgagcatagtagcaactggaccgtccttgagcacagatggcatggtcaatgcgacagttggagactctgagcgtctgagcagctatcctcaatgctgcgcggtccactctgtaacattccatgcagctcaatctgcaagtaacggcggggtaatctgagcacgttggagctgcattctggtgcatgaacatccgctttatgtacacaagaggcagtcacacaggtgagctcatacaagggtcttccatcagcgtcctagtgggctcttcacgccacctaagagatgccttttttacttcgaaatctaccctcgatccagccttcgatcgagtccggctctttcatgctttcgtggcgttcagtcccacgctaagacagcatatggcgtgcaaatcctaaactatcttgagctgcaatgcgctttgcctgcttagttcagaagactccggcagattacagttgataggagcgccaggcaagcagtaccaatacgggcactcatggcttattttacagtatcagggtttctcgatccgatcgagagaccctccaacccaccacctaggtcacagatgcaatcagccggtgcccctgcagccgacatggatcagcatggggtagccatggccgtatgcatgggagagtggcttggatactagctcgtcccgctacgaatgatcgcaacctgcaaggacatagtttcctttaatgcagcgccgtcaccctaaaatagatggttaagcggctgagatacgcaaaattgcacagatcttgaagcgggcttgggggtaagatcgccccagtcgacctattcgaggggttcttttcggcgcttgtctcgcgtcggtgtctgtcagcgctatctctaggtcgtgagcatccgaccccatacttgatatcccacgcagactccacaacgggaaattctcttccacaacaagctcagcccccataaggcggcatgtctgtctctggatcggtgatttgaaatgtctgcatcatggttggcggacatacacgtgcaagggccaaagctccgtccaaagtgctaggggtggccatggccaagtcacccggttctggtctttttcaatacgcttactctggatagatatcagggcttccaggttgtcatcgagtcaggtgttctccagtctctggtgttgtccatgatggtgaaatctaccttttcctctaagtatgagctggtagataattatttgggcagtaccgaggtccaccattgacacctgcagcattatttcaagacactatctaggttttgccctggagcggtcatctgctggccactgccccgtgacttctctgcccttgcctctatcaggctgccgtggccgtagctcaatttagccgactggatgattcgattttatggcatccatggccaggggcaactcagagccgcgacgcgggctacagtgaccttcaaagggcgctctcacccttgtcgagcttcagagattctcgccagtatatgttttgtgaggactaggctattagctaacgacggggccctggtctcggataatgtcgctccgatgcctactctcaacctctgcgccaggcgcgaaacagcaggtcattcttctcccacaatcgatctttgggaggctctcagctagatctggcggtgattgcagagcatggaggtgctggactgtaaaggcttcagttgccctgttgggtcaacccacggtgaatgactgcgaaccaggcaatgcatgttaagacagcttaactctacgaacttgcttgttggcttatattatatcatgccaggttagattgacccgtgacacactgactcgtccttccgcgatctcaagtcctatcttaggaggtcgagaggaagccggccaaaagttctccaatgacaggggatttagaccgtacatttgagcagtataatatatactcgcgagttcaggaagattcagggttcaattgcgctccagctgccgctgcttgcttgcttgtagccgtctcataagcgcgagatgacggctaacctttacgagttagagtcctatgatctcgtttggagggccagagacaaccgacttacgcgctcctaatgtaaggttccggccaagtcaaaaggcccgttcgcgccgcgagcatcgaagaatctgggggctaaattcgaacagctttgagagttcattgtattttcctttgagaactactgtataattgcagggccatcctgctagacctaggtaagagtgaggtaaaggcaaatgctttttattggactaccaggtttgggatggatacttctgaccgacttttcagtaactatcattccgactccttgggatgttggacgacaagaggctcatgcacagcagggtgtcgagttagctgactattattgatgccttgggtgaccagcccactcatagtgataaagggtgaacttattggcagtggtggggtggaaaacaaggaagctgggggcagggatggactgaggctggactagagatatatgtcatgacctgtcatattcggctcgcggcgggccagtagagattagatatcggtcagcaaacctggggaaatccaagatgcggtgtgcacataaggttcctatgcatgcagaattcagagagaactagcgattttatacttaagttgtgctgagatattggcatggtggtgcaggcagtatggggcctggaatcttgacacaaccttgcgcaatcacagggttgggtttattgattgctcaaggtaaagatgggccatgactcaatatgttcccaaaggttagagctatgctgggttgggagtcgacgttgacaaaatgcggtctacaaaattgaacttagggttcgcagctatatatttctggagtccaccagtcgtcagggacaaccaatcttccccatcaacttcaccttcatctttacccgatcatagaacaagttgacgacatatttgccatcagcccattccttctgttcacttaccatgctgggctgccgatggatgttctacgtaaatgggaaacacggatacgtacagagctggggcgatggcaacgatccaaggggagtggaccgaccaacccacaaccatcagatccgcgacaaagaacataggttacgaccattgaggtaccacattgatgaagatcgcaaccgactttcaacttatgaagggatgtccatagctagccgcagccactgacgatgcggatgcagatgttcggatacgtcagaaggagggaccccaacgtcacacgtgga

SEQ ID NO: 5401 - DNA, 7146 bp, Emericella nidulans
aaacgagtgcatacctgttgtaggtcgcgggcagcgaggtagtcaagcgtcgaaagcttgaagcgttcctcttctttgttatcttcccatccataaggatggaggtgatacgtttgcgactccggcatggtgcggtggttatagaagcttgatgatatgcaaaattaagtgagtccatttgttgccagggtctgctctttatagtggcctacaaacgcaaggctgagtcagtattgccctagttgaagaaagccaagtccgcagtcagcgcacggtgttctgaatagattaattatttgatgtagacaaccattgggagaccgtgagccctgcaatagacgggaaaacacccacttgtagggctgtgccttttaccggctccatcgggtatcaaccaataagtttcaggaatgctgcatttcctatatctcactagcccagccgagacctttcctcgcgtaccaagcatgcctataggctataatacatggttatactcgacgcgtactagggagctaatggagaggttgcattatcagccgtcccgctctgtatgttcgccaggccccatcagctcacctgctgagtaatatgtgagagtcggaattctaaatttcttggctctttataagccaatctacgcttttcctttcctttcacttgttgcatcttctccaaagatccgagttacgaggcccgtggccgcgtcgcacttgcccatggtatccacatcgtcctcggtgtctgtaacaatgtgtgagactagcaataagcatagcatgcttccgcgctttcaggccctatgccttaacgtattacctaggtgagaaccgagatattgaaggaggtcgcctcctcccggtgagctcagccctgaaatgctcacatcacagtaatactcagacagctgagtaaacacacttatcgatgatttctataacccaaaatggtgaatggtgcctaaaggcggggttggagtgcagtgccggtagtggacgaggctgaggctggccgctcagtgacgatcgataaaagagaatctaggccgtcaaaatcactcccattttgctcacactcttatattaaaagtacgtaaaacactgcaacagccttaatctttttaagttacaattattttatcgccttgttttcgcggtatcccgacctgaaaacaatattgccatccgcgttcacaaggcagtcttcaaccactgcccgccatctagcaacactcacggtaattccaacaacggaggtattctcaagctactttggcatatcagcaaagctaatcacaatgttctaccagatattcaccggactttcgatggagctagataatctatttgatcaggcgcttcaggggctgctggattacgaagccaacaaagaccgcgagaattgcttagacaaaagcatccatattgcaagacaggtcacaaaagtgattaacgacaacgaattattctcttggttgttattgttggcctgttgtcttcgctataaagtccgaaataccttcgctgccgagccgttcgaagaagcagtttgagccgcaaaacctagctgttaccatagcaagcttaactactccgaagttgtttgaaaaaatcttgatgactatataaacgctctggagatactgatcgacctatataagtgctagtatgagcggcggggacaactcgatgaccttgatacgagcattgcatatatgccacttcgtattgatgagacagtcaagcgggatgttccaaggattctggactacattaatatgtctgtactcaagggagacagatatgatgtgtctggtctgaccgatcatgctatggctggggtagaattcgccacagaggccgagaggttggcatgtggacgaggggtcgcaaatgaggccgaggcagcagcagcaatgggggctgccttgctgaaactatgtcaaggaggtatacgaatggaaaaatatgatccgctcgataccgcaatcgcgaagatagaaagtgctattgaacggatgccggacgtgaacaaggatgtcatacaatggcaacacaaccttgcgaccctccttgaacttcgattcgagagacatcctcgcatgatggtccttgatcaggcaatacagctctctgaatctgttgtcgaagccggtgcggcgaatagaaaacagaaagctatacgggaaaatagcctagggaatctctttggacgcaagttcgaatggaccggagcatccgaataccttgataattctattgagagactcagagaggttaattctattgccggaatactcggattttgagagaactcgttatttgaataacctggcctttgcgcttgcccttatgtatgaaaggcagaaaaggctcgaagacctagaggaagctatcgaaaactcgaggaaagcatgtgaattaggaaaaagctctcctgatgaggccatttccctgaacaagctgagtaccaaccttcacaagttgtacggtcacacgaaggaaaaggattgtctcgaagatgctgttaaatatgggctccaagtatgggaactgataggccaggacccgaacagccctttccatcaggcctgcgcacacaatgtagcgctggtccttactcggcgttttaggcttctgggggcccagaaagttttcaatgatgctgttagcctgtacttgaaggctaatgagctaagatcccaggaggatctcgagaggacgacaacattgttcagtctaggagatctctactccattccgtcagttgaaacagactaataaagatgcctacgaatttccacaaggccgggttcatatccgattgagagctgctgtaaaagcgctcggaatactgcggctgagggaagattgggagcaagcgagggcaatcgggagcggtgccctcaaactactgcctgacctttgcgagcgatccctcacacttgacgaccaacagtacgcgattcttcaagctacaggtcttgcggcagacgtttgctcattgtaccttcagtgtggtcttgtgactgaggcccttcaaaagctagaatttggtcgtggcctgatactccggtacatgattgacaggcagggcgatgtgccggggctggagagagtctaccccgaccttgctgcggggtataaaacattacagcgccaagtagcccagcctgtagaccggaacctcagcagctcacgtcgctagcagcttgtgcgaatgcgactagaagctggagagaagctcaaagctgttgttaacgaaattcgccataagaaaggatttgaggcgttcctcctggaaccgaaagcagaggaactgactgattctgtagctgacggcgtagctgtcgtggtcaatgtgacctccatccgcgcagatgcaataattgtctcgagtaaccagatcaggtcagttcaacttccgaagctggagagggatatcaatctgtggtcgacgagccaggagtaccagaaatacagatccgcggttctcgatcatcctgtgggtcaacgtgatataatgcccgacttgattgcagaaaacaacgaaatgatgttagagtggctatgggattgctgtttggaaccaatactcaatgagctatcagtcagccctgatggctcatcccgtctctggtggattggtccggagacgccagcggccttccatttcacgctgctggccgtcgcgatgatcgttccggtgaaagcaccctgagaaaaacgatctcatcgtatacaccttctctcagggcacttgcgtactccagatcactctcactgaatcgttcccaattccagaaggatacggagaaggagtcagtcctgatcgtcgcgatgcccacgaccccagggcatcagcccttgagcggagtgatcgaagaatctaacattgtgagggctatttgtagagagacacaggtctgtgaattactcaatcatccaacggctgaccaggtgtgtcgcaaactcgcaacctctgatatcgttcacttcgactgccacgggtcagcaaacgaatcagacccatcgcagagctacttactcccacagaaggacggggtgctagacaagctcacggtctctagaatctcgaacgaagtctctcagcaacctgcctgggtcgcgtacctttccgcctgttccacagcccaagtcagggccacaaagctcgctgacgaaagcctgcatatcgcaagtgcttttcaaatgtccggtttcccccacgttattggttcgctgtggccaacagatgatgcagtctgcgtcaaggtcgcggagttcttctatacctacctatttgacaatagtgaaggtacgaaatctcatcgtgcagtggccaccgcgttgcgggatgcagtcttgaaggtccgatccgagatatcagagcatgccttaagaacgaaatcccttggtttgggcagcgtacatccatctaggtgcttagcttttctcttgagccatggatattcgagagataattgatgttccgggcagggctgtatgatagcactactgaatagcctaggccataattcttcattattaattggtgcgttcctaatcacaacattcatggccttctctccttgaattgatcctaactgacgtgtatgatagtgtttgctcaaggttctgggcctttgtaatatggggtactgccagggaaaatacttggagtgtgtatcatgtaatggtaattattatggtcatttctggaccagaaaaaaaccataacctccccttccccttgtcctccgattgacgtaacgtatggtcggaccccaaacactgcccctcagcttgattgtgcgcatatccagctgcgaccggcgcagaacatggccaatgagcgtccagttcagcaggtctgtattatggtagatgggaattccggggaagtactcgaatgtcgatgtgacaagaaagtagtctctcccagcacggacaatggggggtttccaggttgaaaccgggcgatatgcctcttccattaaatactctgccctacattgatgcagcaccgggtgggtcaaatatatattgtggacgctattgtgaggtggacgcacgcgggttttcaggtggacagaaattcggaattcatcaggtagcaatggacctatcaaaacgcggatgaggctattgaggatacaatgcataaatatctgtagtatattttattacagtcgccgcatcgcagtgatgaccagagaggtggcgctagcccttttatgctcgccggcacctatagtaaccttaagtgattacatttacatgcaaggcatacttgatcagcactttgaccagctaggcagtcgcttaaatacccctctctaccatcagaaacctcctcgttggcagacgatccataaatgcgcgatctaatccggcatacgacagatccttagtctcagggacctcgaaccagacccaaaccgccctgatagccgtcaaagctgcccacacaaagccgcttcggcgcctagatccgtctggtcactgttagttaggtagtgtgagagccactcacgtcggaagcgatggcagatgccatcaccggcttcgccgccccgacgagaaaaggcatggacgccagatttgcggtgtcgaaattcttcgcgcaatccgtagttggtcgaccactgtgcgcagggtgtctcgaacaagggtacgaatgcccagggctaggggtattggaaacgcttaatccttgcagtcagtgacgcgggctgccggggatgctatcgaacacgacaggacgacattcggtcgagcagctgaagccggattttacctagctcgacagtatcgtctggtatgccccggaaggaacgttagtcgtttctttacagggaagatttagctctttaataacttgtctataagatagccagtacatacatttcatagccaaataaaggtaacaattttatccaaatcctttttcaagagcattagacactggccagacagtcagtggtagcttacttgtttggcaagtatgtacctgtcattaggtaaaacaagttaagaagagatctctgaataggcaatcagtatcctcttttgtttacatgtacatctgattatctcaacttgggcagctagagctttgcctccttttacatatcttgattatggctttctggaggggtgctaggcctgggattagccatattagcgatatgtacaaccatgaattctagaaaggtagctatactcgaggttttgtctaacttcaaagctaggctaaatcgagagaatgctgctctggaggcctcaatgtttcagaggaatcacatcattggacgacccagtgaactaatagtcctaccggtgcataccacactacaggctaaaagtcgttgggtctgggcttggagccgctgtccgtcccgccagctattccaaattggctgttgctataccctgagtaagctgtaactacagcagccaatccgcagcaagaggacaaggtggcaatagtgaagcgagctcacaatgtctaattttcaaagtctgacgttcccgcatttgtttgctcatgctatatacaaacgctccggcccatcgtcgtgggtcgacattgacagacctcaacctaggaccatgtcgagaccatatccgtgagcgaggtgttctggctccgtaacattccttaagggaattcagatgggcggacccaaccctggtaggttaaagcagggatatgccgctaagcactctaggctgagagacagcctatgggactgcaaagacgttgcccgaacaagagttgccagctagtcatagcagccactccccgaattatggtctctcccttctctccgaataacccatcagtcagccgccgtttccaaatctccgctcgctcctgattccttgtccacgcccgctgctctattggactcaataatacccgccaggtgtagactgattcattgcgatactaaggacacaaaaagaggcacaagaaagagtcggtgggtccctccgctgcatccgcgcagctgagatcataccgcagctaatgtggacgctagaagcgggcatgcccttagcgccgtcctcttaactgctcgccgcgggcctaggcaataaggtgagccggtcaggtagctagcgaccacacttgcgcaca

SEQ ID NO: 5402 - DNA, 4028 bp, Emericella nidulans
ctaaggggatggatcctgattgcaagtggtctctctaaacaaactctgtttatgtgaatttcaaggctcgaggtgacagaattccgcctctatcactataaaagtccatctcgttgattgtccatccgcctaaaccacggccactcccatcatgtcctcttgtgatggggcctctcccaactgccactttacttgcccgcgaggaagcaagtggtatgcctgttcggatgagcctcatttcgtgggctgctgcacctctgctccctgcaacaatgccaccagttcaacgtgcccgcaatccgatattcggcctgcttcgtttgacggagctctattcgatcgcatccggcctaacaactgcatcaactctcgtccggactactggttcacttgcaactttacagaccctccgtttctgggatgctgtgcgattaatccctgtgccaacggcagctgtcccttggaggaattgatacctgcagcctggagtgccaacgatccagaccagtacgatctattttctgacaagaaacctaccactaattcgacggcccatttatcatctggggaaatcgccgggatcgcggttgggagcgtcgctgtcttcgttgttatccttgtggccctcttcctcctgataagatggcgccggcggcgcaagaagcttccttcatcaccacagccatcaaaggtttctggcgattggtacggaatgtactctttacggcctcaggggggtagcccaaaatagcaaatgaagggtcggggtgtcgaattctagtccacatgttcaatcaaaccaatgatgcgctgtcattacctatgtatgattgctctagcgcggggtccagaaaacacgctgtacgcatgcatggttagcatgaggctggctctcaggcgcagccttccaagcccccctttttcatgaatgcgccttatccataatcaaatcgtggttttgtttcgcaatctccttgaagtaggactaaccttttgcgcaataatgacatcctctactgaagacccagagcctactcaggagctgctggaagatgctcagggggggttagaagacgttgatgacggaaacttggtcatccaggatacttcctcgtcggcatcgacaatgtacgaggtcactagggaacaatcagtggcactgagaatcagcaactggtttattcttgaaattctcgctaccgttgtatctgccggtgccctaataactctagtttcggtgcttgccatatatgatggaaagccccaaccggactggtactacatgtcactcaactctttcatttcctggctatccaccatctcgaaagcctgcattctcttctacgtcagtgaggctttgggccagtccaaatgggtatggttcgcacagaaagtacagcctataagacatatccgcacctttgattcagcgagccgaggcccttatggggctcttgagttaatatggactctccgcgggaggtgtgtttccttttgcatggcaggatgggcacgcttttgctaattaccacggctttcaagacactttgctgtagtgggtagcctggcggttaccttggcactcgcatttgatccatttgcccagaaccaggttcagtactacgagggcaaagtgacagacacatcgaataacgctacgatttccagcacctcctactacggaaactacggcggtctgttccaggcggatggtaggtggctgcctgcctgatgattatctccacactaatataaactcgaactctcagccttctcggttgaatatgcgctcaaaacgaacgtatacaatgtcttcttcagcagggacacagaaacgccctggtcgatacctcggtacggatgctcatccaccaactgcacgtgggatctggtagtatccttggacgccagggctctgtgcgccaatatcaccgagcatctgacgcagtcgtgtaagtatacgtccgtggaaacagattcgcgtaccggagaagttctcaattgcactgcaagtctcccgaagagccatatcgacgcatgggctctgccttatgacccagagagcgatgtcgctcaagcagtaggctttgttgtgaaagccgcagactcttcgcaggctatcatatacacgaacgcaacaaccagtgcgatccagttcgtcgagcccctgatgacttatcatggctcgcccgtaggcctcaggtgggaggccacagagtgcacaatcgagcctgtcgtccgcagttttcgtgcgtccgtcaagaacaacaattacagcgaagaaacagttaagatttggccagatcgcaccttagtcaagatgaattacaccgatgatcccgattaccttgacacatatccagatttcgcctacactaacgacaccgactaccaatggcacttctacccaccctggcctggagaattggcacacctaaatccaccacacaataaagtcttcaactacaccctttcagctgagaaggccattgggaaattcctccgcaccatcctgacgggctactactggcaaaacacgaccggttatgggtatacgcccacagaacccgacgcagctctgtatgcatcccaggacgtccttcaagcgttccatcgcgaaggaagaaaatcgtgcagcgacgtatcctgtaatgttgagccaggcagatttaaccgcaccatgtcaaacattgcgcaggcaatctcgaagacctttcgggattcgcaggatactacttacgggcgatcggaggtgacagtcacccatatcgccgtgcgatggcagtggatttcacttcccatctttatttggctgttgggcactatagcgctctttggcacggtgtggaaaacccgacagaagagagcgcccaggtggaaaaatgacccactgccactcctgttcctgtatacagatgggcccaagcaggatgatggtttagacgggccaaaagaaaggcggatcactgatataaatacactaaaggtcaagttgcacggggccaggtcccacgaatagcttcgcaagcatggcccaaggctttaggtgagaaagggtctgaagattatgactatcttgcctcgctaaaatcaaccaaattcccccagacgtacgaagcctcgcttcgaataggttcgtctagtcgcaaaaactcaacctgctctgcaaatcctcagcccaaaagacggattgaaacatcattaaactatatagctctctataccctagtccctatcgaaccgcactgcctccctttcctccgtcctgtctgtcctgttgcatgtcctcccttccctggttcgactgattgatcgctaatcttctttcgtcaattatccttactatactgttgtgcatgcccgtacagggaaagaatgggggcagattgaagccttgtcgactaaacatacgtagcctacagaggaaccgatgccttccataggctctcttgatacaagacaatttcttttccgatccgaacgatgttggtcagttatccgaacaaaatagcaatagcattggtcgcaagactagacttgtcaagatcgtagtatcgctgttttcgaatacagtaacggtcgacgaccggcagggtcagggttatcgtgtgggagacagagaagcatatgttgatactaactgatacgaatatatcatgttgagcctcgtgtcacgtgccacgtgatctgtatggcatgatctctggcccctggcctgatccctcgaggagttgtacattgaagaagtgacaactatggtcatcaagatagagaatcaatcgtcatatggcatcctatccttagtaggctacgttcgtgtagttgatgcagcttccttctaccctttcccctttgagcattcataacactaactactaaatagaattgggcgatcgttatttgaacacgaggtcgtgagttccggcaccaatggaaggtaagcttggccttgctaaataacttaactcatttagtttcagtttaggctgatagcatcgcgtatttactggttaaccaaagtatggtgc

SEQ ID NO: 5403 - DNA, 3499 bp, Emericella nidulans
  unsure (1)..(3499): unsure at all n locations
agacagacgcggagaaggcaatgtacgtgctcgcacccgtttcaattttatacaccagcgacattatacagggggcggggagttaacattctctatcggcgggtgactcccactgttagccatcgagcactgcctgtttaggccctcgcatgaatgataacttaactgttaccggcgcgtcaacgaatggcaaatgacataaatgaaacgcctgttgcggactaaatatctacaattcgaccaccggcatggcggacggcgagaacaagggaaagatattccgatccaagaatatgcgatttcaaaagacgtacttcgttattgcggtggagccatgacttgaatcttcgtggttaacgtattcaacccttagctagccccaacatcattctggcctgaatcaagacagccatgtgcacacgatatcgctgactaaggatggtgagatacggaccctcttgccgcttttcttttactgctgtgaccccccagtatgaaaacacgcttagaagcagactgctttttcttcggaatagtatgatggacaggaaacgaatcagagtggtagcctaaacgttcctcatcttgctttacgataaacgagaaggtttatgtttacctctctagtacaattgatacctaaaacaccaacggatctatatattcctggcttacttcaaactaatatcatcaacatggcaacgcctatgctttgtttgtaataatgtgcataataataatctaacttgtgagccaagcagggtagacagtcaacagccataactctgccgccggcctttcctgaccagcgtatatcctgcttgcaatgacaatgccaacccacgctaatttacaaaatggagactgtcgaaccacttggagaatgcccgagctaacgcaatgcaaattcatgctttaaccaatccaccggaaaacgcccgtgtaatgctgatgtcgctgctataaatccgactcagtgaaaaaaaaaatccgtaaaccctcttgtatacatcaaagtagagagtattccagcgcggaggggtatctgtctggggaccaagagtagaacaaggtgatcaagagcaaaagcaaggaagggaacatatgatggaagtgaagaagtaggactgaatcacgccatatcttcttcatcctcttcatcgtcgtcaagggcttccattgcatctttgatgtactgcgccgcctaagtatcattagtaaagccccagttgaatcacaggtttaagtagggttaccttgggatcaaggtttaatgcagttgtgaagtgcttaatggcatttcccttgtcacgaagcatcttatacagtttgcccaggaggtaatgaacgtttgcctcatccggcgccatgtccttcagaaccttcagctccgtaagcgctgacttgagatcctgcaatttcatcaacgcacgggcttttcggaatcgagcaagaacagaatgaggcgcgagggtgcaggccctgttgtactggatcaacgctgacttcggattgttcatcttctctaagaccaagccaatgcagcatattaaaacagcattagaaggattaatcttggccgcattacggaagtgctgttcagcaaagtcaagtttgcccatcttatcgtagaccgttcccagcccgtaccaggcattataatgtcgactgtccgcgttgatgccgcttctataggcatccaatgccttgtcatattcctcgttggcaacatactcatggccctgtagcgtgaacccatacgcgaaatgaggatccaattgagtggcacgcttgaagcacttcagagcttgatcgtggtcccgctggtgtgagaacgagttaccgacagcacaccaagcttctggtgataagcgatcgacatccattaactcatgggccaggtaagcaagttcgacatcattcttcaaatgccaaagaaccgtcgagtagatctccatatcttctaaccgggaaggcgccatggccttcacccggacaaagtatttctcggcctctgtatacattgcttgctcgtagtaagctcgtccaatttgagcaagaacccacggtgtctcccgttggccctgggatagagagctgaaaatctggatagcatcggagcatttgtaccggctgagacagaaatagccggaggctatcttgaaaaacaagtccaaaatccaagccaaggcttcaaccgatttggtccgctcagatatagcgagcttagacgatgcgttctgagagccatttgatgttgaagatgttccacggtattctttgctgtctccgtcatggatctccccagcgtgtcgtcgattgttgccgctaacaacacggcccacatttgagcttgttgttgtgcgcgccttattccccgtagttctcacctttttcacctcccggccctctttcactcctaatgccgtgctaattttttgttcgtgatggcttatctggtaaagagacgtacacttcgccgttgcccgacaccttgtcggttgaatgcggtaccgacgaatgcgcaacttgtccagagaccgttcgtttccgatcgacctaacctgtgacccatgcccgcgtctctctcagtatgaccttcatctgactcgaatttggttcgggtcctcggtcgaataccggttggccgcatctttggcgggggatccatcggatgatcgccgcctattgtttggatcgttcgattcttctttgcaggggctagcggcggctcaaaaacatctgtgccattaccgttggttacacgtggatcatcagattcgctactttggccaccaggagtctccatgccttcccgcggaagatgcggtcctgttcctgaagatgccacactaactgtgcttccattcaacttttcccacaaagctgagctcccgtgagtagaggtcgaatcgctgcgagtcgtaccggcagtgaacgggtccaagctcggatttgggttaacttgtgtctggagtggaccgtccggaggtagaacctgggattcaacatcttcgagcgcagcagacgataccatgctgtacaattccgggctcatcttatatatgtttgaaacacgcaaatcaacaccttggcacattttagtttatgaaagagattttgcaatagtggcatgaaagcttaccagtttcgcacagattcaagaatgcatcccacatgaagggattcagttttaaagctgcagcgtaacactccacagccttgntgtgttccttgtgtgcctgcataattttccttgaaacataaaactgccgaacatcccggaagtgtgtcgcgcgtctactgtgttatctacccgggaaagcacatagatcagcttgcttgccatgcaganaccacgtcaacccaataaaaatggattgttctcagtgttgcgagccatgccctacttgtttagggtanaccgccgtatatccagtaaaaagctgccgtacaagaatcaaagcccccctacaaaggtgtgttcagtgttcccccc

SEQ ID NO: 5404 - DNA, 4653 bp, Emericella nidulans
caatcactatatgtaatgagaagtgaccaactatgaatactcactctgaacagtcggataggatttctgtaaagagggagaagtgacccatgaccacctgcggatgtgaaaccatctcgagtggtctgtgcagagtaccgctcaatcctaaggggtcgttggttagcgttgccggtctttctcacatctcacacacagtgtagaaatgggcgaggttagaaaaaaagtgaaactcacaatgccaactccccaataagtgtttcgtgccgaaatgcctcccttatatcaggcacgttactctttgcaacattgttccctgcgacaccagccaaggagcagtttgaaccaagccatctttcctttaacgagagttcaaaaccactctgctcaacagaatgcttcgcaagctcgcacatatcaactgcgctgaacttgtagatctgtgccgcaacagagtattcctcgatcaaaggctcctttgtgaacgcaaattgcagaggatcatctgttgacagtgaaacattcaggcctcttttgaagaagtgggcgaatggattcttgtcatatgtgaggaatagggcattattgctaagcggtgacatagcaatgccgatttggtcgagatagaacaaatattgcagtaaaggaacctttcggagtaaaataccatgactgatgctatggcagcaaaggaatccgactgcaagatggtcggggtctccggcttcgccacagtgtggtcttaggacaaacgtattgaagccacgctgttgccgccaaaaattaagtgaagccatattagcaaacatgaaataaatccaataagtgtatggaggattttgtttttgtgttccactccttagggatggggtatttcctatacagacggcgctccgccttgctctcatcgtcaacactgtcaaagccgaccacacgttgcatgaaaatatgcagcttggggtggctattcgcgtcttttcgtacctagatagtgtgtgaaggacgttcgtaattaccatgctcgaaattttccatcataccgctcgatttgtagacatcatataaccgggggatttggataagccaacgaacgttcggcgagaatagtttgttatccaccacccaagctgcaagtttgtcccattcttggagtgatctcccgtatatagaaatacgccattcgaccatttggtatttgcttgattccagatcggagatgacttccttagttatctctgcaagataacgaccttttatgtaattgtcggtttttagaaaaatctctcgtaaccgggattcccctactgggttgtatttgagattgaacttatcaaatcgatggaatgagtccgtgtgagcctgctcaattatcagtcaaagtgaatcatcaagaacatccatgggagacttacatgcatatcaagtgtgtcaatactcagatcataggcggtaaggttgatactttcaaaaacttctctaagcgtcaaatgtttaccatccctgaaaagaacaacctcgtctggggatttcttcatcttgctcttgatgaagcgaagtaagtgcttctgattcatgcatgctgagtgatgaacgtgagtgtcaactttccgcacattatagaaatccctatgtggcactttcttgctatccgcaatttcctggtactcattcaagagggagtagagctggaattttccttccaagtacgaaaggcgcttgaaagagaagctttttgccggcccatccgtcgagacgtcaatgaccgcgtcgagatccatatggaagtctctcagagatgggattttgacgacgggttcctctcggtcgacatcactagaatttttgtaaacttggtagacactgctctcatctagcttgaatacccagtcggactctccgggaagtggcatgcactcttccaaatggaagtcctcaccaatattttcgcccatttttcttcttctctgatccgtgccgggatcctcgttcattctggcagtctctttatcgtcaccccacgctggttctggtggaggcggatatattctccattctggacgatttatcggattgtcttcgagggtctgcagggatagttgaatatagtttgctctcaaacctaataaatcccgaattttgcggcatatggcattcagctctgaggtaacggtgtcaccgtcggagtttaggttcatcatgccacgggtggcacctaagaagtcactagcaggttgagcctcatcgggcgaagaatgcccatgatgaacagagactggaaagtgaacaggattcatgccagcaagttgttgagttattgttgaaatattggagtgattttgatagaagagcttggcttctgtatggctcatagacttttcgaaggcataatcgtatgtgggtgtctttaattgccggtctctagggagaacttctgccgactctccgggcaaagtaggctcgctaggctggctttcctccatgttgtcaatgcctgctcagtctgataaaggtgaagttgtctatagtgcacagctatgagattcgctttttggattttgtttcgtgaccaaagcgaagattccttagcaaggactcttcaaaaatagactcgaatataactcagtacactgtcaagatattccagagcagccctagatttgagctcagaataagactagagaatatagataagctcattagcttccaggaattacctagcctcagtagtagcaataaacttgttgcatggcgcgaaaaaccagcctagggtgctctgcttgctaacggcaagcactaaagtagctcgcgctgtcagtcacaagataattgtttggagtgaagagttgcgggtaactattcgcatttattacacaatgactaatgcctttggaaaagcgttgcggcactgggtttccccgaggtccggtcaactgaacagagctactgtctggactagtgtgacgtacttccaaactgattcagtaggcttctaccatatcgtcaacggctaggaacgcgcttcagcagcaaaacgtctaaccggacgcaaaggtctttatttcttactaaaacattaccagtgttctccccggcctacgggatttctctaaacagaagcggaacgtggagaacgaatcgtgaaaccacatcacctggctgcagtcgttgttcagctctgctcaacatccttaagccggtgcaaacggcggccgatactttctctgcgatatagttcgagcagattcagacacttgaaacgtgctccacgagtgtgtttttcactgaagaggatttagattgtcagcatggcatctctcaacctatcggccaatggaccttcgatatcgaagagttatcagtcagtggtcgattatgcaataacggattctgcaaagagttcttcaacattcgccaaatgggtattgttctctgtttcaacgcccctggtgagcgcttttcaacaggacgctagcaataaagaaagcgtactcaaagttcaggatacaggaggtatgacatcttgcgccaaaaaccaagattggcatgatatctaacctggctttctagagggagagttggctgatctcatcgatgaattctccgagggaaaaattcaattcgcttttgtcaaggtcatcgatactaacacaggcctgccgaaaagtgtcctcattgcatggtgtggggaaggtgtgcccgagcggacaaaaggatactttactagccacttgtccacggtgtcaaaattcttacatgttcgtctagattgatacttgcaggaagtgtcgcacattgcatgctgacgttttatttttagggataccacgttcagataacagctcgctcagaagccgacttgacagtggaaggtattattcaaaaagttggcgatgcatcaggtgcgaaatatacacaaggactcgaaaaaccgaacgcgtctgtcccaaaaccaccagtatccagcaagccggtctttactcctctccgaactggaggtatcaatgtgaacgcagccgccgccgctccactgccactaagagcgaagaaaaacgacgacgacggatggggccccgatgctcctcccgttactcgaaccaatctagagaaagtcgagccggcttataaaccgacccgggtcaacatacaggaactcaaatctgagaagcagaacgagccaaccgtgaatcccagtctcacaacaggccaccaacccgatggtgtcatcaagggcggatatcagcctatcggtaaagtggatattgctgctatcagaaggcaggcgcgcgaggctggcaacctaacggatgaccgaccagagcccgtcaaaggcgcataccaaccagtcggcaaggtcgatattgctgcgattcgtgcaagggctcaaaaacctgatgagactgacacaagttcgaagggaagttccgcccgacccgatgggtcttctggcccgtctacagacctggattccactgaatcaagccgcctgacatccctgcgtaagcctaaggtcaccaataagttcgctagtagcacatcgtttgccggcgcaaagccgccccttcccgccgtcaatgcgttgagtgccacgcctgtgcctcctatagggagagctagtggagcaaatgccgaccaaggatgtgagacacctgcgcg

SEQ ID NO: 5405 - DNA, 5153 bp, Emericella nidulans
ctggttctggtgggaaagtggcatgaagaagcggtaggcattgagtggttgcgcatcgcaaaataatggcttcgttcgagctggtccaaataggagctgtcgagttcattccaaaatcgttggactctaggcattagaacaaagagagcacgtgatttaaggccgtttagctccttgtttagccttctaagaacaaaatctttctgatttcaccgttgatacctggacaatgccgctctgtttcaaaaatgtagctgactccattgggcctctagcggctccgtctcagggtctgacttgcgctcgtactcgaacgatctcggagatttgatgttctcgcagtcatcttgaccatcctgtccgaatctgacaggtcgcctccaagcgggggtctacccgaccggttgacctttccgtttggagcagttcggcgacgattcggctctttctgccaatcatacacgcctgattgagggtgccaaacggctaacaaaactaggtaccttgtgatagtaggctatggttgtgaaggtccacaacttgttataaaagggccatgatcacatctcaggcatcctttcagaaccagtaaagagtgtcacattacaatcaatatgtatctacgagccgtccacgcagaagcccagatatccatactccagcaactaatccgggacaacctctgggaattctcacaaccgctatcaaatcacctttatatccccttatccaatcgagccatattccatttgtgctggatgctccagagacatccgatggcagcctctcaaatgctgtactacgcggccacatggcaaaacaaaacccccaggcaaaagcactcattgaagccttgaccgcgcaacaagagcaaggcaacacaagcctcgaactgtcagacgaggtcctggtgctctttaacggaccacaccatcattatgtgactccgaagttctataccgaaaccaagcccgctactggaaaggtcgttcccacctggaactatgcccgtgcgcaggcatacggcaagatccgtatctactgcgactccaaatctgaagagacgatgaccttcttgcaaaagcaaatcgaggaactgtcacatcagtctgaaacgtcgatcatgaaatattcttctccatggcaggtgtctgatgcacctgtttcctatgttgagctcctgaagaagaacatcatcgggattgagattaccattgatcgcttacaggggaaattcaagatgagtcaagagatgggtcagggcgaccgagacggtgttattagtgggtttgagaatttagggacggatgctggaaaatgcatagccaatatagtaagggagaggggtgaaatgaaagataagaagtgaccagtaaaaagactattttctgtgccactatgcgaatacatataaaagttagcacatatcggaaaataaaacttgcggcacagtagcagatttcatagaatacgcgaggaggcatcgatattaagtatgcaattgtcgatacagcaccctctacaagctatatacgctaaccgcaatggggctccacccatcggaccacggccgtgtccccgcccagccgatttgacatcattagggattttaccatactaacaactggtatacactttatacaccatacaactgagtactaaccttcaggatggcctcaaatacgaatccgtcgccgaaaccaaagatcgacctttcacaaaagctgtcagaactccgagcagctagagcaaaaacgcaatcccctagagaaccagctcccgtcacccctccgctctcaaaaccgccagatttgtcctcccacagctactcgcggcctgtccgccgaatcctttccaaaaatgaccatgaaacattcctctcctcgtctacttatacactcgttctcgccttcattttcggcctctccgattcagttcgaggtcgcgcagcaccagatgcaaacgcagaacccggctactcgccaaagatttcgaaaatcctctcagtggtagacaacatccgcacgcttgttgagagccacccatctattgatcagggtggctctcggtttggcaaccctgccttccgcgatttgttcgacgacgtcgccgcccaaagcccagcatggctcagagacatcctagggattgaggacgcagccgctgttaacgagatatccacatacctgattcactcgctagggtcgcgtgacagactagactatggatctggacatgaactgaacttcatgatgtggctgctatgtctgcggcagctaggtctcttctcagagccggattttgaggcgatcgttttccacgtttatgtgcggtacatgcggcttatgcgggaggtgcaatcgacgtattaccttgagcctgctggttcgcatggtgtctggggcctagatgattaccacttcttgccgtttttgttcggtgccgctcagcttgttgggcacccgtatatcacaccgttggcgattcataatactgctatactcgacgaggaaggagaccgatatctgtaccttgatcaagtccggtgggtggatagtgttaagacagtgaaagggctacggtggcacagtcccatgctggacgatatttccggcgcaaagaactggactaagattgaaagcggaatgaaaaagatgtttgtcaaggaggtattggggaaactccccattatgcagcactttttgtttggaagcttgctgcccgctgaaccgggaatgggtgaaggtgaagccgaagaggagggtgagcatacgcatgcacatggacatagccatgtgcacgaccacagtcagcaactagactggtttggcgattgctgtggcatcaaggtgccgagcactgtagctgcaggacaagaaatgcggaaacgaatgggtggtggttcgagcctgcgtccgattcccttcgattagtgactactatgtgcagtcatcgtggaataaaatgatctgatgagtaatggaaatatatgcagatgattagaatgctaaatgaaacaaaaggttaatagtctaatgtattgtttcgccatgattgccaaacattaccagtgccagacccagaccgagaatgacaggctgagatatgattaggctaaagcccgtagactatgtgcctggggtgaaatagctgcattgccttctgtaggccttcatgaataataccgaagtgattatacgatgtaccaagaaaatacttcaacggagcttatacatcgatcggtgattcattatacaaacaggctttagcggactcatatctcctctagagacaacgccttaatctacccaccttgaacaaatatatcctaacagcatttgaaccaaagttatgccaaatgtaataattcaaatacggtagcatggatgtcagaaatctgccttaatccctgtactccaaatagcctacactgtagagtcaggtcacatgacccgccttttacttaaagcggcaccggcgccacacccattccgtccgcattgcagtggacttgcgccaacctcgggcttaattattctatacccaaaccgatcacggacctgaaggcgtcacgtcatcatggacgaatactcagctggtggaggcgggaagctcaaactcaagggcgctaaagtgagcgatggccgggtgaagaagaagaagagcaagaagagctcttcggctggcacaggtgccactactggtgttggtgaaaaggtggaggagaaaaggagcgaggatgccgctgctgaggagcgcgcaagatcggtatccggtggtgcagagggggaggatgaatcccattctacagggacatcgacaccaacgcagcctgcgaagacagaggctgagaggaaacatgaggaactgaggaggaaacgggtatgttgcattgcatccattgcgcacattgttcccagattaccgatactcgaatatttttttcctttcgctctcgcatatatcgatcttcctcggtatgagccagaagtacttttgctctgtctcatcatctcttctcttctgatgtgtttgctttttggctgggctgtaatagacctgctttatcctaccttacttacccctgggctgtttctcaacaatcgatttctagtaatggctacacacatgctgatactgatggacgtgtgtagatacaagagcgtctaaagcgcgagggcgtcaagacccataaggagcgagtcgaggagctgaataagtaccttagcaggttgagtgagcatcacgatatgtacgttttcagacttgccagcttctcttccttggcttttaatacaatgatggatgctaactatcgtgcaggccgaagattggccctggttaagggcgtggggagaccgggggtttacggttgttgaaccaggtttacgggtgctaatttgtacggagcacgacttctggaccgacattccggttcagcttgtctgtacgtatcccgttggggatgggaagttggctcaatagtttgcccagtgggctggagcattcggcctgattgagctttcgcgtgctgggatggagctggctacgttctgcaagcttactggctgaaggagggataatgctggctacgccctcggcggcgcttcagttgctcttgacttacaaggaacatttacgaaaggatagaaagatgataggctgagagtatgcagtttatgtacctattacccgctggctatgtgacacgccaatggacacgaagatagtccgtaattgagatcaagaattctaccccaatccattaggagtcttgccatcaggcagacatcgactatccaggatgtcaataaaccaccagatcccagaaacccagttatgccgagaaataaccaaaaatcaactcaactccactggtctaacgccgcgcataagatgcggaaagtaagaagtagaaagtaaatgccccaacccagaactgaagatgctcaaagacgagatggaaaaagcaggaaacataagatattggctgcaacgttatgtagcggtgaaggtagtcacagcccaagtgactgggaaggccaaggcgagtcatgaaatccgagccgtgcctctgctatacacccttgatgacctgagttcgctcactgtatgagtgatcggcatatccagcatgggattatttcttgcag

SEQ ID NO: 5406 - DNA, 6972 bp, Emericella nidulans
agcgtccatcgcttggtgtaaatttcctacccagacgggtccacgtcggcacagtccgctaggcggcctgtcttttcccagctatgcccagctgcccacgcactgcggcggtcggagtttacagccctattattaaccataacaccaaccggccgagtgagcccagaacgcgatcatgaccgtctcggccaagtccaaactcagtgaacggcgttcggatggtaagttggagacatcccaaggcacgaggcgccttggaatccacggacggcggagtccattggactggacgatccagtcgcgaatacgaaggccgccaacgtataatacggtaagtatagcaaaaacaaaaagtataaaaaagtataaaatagagataaagataaagacgccagagccaagacgagacaagacattggagtcaccgagcgaggcacgtggatgccaatccgtatccggcatcctgctttggagcaccattatatttattaattcctgagacgggggccaaaactctgccaagctagtataattctccgaccgcgtaagggccgcagagacactgacaggctcggctgcacttgtcgccttgacctcgccacggtgatcctgatcctggatattagagtggaccgacgatacgaagaggcgtttcagcccagggctcggctggggcagctgctctgagaggcttggaggcccgacgacggatcgggcggagaacggaggatttatgcgagatagattgtgggtgggcttggtgggtaagcaggaactggttactcctaatttgggaagatggatcggacgggcctgagacgaacagggtggacaaggtggaaagtgtggacaggtggacagcgtggacgattaggtaaatattcgtcttacacgttccgtcgtatccggcgcagtctgataaaccatgaataatgacctaataacaataaatgaaaagggaaccaagaaaaccaagaatttagcgagggcggtcgctgtggagcccgcgggggatgccaagttgccaaccttactggcgttaagcatatctgaattgggtactccgtatgggtatgattatgaggtattttttagcaggcgaaggcggccaggctggcgggctggcaggctggcaggggaaaaagaaagaatcacaccttaaaccaattatgctagtggagataagcctgtgaaacgttccacagcgtcctgatctctgcctagtcaggtagtcagaggtcagagtagtcagagtaatcagagtagattactacgacggacggagaacgcagctagagtaatgattaggagagactaggtgagactagagtagtattggtggaaacgcgcgatgatgtgattcatcaggcgatctgtcttttttggggcctgtaatccgtacttatgatacgcctctggtagactagttaggtccagtgccaagcagccaagaagagccagctaaattgggccgactctgttggcgatacgcttatcctggcgtctggtcgcacgatgctaccgagtcagtcaaggccttttgaagattattgacgcttattgacgcggtgtgaccaagtcttcacccagctacgtaacatgatgaaagctgcgagctccaccgatagctgcagcctggaggtactacgtctggaaagaatcatgaggggcagctgactgatccttcaggctttttctagcgagccgttgattggaccgacaagctttgactcagctggaacgaccagcttgcaagaatccgggtgcctggctggctcgtttattttgcctacgatgggcccccgttgccagctcgagtttccccgcaaggaagctatggacataagtcctggggaggctattcctttacgcaagtcattaggtaccctgagactgataaagctctagcttcaggcgacactctcggttccttcgacgtccatctcaaagtaatgggccgctggtatccctcgctctttcccaacattctccctacctcgcatcactgttagctcccctcccttgctggtcagccgcgtggcaggcccccaggttcatctccaccgcgatggtccaacagttgatgcgcgcatcgctgtagagttaaagcggcgcgcgagcatgctcgagcaatacattctctcgtgggagcagtctcccgaattcaaaccaaacgatcccacgacgatcacaaacggtctggatactgccattgatcagaacctgacagcaacccattttatgatcaaagcaatgcaccaggcgctaatcctgttctactaccgtcgcgttgccaacatcagcgctttgatcctgcaagatactgttcgcaactgccttaacttcctgaaccgctatgacaaagcccgcgttgaggaaagccggaatgagccgtgttatacccctaacacagcattcctctggcctggcttcgttgcagcttgcgaagcactagaacctgatatgcagagcggtctgctagaatggcttgttgtgacaggccataggacctccttaggcccttttttctgtagctgcggggactgcgcagtgcgtttggaagagacgatcagagaccaaggactacacgctgagttggtttgacgttatgaagcatgaacgatgtccgattatcgcgattttgacgacttgacgaccggacttcaacgtatacggactatctgacaccatagtactatagacgaatatctatattttagactgagatccagtccgggaactttcctctaaaacagctctagggatttcctcctctaagctgggccctgctggcttccagcctagcagctcgcgcgcccgagatgctgtatactgggcgttcgatccccaaagaacggctccgtgtgcagtcaatttatctgcggtctccgcgtcgattttctgcacatctgggctttaatgaagcccttctggaaagtaaacgcggctactttcctcgagatctctccgaacggctacaagacaatattagcaaagggcgataacgcaacaggaaagatagaaacgcgaaccatcttcccattctccgcaaaataaatgctattttcattccataacagagaactctcgccccgacggacctccgcctcctggaccagcctcacaatcaactgcgacagatccgcaatatggatattactccaacagctcagaccctttccaacctgaacttcatgaccaagctggagagtcgcttttgccaggtccggtagctggatgctgcgctgattgacaggtccacgacctatgccatagatcaagggtgcgtagacgattgctgttcggacattagcctgtttggagaggcttagaagcaggtggtcaacggcccgcttgggtgatgaagatatgatacttcatatctcgcttatgccctgtaggtcgttgtggttgtggttttgggggcgcgcttggccgtaggagctcgttgcgatttttgggccggagatgaagcttgcgcccgagatctgtatccagactgcgaagcagaaatatcagaatttagcaatcagacaagacatccagtctataagatggagtcagtttaatttactattcgaatatctatgtcagggagaccaaacaaattgcttagggaactaggagaacgaaagatcctaagtttatatcgcggctggctgatggcctgccagcagttaggcagcaggcgtaatcatctatagctgattatcatggttgatacttaatggtttaggggaccgccgtcactattttatatattaaactagaaagtcttttacaactagctgtcaagtacttgaaattacttaatataaaacttgtcaaggcctgcgcgctgtgatcatgagctagtatagaatacagagcttatcccaggcacggagctcaggataagctagctatattgcgtggtttatccagctttatgtatatactggcgtacgggatgaatgggctcctgccatatctaattacctacctaataaaattaggctttgctttgtgaagacatcttataaatactctcttatacataattctctactccatgcttaggattctatctaattatagccgccagaatgattgttttagatgttctagttggctcgcctctcaactagaggaaccttcggctaaccttcatcatcccactcatgctttgctactaatgactagaaggaaagggcttgcattgttacagaacgaattgcttgaagatctcttgatacaaggtgaccagatgccgccgcttttgtgggggcaacaggtgacaggtgacttagcacggagtgatacagaccactcactgagtgctcagtgcgcacgcacgcacgtttactggtactgactgcttgcgttgctccggaaatctctgaaatcactcgagtggacaatccttgctggtagaagcctggccctcccggtagagtcccggtagagtgcaggtagtggggttatacggtagacagggaggattgctgagcccccgttagtatcacttttgttgttttgttggtagtgccgaggcctaatcacaccctgcgggtcgagaacgacgtgcagtccagggatgacatgcttagcgagaaaattgggagatggtgatgcatcgaagtcttgagactgccgctgtttagggccagggggtgggggggcccggacattcactgcaggggaggatacaaatcccgccctaaaaataagagagcagacctggactaacctgcaaaatgctaaggcgagcaataggtaagttagtgactcccgtccgtgtctggtgggccctaatctaaacctgcactagtctcagtcattgcctgatggcgataggtacccagggtttcccacaggaatcagtagattaatagtcatgtacccttccacccactctccactactcgttgaaagcctgctcccagtcgagatgcctctgcctctgccactaagcgccgtagccaaacgggctcccgctcagctcacgcacatcctcaagctgcgcgcctcacgaatcttcctgtccagcctactgctctggctcctgctctacgcctactgccggacgagattctggcgcgacccacactccgccttctttcaggaagcccacgtctacgatctggactacagcttgtaccgcgagcgcgaaggcacgcatttcctcgcgcggcacaatgcacctaccacccggcctggggaggagtttcattaccactacacgaaaaacaatagcgagggcgggagcgagaccccggccgtgtgcgtcgccatagtcacggtgcgtcgcgaacaggacacgtacttcgacgcatcagtcggctcgctcttggaggggctgaccgagcacgagcgcaagccgctgcatctcagcgttctgtttgccgacatagacccggcggtgcatcccagctgggggcagaaatgggtcgagaggcttgttgaccaggtgggcgggtataatgtgtctgcagagcagctggaggatctgcgcaagtgggaagcggagaggaatttctataggaaaggggtcttgtaagtcagtcccgtcccttctgcaaggcgatggaacaaggtggaactcgatggttagaactaatgcccagcgtacggtatgtgaagtgactacatctacgcactgcggacctgccagggcgtcaacgcgccttacacgctcatcttcgaggacgacatcatcctggccacggggtggttcgcgcggacactcaagagcctggcggagatcagcagacgtgaagctggagccaaccagggccatagccatgccgcgaagaaccagaagccatggctgtacctgcggctcttttacacggagaccgcgctgggctggagcagcgctgacttcgcatacgaacacatgccgctgatcttcctcacgctcacggcattatcattcacagctctctatttcctccagccgtctcgccgcttccagcccttgcacctcgacacgcccagcattctcgtcatttctctcctctgcattcccgcattcacagcgctggcgtacatggtggggaaatacaacgctcatgccgctccgcggcgtggtgcagatgaacaagttcgggtgctgcacccagggcctgttattcccggcgcagcaggtggataggctgataggcttcttggaagacagggggcatgggcagacagactcgctgattgaggagtatgcggacctgaatgggctgaacaggtatgcggttgcgctaccgctgctgcagcatgtgggcctgaagtccagcagggacaatacggatgtcaatacacaaagtacatgggcgttttggtttgaaacgaataagccagaggccttgaggagggagcatgcggagttgttgggcgatgctgatgtgcagcaaatgttggagttaccgtgccctagactaccatagacggctgactacctgaaggtttgatttgctgaagtataagcagaacctcctatcccatagatccagttcgccgtacagaatctggatcaatcaactactgcatttgaagtcgataacgcccgccctggcgttcattagaagcgcgacaattagtccatacaagcctaccatgccaggtgcattagctattaatccgttcctcagagaaaaagagaccagagttacatacccaagacctcagcaaagatcagaacaaggatcatgcccacgtaaagtcttggctgctgcgcggtccccctcacgcctgcatcgccgacgatcccaattgcaaacctgacattaatcagccaacagccaacagctaactggaaaaggacggctcagctggctttccttacccagcagccagcccgcaaagcccaaccgccaggccggcgcccagctgaagcagactcgtgtacagagcgaccgtctgcgcgaggttgttggcaatcagcaccgagaccaccaggccgtagatgcctaggatgccagccataacaatggtcacgat

SEQ ID NO: 5407 - DNA, 1701 bp, Emericella nidulans
gagaaaccacgcctgcatatccgagcacaccaagcttacccttttggctgcattttaccaatccgcccaatgcctgctctgcgctgcggaccaggtcagtgagcgcagctcggctcttacttgactcggcatccagcgtaatctgagcgaccgcaaaactctcctccgcccacttctgcagcggctccgggtcaaggctctgattgtctgcctggcattgcgtgtgcgcggcaccctgacgaggagtaaacctgggccgcggcgcatcgcgatagtgggggttggaggagcacccccggggctacttcgacagtgggagcgtttgggagaggtgttgatcctgatgtcatggtagaggtgtgtttggtactgtttggcgggttcgtcttgaggatgtaggaacggatccaaagatataaaggacaacaatattctttcacggctcggatcacggcgcctgaacgtctccaattgctcggctttctggtccatgagagtaagcttatcaatgcgggcgggatattgatgcctcaggcggtacttatgggacgggtcatgtgacagctaccgataggtgcaagaccgcttacagcttggagctgttcgtcttcacctaccacgaatcgcgaggctttttacgatttatgccaatataccttgtaagcaacccaagcccatatcttaacattgaatgcctgcaaataccttgaaaagactttcccatcaccgtcgacccgccagtcgcgaaaatgaacgccgagttccaaaccgcgttgtctacctttgaaagcagactcaattcactcgtcacaagcctcacaacctccccgactgcctcaggcgcaccaaaagcagcacaggaactgcttaacgctgacgactccctcacctctacgatcgacacccttaaacagcatcagagcaattacgcgcgcatcctacaactgcgcgcggaggcgcagagtttagaagacaaggtcaaggatatcgttcggctcgtcgtgcgttacgaaaaggacatacgcgaagcatgcggcgatagcgactccgacagcgacaccgactatgactcagaggagtcggaccacgatatgaacgcaccgcacacgacgcaaacacggacctcccgaaagcgcaacgaagtggattacaggcttcttctggacttcgcccgtcggataagcaagtataaccacgaggcagctgccgacgctgcggcagggatggcaaaggggaaccacgtgctggcagggcgggacaccgagatgacaggcgtgaacacgaacgggaaccaggaggggagtccggcagaaccggttgctgctgtgacaaaagaagcgacatcatggctggacgagtcggcgaacatgacacggcaggtctacatgctcccgtacccaatggaagatcggatacgcatgggactcatggggcagatacagctggcggcggcagaggggcggcctgggttcgacccggacaaagaggttgatcggctgatcagggaagcggagggtgtcggcattgctgatgctgtcgcgccgcctccgattggggacgagtcgtcaaggctgaatgaggctgcaatggcggctgcgcatgctcggtctccgtcgagtggcggtcgcctggaaccggcacacccgaaacccaaggcgccattggatctgcacttgatgacttcgatgcaaactagcactc

SEQ ID NO: 5408 - DNA, 6501 bp, Emericella nidulans
gcttcccggctttgagagttccaatactaatctgatcatagtcatccatgtccatcctatgtcgaagcatcgcttttaatgaaggtagagggcccacagtttagaatctgcttcccatcccagacatgtcttccccaagcgatgataatgggtataaggatgcgggcgtgctgaaagttgtcgttcttcataaatgctagagcaatatcctgggctcgctgtggattgccttcagcagtgaagagctgtaccccaagcttccagtaggcttctaggtcttctttctgctgactgagcccatcctggtgcatctcccactggtcgagtgcttctctggtcttacccagttgctgtagagaacttatatatgaaagcacatgcgccgtaggaagagatcgaccggctaataaggcgtcttcagcaaggacttgtatacgagctgcgtgttgccctactgaggtctgggaagaccagagcagcgtcatagcctcctcgggtatcgcactgacaaaatgtggaatgatctgtttgcatcctcggtaccaattccaaaggtcttgccttgctttctcgctggatttatcggcagcaaaccgcttcaaagcacgattgaatctgtcaatgtagtcgctgtgctctgagtccccgaatgccatttcgtatggttgtcgtataacttcctgcaaactgtcgtcttttttcttcatccaattctcttcctccaaggctaggccctcaaattcttctttaagcaggttatcaagctcttcgtcaaagacgtcatcgaaggtgataggttcatctttgccatctctggcctcctgttttcgcagagcttccagtgcaatagccctctcatcttctggtaggctctgtatgaagctgctgttaggcccaaacgggtcctccttcagagactctagttcatgatccagctgcgaaagttcgcgcgccacttcttccttctccgcaatatcttccgcttccggatctatcctcctcctcttcgtgcttcggcgggtatcttgttcgtagaattttatcttgtcattgggcccaccgtaatcgattaatcgcggcgctgcagcagtgaatgctcgagtaaaggaacgaggcgaagccgccgaactgctcgagcgggccacatgttgataccaccgagctcctcgaatcaccgggcggagcatgaagtgagaggaattatatcatcggtctcgggaactgatcgtaaacaaagcggccaatttttggacgaataaggcgaaagagcaagaagttgatcgagggagaaattcatcctagactccgcggaactggaaagctctcgatctggtttagcttgttcggggatctgccgcgaattccaggcaccccaatacctagcctctgttttaaacgccgtgcgatcctcgttaacgattcctgaggaagagacaccagcatggaatctatggaaacagaagctggtactccgtctgagacttattcaggctctcaggtatgccgtcacagagtctccaaattagcctgtgaaacctttactaacaattcgaagggcgtctatatctacagaccagcagatgcaggaaaagcacacggtgaacggcctcttaaaaagcgaaaggttacgcaagaacccaagccagcaagtgaagatacgtctccgtttgtaccgctgttggatggagatgaaagcgagcaatcaatcaagttaaggtatcagacctatgagcaattatggtccgtacaagaagcgaagatccaggctagtacatacacttgttggctacaagtcgctctggggctaacgacttctagggcatcttggatgaggtagatgcagaagtgctcgagaatgtttcaactttcgtgaaaacagtgacgccggacatgtaagacaacccagaaatggagcagacgatgcaaatctaacggcgcataggtacggtggttgtatccccgcggctcttgttaccgttggatcgaatgtttcttccctaaccagactgctttctcgactaaacgatcaattaacctccgctggagaagggggagttatagttctggaatccggcgatgcgcccaacctaaagacgacattgaagaacattatacgtgctgctataacaaatactgaaacaaatgatggctaccagagctttttggctgaccggcaggtaagcttgctttgttcgctatcaccagtcaaaacgctgaggggaatagggtccaaggcttcttggttacgaccttgacctactaggtgattacgtgaccaggaaaaacgtcaagcatcttgtcctggcatttcgggatagcgaagctttcgatccggggattctcacggatctcttcttccttcttaggtatagtcagagacctagtcttccgaggcgagaagttgcttaactttttagttcatggcttgatcgaataccattgaccctcttgttcggcatttctacgtcggtcgagctctttgaaggaagattaccgcgctcaagcgtgtcattgctgaaaggaagatactttgaacttcacggtgccagcaattgtgtcgaccatatatatgagcgggtacaggcagaaggaggcaggttttggcttgggcgcaatcttactggcgtacttttcgaaaagtcaaatgattatttccagactccagaagctttttgccgcacattaaaggttgattctacgtcctccattgctgccggcccttgctaatgtgactgctagtacgcctacatgtcccatttcttcgccaacccaatttcggtactactggcggaccgcgttggggaagacctacagaatgataaactatgcgaagccatccgaaatgtaccgtcctttagggagtaagcgatcatcttatttcctgtgtggttcttggttgacattgagcaggtattgtgagattttgttggaagatagcaagacacaacaagtgcgagacttgttggaggatgacaaactccttctcttggaaaccacccggctcatcagagctgggcaacgatcaatgcattacatgttccaggcggtgaaatttatctctatattgctcaaggaactcaacatctccaagaaagtgagcatatcagaattgtctattcgcgcattgtgcggggagctgcaaaaatctcccctactcgaagacgtcctcgccgcctttcgacgattggattctagcagagtcgcagggttgctctcccagttccccgaagctctaagaagccttcctgatttgcgcggtgttgaggcggacttcagatctttgacaaaagcccacgaaggaccagagcctctgcgtagtgagtacgacagtcaaaattccgttatcgggaccaccatagtgaagcaacgtgtcaaactcgacacgggcaaagcgaagttgccagaagagactataaagtacacaaggattataaaccgttgttgtacattgctaagatcatattttgtgaacatcctcgtcttcccgcaagaattacccttacatgaggcattcctgctcgacatgcgaaatcccattaaagaagtctttgcaccgcgagcccgatatgcaatagagcgagcattatcgaacccgtttgactatcttctgtttacttcacaggacaccgaacgcaagatttccgccaagcagcctcccacggcgatcttatatcagttatacctcgagtccggcgctctcgtgaatatgtatgacctgtggacagcattttacgcagtttttgagagcgaacagggtgatagctgcgacgagaggatgactatggcattattttacagagctttatctgagctcagggcactcgggatgctcaaacatagtcggaaaaagttggatcatgttgcaaagtcagcttggaaaggcttatgagttgtttgagatatacaccgtcaaagccgcattatccataataaaaatacattacaaaggggtatcataagtattgacaacaaaattgctcaacaatgtttcccaccattgtcgtctacagaactttactgcaattggtcagatatcgggagttgtatgatatcgtcacggcccagcggacgccttccatcactcaagaccatagcctcgcgtctacgccttcttagagcttgttcttggggattgcgctctcgaagccgtagaccagggactcgtcttgcaccggccgtatcctcgccatccaccatccacacgtcgtggtcatcctcgtcctccttgtcgctgatatcgtcatgatcattttcttccaacatgctacccattaacccgtatttccgaagctgcttcgcgccctctgggtgggatgaaagcgtattaaaaatgttgctcataaccctgtcatcacaccaccacgtcttcataagtatcactacatcctgtcggcgagatggttctgtcaaggcacaaggaaatggataattggcgagccatcgactgataatgccggcctctagtgcagcaggaatgttttcctgaaggagtatattaagcgtttccatgactttttgctcagaaggtggccgtgttctagggaatatcggggagatagtttccgaggttatctccgtatgctcctcgaggaggttgcaaaggcagtcgacaagcgcagtgtatgtccgtacatctctcagtcgagagcacacagatgttcgggaaactataactataagcactgtactgtagatatatgacgtcttgtgcgggtacgtacgtgctcggttagagaccaggaagtaagccgcacgtattgctttgtttcgtcgcccagtgttcctgctggctatgtcttcaagtagtaagtttttcgtgtctcccttcacagagcgttcggcaatgatgcgcagcgcactgcgcgagttagtttgctgctactcatgaatggccggcacccatacgcagaacgaaggtcatagcttgtgctgttggatagtttcaataacgtatcaagtttcagagctagtatctgtcagaatctcaatgctcttatatagcgaaaagaaatataccatcttctgtgccctcattaattatcttgtcatcgttgctgtcgttcttgatctcagtcaacctgttcacttgctggaggtcggcagcaattccgcgcacggcaaagaatagagtgacacctagccaggtaagtaactaaacggcacgtcaattagtccgagcatacctaggcatagccataataccctgtcgctcatacgagaagccatagcgtcatcataaatccattgtcgatgtcatcgagggtgacgcccggaaagcggagataagaagcggcaaaataacaaagcggtgagccaacatttttctgcaaccaaaaatttcggaggcttaatcccaagagcttgttctgccccaacttcaacaacgcaattatgccgccgtcgcagctcaagcagctgaaagcttctcttcgcgatactggattactgggtccccagaagtccaagaagcagaagcgtcaaaatgcgaagaccggtgcgaatgcgcaaaaccgggcccaacgcgagtccgccctaaacgctattcgagaacgattcaatccctttgagattagaacggtttcccgcggcaagttcgatgtgactacacgagatggcggcgccaagtcagcttcagggaactttcgaccgggagtcaccaagtctcttggtgaagagagggtacgtttgcggtatatggtccaagtggatgtggcttacacttatatcgcagagacgtcaaaccctattgcaggagatggatcgcaggaataaagtcggaggtattatggatcggcgttttggtgagaacgacccgaccatgacaccggaagaacgagccgcggaacgattcgccagagccagccaaaagaaactacgcaaagactcgatgttcaatcttgaggaggatgatgaagaggagtttacgcttacgcacaagggtgaatcgctatcgttcggtgatgaggatggcattcgcgatgatttccaggaagatttagacgcaggcgacatgtcagatactgaaatgcctcgaaagagaaaacgattcattgacgatcccgaagccgaggaggacggatcgcaagatggggaagatgtcccggaacgaaagaaatcgaagcacgaagtcatgcaggaggtcatcgccaaatccaagttttacaaagcgcagcgacaaatggcgaaggaggacgatgatgaattacgtgaggagctggataagggtctacctgaactctttgatatgctccgaggagtgaaaccccctccaaaacaagaaccgccaaaggacgatcttgcaggaatgaatcccgatcgcgcagccatcatgcaaggccactctcagggagacccagaaaaggagtacgatcagcgattgaagcaactgactttcgacaagcgatcgatgcctacggaccgtactaagacagaggaagagaaggcggaagaagaggcacaacggttgaagaaactcgaggaagaacggattcgcagaatgcg

SEQ ID NO: 5409 - DNA, 5563 bp, Emericella nidulans
  unsure (1)..(5563): unsure at all n locations
tcttcatcgcgcctctcgcgttctttggatccgcccacgcccaggaagatgattcagtgcaggaaaactatggaacggttattggtattgatttgggaacaacttactcgtatgtcaattgaggcgaatagaaatctgagccaaagttaactggcgcagttgtgttggtgtgatgcagaacggaaaagtcgaaattctcgtcaacgaccaaggaaaccgaatcactccttcctacgtcgcctttacagatgaggagcgtctggtcggtgatgctgcgaagaaccaatacgccgccaatcccaagaggacaatctttgatatcaagtgagttttctcaaaatatctggttgaacggtttctgactagggtaggcgtcttattggtcgcaagtacgacgaggccgatgttcagcgtgatatcaagaactatcctttcaaggttgtcaacaaggatggaaagcccaacgtcaaggttgatgtcaaccagactcccaagacgctcagtcccgaggaggtttctgccatggttcttggcaagatgaaggaaatcgccgagggctaccttggaaagaaggttacccacgctgtcgtcactgtcccggcctacttcaacgacgcccagagacaagctaccaaggatgctggcactattgccggtcttaacgtcctccgtgttgtcaacgaacccaccgccgctgcgattgcctatggtttggacaagggcagcgaggagcgccaggtcatcgtctatgatcttggtggtggtacctttgatgtcagtcttctttcgatcgatgacggtgttttcgaggttctggccacggctggagacgtccatcttggaggtgaggacttcgaccaccgggtcatggaccacttcgtcaagcagtacaacaagaagaacaacgtcgatgtcaccaaggacctaaaagccatgggtaagctcaagcgtgaagtcgagaaggccaagcgtactctgtcttcccagatgtccacccgcattgagattgaggcgttccacaatggtcaggacttctccgagactttgacccgcgccaagtttgaggagctgaacatggacctgttcaagaagaccctgaagcccgttgagcaggtgctcaaggatgccaaggtgtccaaggctgatattgacgacattgtccttgttggtggttccactcgtattcctaaggttcaggctatgctggaggagttcttcgacggcaagaaggctagcaagggtatcaaccccgatgaggctgtcgctttcggtgccgccgttcagggtggtgttctgtctggtgttgagggtaccgaaagcattgttctcatggacgtcaaccctcttactctcggtattgagactaccggtggtgttatgaccaagctcatcccccgcaacactgtcattcctactcgcaagtcgcagatcttctcgactgccgctgacaaccagcctactgttctcatccaagcttgtaagttcctcatttcatcatcgacgaaagtatcaccattctaacggtctacagacgaaggagagcgttctcttaccaaagctaacaacctccttggcaagttcgaacttaccggcattcctcccgctcctcgcggtgttcctcaaattgaggtttccttcgacttggacgccaacggtatcctgaaggtcggcgctagcgacaagggcactggcaaggccgaatctatcaccatcaccaacgacaagggtcgtcttacccaggaagagattgaccgcatggttgccgaggccgaggagttcgctgaggaagaccgtgctatcaaggccaagattgaggcccgtaacagcctggagaactatgccttcagcctcaagaaccaagttaacgatgagaacggccttggtggccagattgatgaggacgacaagcagaccattctggatgctgtcaaggaagtgaacgactggcttgaggagaacggtgcctcggccactactgaggactttgaggagcagaaggaacagctgtcaaacgtggcgtaccctatcaccagcaagctgtacggctctgctcctcctaccgaggaggacgatgacgagtatggccatgatgaattgtaaaataacttagagggattctggagtttgttttctgttaagatgttcttttttttccgttccccgctcggcctttatgaccagcagcctattcttggtttaagataggacacatgatacctaaatacatgattacacttcattttcattttgcgtgctgtaatttgtacctcagttcccctgtgcaatcaactcctgcacgacctccacaatgacctgatgatcatcctcttgcttcaatccactcacgacaaccacacccactatcccatctaccccctttacgcgaatcggaaacccacccccatgtatcgcatagtcatccgcaatcttcccaccggacgaactcaccagcgcatactttctaacaaacgcctcctccgccccaataccatccgcactcgctccttcaagtccagcaaaaatcttccgcctcattaaccaactcgagacaccccaccgctcaactgtattgcgctttcgacgaacccacacctcattgtcagggactgtgcctggttccgtagcgcattggaacacgacgtgcggagctccagtagggccgttgctgccgcctagggagatggagatcagggctggtttgcgttgagaggatgggagggagaggatccgcgtgcggagggcgaggccgagcttgaaggctgtgtttgaggtgaagctgttgaagatggtagaggggctggattcttgagcagcgagctcgcggggctatatcgtgtttgtcagcttagtacttcactgggaaattggatgggttgagcgcagttttacgtctgtgctagcggctggaaggggtttgtcggccattctggattgatagactgtaaggatggctctgattcgggggtaggatgaaaaatagagagagaaaagagattgacgttgtgtgttgaattggagattagtgttggagctcccagccatgtggagtttgaaaacttagtgacgtagcatccaaatgttgctgtgactcaggtacagtcgagtgcaccgtacagaagaatatttagctactattgacttccagcacgattcttccagagatactccccctctccatctcttcataaacgagcgacaagtctctgagcggccgaacctgtatttttggtttcaccagccctcgccgggtcaattccactgcctccatgcattcgctcagtgagcccactacacttccaacaaccttcaatgccttgatgacgatcgtgcagattggtgtttcgaactttgcatctccagacggaactccgacacagctgagtgtacctccggttcgcagcatctcacacacatgggcaaacgcctttccgctcccggctgttacgaccgcagaatgtgcgcctaggcncggtgatttcatgaacgcgctgaacaggatctgtattgacgaagtcgacgaattcagtagcggccacactcagaacgaaaacgcgttttgtcgggggcgtcgatgccaatcatcctgggctccaaggactttggcgtattggactgttgttctcggtgtcgtgagttagggttaagatgcctctctattggaatctcacctgccatatgcccgagccctcctcctgccccaacaacaaccagccagtgtccagccctgatatttgctcctagaactgcctggaatatcattagcatgtggatcgataccctgccctggcccattctaccttgtatgcagtaattccggcgcacagtactggagcaatagtcttgggatcgacgtcatctgggagaatagtcaagtagtccgcatcaagcgcgatgtactcctgaaaactgccgtcctcgtggtgaagggggtttgtgcctttcaggcagtattgctccgttccagctaagcagtactcgcaccgcctgcagacccgactggcaaagcgaatcccaacaagagtgcctaatttcaggtctggcccgcaacccgggccaagagccacaattacgccctacgccttcatggcctccaatgtgaggcaacttgaacttcgtgatcggaatcccatcagggcctggggcgacggcgtcctttgtgtgaaggtctacaaagtatactgtcagttgacgctctccgttcgaaatgtgatccagacagaggacgtatgggaacgaaaattaccacttaaacataccccggtgtagaggactttagctagtacctcgttgtttccaggagtaggaacaggatagtcattgggaaactccacaggaccgccgatttctcgcacaagagcaactgtctggactttaggaatttcggccatgatgaattatactctttgatcatttcagaaaagctctcacatcttcaagcaaccaaaagtagagtttagagtcaaaagggcaatgtgttcatatatgttgcccctctccaaaggcgcatgtgatgagatggagataacggcccgccgtcccgcatctctgtcttctctattctgctaccgttatccccaatttcagaattagagcattatgccggaaaagcttatccggaaacatcatttccataatgtctttattggcctgggaaatgggttcttccggagcaggttatttggccaagatttcgtcagtacaatcgttcttctaccctcacaataacatcgactgttactccccaaccgactgaattcttgactgattgttccgtgaaatagtcccacagtacgctaatgtcggtatgcaaatgtcgcgactcgacgggagggcagttgaacgacgactatcatgacaagaattcagtttctcaggagcaatggcaagcaacatatatccagctgaggtgtgagcatcgacaaagtcggctcatctcctcagctgggaattctccgtgattgacggaaacgccaccgggacaaggcctccaggggctagctcacggccggctctccgcattttccccagaccaactgaagtgaatgccgatctcgccatacaatttcatgcgttatgggatcaacgacgagatcacggccgcccaattgggtaaaaaagcgatacgaactcactggactttgattgaggtacgagcataccataggagctcgtatgatgcctaagaatcacgatctcggttgtcatcaatcgacagcttccccggccatactccacttgtcgtacttgtcataactccggcgggatggagctatctctgagcttctagaggattttgaactatataaggagatcggccgctcggttacctggcaaatagagctgagttcatatccagttattggagaattggcgctacaaacacaatgcagcttctccgtttccttcccttcttcgcggcgataacggcagcttccgctcgtcgcggatcgaagctagaaacctattccaacgtggtcatctttgacccgccaagcaattataccatcccacgcactctctacgcgcgcaatgagcagttgcccaacggtgatcaagagaacat

SEQ ID NO: 5410 - DNA, 7496 bp, Emericella nidulans
agaagccttgagcccatgagctttgcccaatttggaatgaaaaatattctgacggctcccctttttggccctaagctgagtctattcggttctaatcagtaccttccatgagacggagtggctaggtcgataaagtacgagaagcaggaacatgacgagcaccggcatacgtcgtctccgcgcgacgaatcatcactgacgcgctccatctcctcccctcatagaccgtgagcatgactcctgcattatgcttttccttttctgacactggctcgcttatctgccttgtacacctacagtagtcaatcttggtcttcttagccttacctcttcacactttgcaaggcacccttctcttcactgccactttcctcccatacacccccccttccctgatccgttgagacatgcccgtcactataaaaatgttgttcctgcttgtctcacgcaataccgtctctgattcattgatgccgtgatggacatgtttctaaattatcttgcacaggtagcctacctgtgcttccacctcctcggcgcagcttccaggctggtcttccagccgcgtcctgctgattatgtgcgacatctagctgatcaaccttcaaatgaccgcccttctcgttctacgctacataacgaggaattgatcggatcccgtgcggacggcgccctgcagaggctgcaagaaggacttaaggcctaccgcttgacggcatcgatcgaagcaccgcagaagtttatccccagatcgcacctccaacgcctggttagagagagtgttcaagaaattctccgcgagcagtcaattgtggaagacaaaaaaattccgttatttagccagctgatctccgaagaggcaacccagctctttgccactctggtcgatgtgaagaaagagcaccatataatcgactttttggaggagggtataagagacaaaagcctgccctttgtgcgaacccgaaagctccgcagattaggctctggcctcctcactaggcagaaaaagccgattcaaacaataaacgactgggattggcagtctatcgaggccctggagaacaaacaataccgcgtcttgagccccgtcttccgaagtggagcacactacgagctagataatttgcacatccttcccttcattgaacaggaaacagaggtcgagaatgtacctatggaagcagggggatatggggaagtgtcgagagagtgtatccacccggaccaccatgagttccaaacctcgcccgcgcgggatgtgagtcatacctcactgtgtcaccgttgatactgcagttattgatctatacttgcaattcagggtctcgttgtagctgtcaagcgtgtgttccgcaaagccgatttcgggctcgaaagaaaggtctacctagacctgggcccaattcgccatcctcatcttatcgagctcttattcacttttcgaaaaaaggataaataccaacttgtgtttccctgggctgatggaaatttgaaggactactgggaaagaagcccagtccctgagtttaccagggacctcctcctgtggtcgctggagcagatggccggaatggcaagtggattggcctgcttccacgaattcacaaatccggcacacggacatactcggtttggacgtcatggagatatcaaagcacaaaatattttatggtttcacgctgaaaatgtgctcaagatcgccgacttaggggtagccaatgtgcgtggcagggactcccggtctaacatcccccccagcactgtggctgactcgccaacctactcgccgccagatatccaacggcaacaacacatctctcgcaagtgggatatctggagtcttggatgtttatacctggagtacatcacctacctcgttctcggatgcccagccattcttaggttctcaagcctgcgccgtgagcccagcagtcaatatccagaactgttcactgacgagttttatgctaccgactatgaatccgtaaagccgtctgtcaatgattgggttgcccagctccagcagaactcacgctgctcatgtgtactgcatgacctcctcaacctcatcatgacggagatgatcgtcatcgaccccaacgctcgaagtacctcactcgggatgtacaagaaaataaatgaaatcttgagccatgccaaagagaacgaggagtatgtcctgaagccaaagcttaaggcccaaaacttacctaactctgctactcgtcttcgtcttgttcacttcgacagcatgcaagcttcgcgacccttgggaccccagagcattctactaggaccgcagaagaggtctacttggcacccctgagatttttcattgcatgaagcaatcatcaactatcgatgattgtccggtctctttgccttcagtgcatcaccgtgctacttacgactaacctttggctatgatgcatggcatttgtataaccacgaaaaataaaaacctgagaggcgttttgagcatcttttttcttattttttatttttttattttttttttttttctttctttttgagactcacttttaagattccctcccgcactacctattcaaactacacggttgttgtatgtataattctctgtagatgaaatagagaggcccagcttacacgaagcgtttcagagctcccaaactggtgtcttaggtcgtgtttgtcactcgaaaatatgtattgcttcgctgaagtgtcacaggctatggcctggatcttggttgtcggccatgccctcaacctggttctaaataaggtttctgcaacatcagtatacagcctcggaattgtggcctcggagcttaggaaaggagatccgtcctcataacttcgggaaagggatccgtcggcatacaggtccgggaagtcagaaaggttgataaagggaggaggaagatatctgcgcttctatcttttgtttctttctctaagcttgtgatactcgtttatacaggacagccagtaaaaagcaatactgcctacgcccgttacagcctagacttagtatatattactactgaaaattaacactgctcgggtttgttgcacttcagttataatagcagtcaatattgaagggagaagaattaaaaaaaaaaaaaaaaaaaaaaacatacaacagtagggattcgcatgtggtcacccaccatactactaacctaccggcgtgtggcttaagtacggctgagcggacgggaagccctgttctccacaccctgtggtcgtatgtacaaaatatttagcgagaataacaaatatagtgatgatacggaaatgagatacggaaatgatacgtgacggcccaatccaaataccagtgcccgggatgagattgtaggaagcgatggatgttgtccttaatgggtggctggtagggccgcctatctatactagcttactatgtaatgactaagaaactcgactcttagggtcaggcagtactggaaggcagtatgcactgacacagcctgacctcggactcttgaggatctgacccctgcatatattggtagtaatcaagaaacataaggcgttaaattaggacagatgacaagacgccaaaaccgttcggattcgtatgttgagcccctcggtgatactatggaccgcaagagttctagaattatcctgaaggatccggagatggatctcacatctcacctgcatatttctatactttgtttcgttcttattttgcgtggcagcggcgatatatttagcgtcaacaagatagatggtcagttgtcatatggtgtccgatcctcagtagataattgtgcagtcaatatagtttccttctgccctttcccttcgagcgtatctacaacatatcttactgctcaaccaagctacagggagcactcaccaggggttgtcaagaagggtagcaaacttccctgcaccaattaatgaatatcagaggaatttctctggccgttgttaatttctactgcatgccaaaaatgaatcgatttttattacttaagggcttattgtaattaccagctgtctggcattagctgactggttacagagagttgctgccaaacaaagaaagattagtgtagcacactataaatatttaatttcacctcctatacgtttctctatttctctctcaccagaaacgtcctactaatcccagtacccataatagggttaatgtaacgggcgtaggcagtattattttcaactggcggtcctgtataaacgagtatcacaagcttagagaaagaaacaaaagatagaagcacagatatatcttcctcctccctttatcaacctttctgacttcccggacctgtatgccgacggatcccttttccaaatttatggggacggatctcctttcctaagcttcgaggccgcaatttccgaagctgtacactgatgttgcagaaaccctatttagaaccaggttgagggcatggccgataaccaagatccaggccatagcctgtgacaaagagaaccccccttgatttacttgatactgacagtcatgactttactttccaaaggctttggagcaaagtacaaaaccaaatccttgaatatctaagtacaagtaagtattattctgcttataatacaatatatcaaactaaatacaggggcatgatcatgctttctgataatatagagataataacctactatgactaggttgcaggggaagaggtatataagcctttctagggcaagtctctgcatagctggatatgtactataggcaggtcctgtactgaagatgtggcaaatagtaactagacagttaagggttatcttatatactcctgccttagtaagtgcctatcttagtactacaagctacagtattctctgctacttatagtcatagtaatatagccaacctcctcaaggctatggtcctgttctatatgtctttcagtaacggtaatactctactgctaataacaggcaatgccgttgccttgtttctttataaacctgactaattcagcaaaggccagtgtttattattaggcaaggatattagagatttatattacttaaaaggcaagcatctatacaagccattaaagtatcagagtaatcaaacaagatagtatttagctgtccaagttcgcgactggctatttattatcttattgtaagtcccctataaaaactatagctgcctggtctaaatagtcaaaacagctggagtatcgcaatcagcatatgtattggtttaataatctacagccaggcccaggacggtaaagatatctgggccgccaaattttgcaaaatctcgactgtgaactccagcactctaatcaagggcgactcctggccgacaagcctgattgcaaacacacttattgccaacatcccgcagcttctattctctctgatctatattctcaccaacagcctgctcaccggcatggcccttgccgctgagtggagctgctacgcaatactacgcaggggcctgcgtgtcttgtggaatcctaaggctgcccaacgccgaagctattccctgtccctgccgtactgctatgctatcctactcatgaccttgtccacaatcttgcactggctgatatcccaaagcatatttcttgtcagtgttgatgcctataatccggagttggcacatattgagtgtcttgatatcatgacctgtaggtacatactagttgctattattagtataatctctgttggcagagcaatgctgctgggtattgtagcattggcatttcaccggcttggcttgctgatggtggttgcagggagctgtagcctcggcctgtcacctcaactatgacctgaatctggaatacgaggtgcggcaggttgattcccatcctccagaagaggatatgatgtattcgccggtcaagtggggagctattgctgtcgatggcgaggtgggccactgtacgtttacgtcggaggaggttgagatgccggaatctgggaggttttatcaatgagcgtgcgcttcaaggaggtctcatcatgttactccacgtttatataattgaataagacctgggcagtggttatagccagggtcagaattgatgagtaggtttgtttcctgacgcctactgtagcactatgccgttagctttatcaaggattcatttatgtccagaacgtcccccgggatgtttccggcctcacggctgcatcggggccgctcgctttgcttctgtgatggattgtatacgtgcaagatacgcgacgaagatacacatagtcggcatcagtccccaactaacatatattagaccctcttcgagtttcatcctagcttcatactaagctcgaggtataaatttatggcgtggtttcgctctagagctgcccactgtcaacaattgggactctatgatggcctttagagttaaaccaatggctgacagctgggtgaatgctttttccttgagcgtgtggaaacaattaagtgagtctatttctacggcagagcaaaaatctgcagtagtaagatgctttgatatcacttgcggtctgcctgctagaaagctagctgaatagaggaacaagcaagctctggttgagcgatacagcttgcttcctaggaacgtggctggatggtggggccgcacctgggagcatactcatgccttgatgaatagtgctatcagtgtgatggtaatgctagtacactaggtgcctgctgatgccgcttggtcttcatgcccctcggatgtggtgggagggactaggccagataggatatgattgcccgtccttcgttggtaggggtaagcgactttacatattcctctttactgttcagtgttctccttagtgctactaaatctagaatgtacacatctgtgttagaactgtttgaaccttccagttcaccgtgttcttaactaaggcagaaagtagcagtggctttttcatacaacgaaattgctcgaagagtaatgttaaaccacgactgaagtatacatggtcagcaagctcggccacaattcaagaagaggacagagcttaggtagatgtcggacataccgaattacaaccgggctgtgtcccgtctccgtgctggcatcaccctttgcctccataaccatcgcctcgagatagattacactcctcagcagcggctgcgcttcgcgctcggcaagatcacacccagcggacgagattaagcaaacattggggatacccgccttcttagtggcggctataagctcagccgtgatgtcgaatgcgtccttatgacctggtggtagaaggcagatcgcgtcggcgcctgtctcctgcagtgtgctgaccatggcatctagatcgccgggtttgtgttcaacgatctgcacgccatgctcatctttgagttccgcgcatgcgtctgagtctgggtagagggttaggcctgtgatctgtttgatgcctttggagaagctgcgcgacgcgaggatggttttggcgatttgagacccgttagactttctatgctggta

SEQ ID NO: 5411 - DNA, 3851 bp, Emericella nidulans
gcgaatccgaacgctcactcgccatcgatcgggaacgggcgagacagaggagagaggcggaagcagcccgacagtgttaagagcaactagcagcggaacgtcaggcagccgaagagaagcggcaacgcgatcttgagcaatggaagcgatggcgagcacagtctatcccggaggaaccagacatgggcgtcaaagacgctgtccgaattagtatccgactaccctcaggtgaccgagtgatccgcaggtttgcccctgatgcagtcatggaggagctctacgcttttgtcgagtgttatgatatcacgaaggaagctgaggcagcaaccccaactccagtagagaagccaggtgggtacgaccatacatatggcttccgacttgtatctcccatgcctcgagtcgtctacgcggtcgatgctggttccatccgggacaacgttggccgtggcggaagtctccttgtggagccgattgacgatgaaagtgacgaggaggatagctagaacgtccatactctaacaatgttcatgtctgtctatacctagtgaggattacctcatatcaagggtcatcaaagtatgactgccctgtagataacatattttgtccagtaagccagtctggcttttgaccctgggagacgtcccccaaacggagagatcttagtccaccgttctcgaactatccgcatgctgcgcctcgcatcttaaagcagcaggattggcgctgagtaacctatcactattaccccatctgtaagaaggaactaggcacatgcgcgtgcgtaggagaaactaatagtagggagtactgtagcccatacgactcggttactggcacgtgacgcgagtagatttacctagtactcaaaagggatctgatattaatgcatacgtgggggccatgccttaaaaccgtgagaggtaaatagtacatggagttagcggaaagaacttcaaagaatcaggcagcgactttgcgttgttggacttgtctcaagcgtgtcttaccagatgtctcgtgcgcgtaggcaacaggagctagaagacgaaggatctcaaccatgttcagaccgccagtttgagcaaggtttagccaggtttagccaggtttagttcaaggctctggaccctttgaagtctatagctagactaccactcgagactagatccccacgataccacttgaggtcattctaatagacctgattggagagtcaatcctgtgtcctgcatggtcgccatatgatttctcatccttgagctggctaagccatgcagcttttttttttgcgaattcacgagttcagcttggttggaggattgcatcttattgcgcaaccgtggtgcagccttagcctaggccaacaacaaagctcagcccaagcccgtacggcgcacggctactcgatcattcagctcgaggatccagtcttaggactcttaaggaatccactcattactcggagtgaatctttcaaataataatgatctttggcggtaagatgcacagccactgccccttcactgtttttgtcgagggttgccagggattaattatccgcagattagccagacgccacgaatgatagctaaagcatggaagccggtacttgaaacgaagctatcgagtagcccgcctcgcttaaccgtagctgattacgacacgtcaaatcggagcctatcacgcgaacgccatacatctgcagggcgaaagatcggttaagcaagatacttttcaagattttccagatgcatctgtcgatgaatgtcgtgccatgtgtcggtgcatggacatcaggccaagccgtaagccgtcaaagggctatcagaacggatcgataaccgactcgataaacgataaacgaaccttgtgactagaacggggaaccggttgagccggttgaatccacttgcttagcgcttacgcgacctgtctagattgggcggtaatatacagagtagctctggctgacgatatccacggggccctggttgacaggaatctggcgacgccaagatgaacacatcgcacattccgggcagaggctgcccggaatgtgcgtgggtgacagctcggcaatgcagctgaacccaaatccacattctgtaaacattctgaaacggattccttcaagtgccggaaaataaaaccacgacgaaccgagcgttagtctggaatccttccaaggccaagctacccgtatccggaagaggctgcgtccgtgccgagagatcggtggcttagagttgacaaatccgcagctaagatctgcttagctgactcagcatcataatatgcgcaattatgctaatcggaactggaaaacgcgagcccgacccgggacgaaaggggtacaagtggctttcgggcccgggaaggcatcttgccgccccaccgtcatccctgataaccggggccgcaaacaataatagtcaatccccatgcacgtcagccgtggatatccttggcataaatcataaagcgattacagagccagtttgatgctctgtgaccaaagcggcccaattcggaatgatacggccgcaatcagtcccctccaggtgtacagtagagactcaggtgataaaagagtgtggatatagtagagtgatggtgttgtcccaataataagctctatggtaaatatttggctcagagtagaaaatgcgtatcgcaatttgatacgcgatacgggtccatgaagcatggagccccatctgatagcgataatactggagacacgggggacaggggcaattactgtaaagggtctgtacaggcataatgacagttatgtagtgcaacaacgacgacagtgacgtttacaataaccatccctcgacaagcatcatcctgagtgattcttaccacagccattgaagccaggaataatgatccaggattggatcagcgtcataatgagtcttacgtccgtctgcggttcttctccagatcgcttaagtccgttgcttcgggacacatctcagcagacccgttcattgctgctcgccgctcggaaagctgctgtagccgcacccgtttggccagaattctttctctccgagagcccagactttggcgcgccactaattttctgcaattttttcgctttctgattttggggtagaagcgtgaaatgatactaataagaatggtgtcctgtggttttgttcctcattcttaagctacgggatccgtcgatcttcagttacagaagggttgatcttcttctcagaaagtccccctcttttcctcctttctccttactcgacatccctgctatactggacaatagcgttctactgtcactttgtgtttgtttgcttatcttttcccccacaagcctttgggcgtcccttcgtttcccgtttccctgagactggttgtctcaacgcccagcaaccatgtcgtcttttctaggaactgggacttttaataccagcgtcagcccatcgcaggcggtggaatcacgaggaatcgagaatcacggtaatgcgatcacagagaccgaaactttgcacaatgaatcccatgccgagtcgccaggcgagaagttggcctctagttcaaacagcatcctcagctctaccgaaaccgcccgcgagaaggacgagcgcgattatgaattggatgccgaagaggaagtcacacggctcgcccagcagctgacgcaccagtcgaccaagtactctacgcacaatatcgagaacccgtttcttgaggttggtgaggactcgacactcaacccacacagccccaacttcaaggcgaagaactggatgaagaatcttctggcgctgtcttctcgcgacccggagaggtacctcccgcgtcaggctggcgtt

SEQ ID NO: 5412 - DNA, 4740 bp, Emericella nidulans
gtcgtttcctttgaactcttgacctccggaaatacaacagtctatgaattcaacccctgggaatttggctgttttgatccgactgtctacggatttgcgccattggaatacttgggttcccgctttatcaatggttccattccacgcaatgaaagttgcgttcgtggttttgataatgctggatttgtcatgggcacttcttccagtctgttcaaccagttcttccttcaactgaacggcactagccttccagatttcttgaaggacgtcatcggtgatgttctcgcagatatcggcgaagatgataatgacattgccgtctactcccctaacccgttttacggctggttaccacaaaactccccctacgccggcgaggaaaacctcgacgtcgtggacggcggggaggatcttcagaacctccctctccacccgttgatccaacctttgcgccaccgtcgatgtttatcttcgcgattgactcctctgctgatgttaacgactggccgaacggcactgctctcgtcgccacctacgagcgcagtctgaattccaccggtattggcaacggaactgagttccctgcaattcccgaccagaacaccatcgtcaacctgggattgaacactcgtccaactttcttcggatgcgacagcactaacacctccgctccgctggtcgtctacatcgccaatcgccccttcgtctaccagtctgaagaaaccatatccaatttctcgaccttccagctcagcacctcactcgaacaaagagacaacagtatccaaaatggctatgctgttgcaacaatgggtaacagcactgaagacagcaactggtctgcttgcgttggctgtgcgatcctcagccgctcgtttgaccgcaccaacgagcaggttcctgatatctgcacccaatgcttcgacagatactgctggaatggaaccctcaacagcaccacacctgccccttactaccctgctgccgttctgggtagcggctcttccaagcttttcccaacagttttgtcgagtgtcgtggcggcgagcattgcgattgcgacgatggtataactgccataatttatctgaagtatttacatgtaaatatatatacacgttttatcgggttctttcatttaatacttggatagtttaaacaatttctatgttgactttggagacaacagttcccgccttgaggtgcataaaacgagcgccgccgtagaattaattatgaatcatatacataatcagcaagccaccgttgccatggacaacggaccttggtgggcacgtgatttcctatctgggtgctccgtcacaaacaccacctgcaccacccacattgacaccggtcggcccgatgcagtttcaggctaacgacaactgaccacaaaaacattactgatatatcgcgacagctgctcaaagtcgtgtctctttattcgagacgaattccaccagtagtctggtgcttgggtttattctttccgcagaaaacacgcgtcgcacaatgaacaatcacaggtcgacgacatacgactttcactaattgcgacgtgaatctaaaatctacgactctgctccgattttttttccattctgggctattgcgcctcataacccaaatggcccgagcagcggttatccctcaatccccgccgaagcgctgccacgcgcggcagagctaaggtagcaacaacacaaacgagcaaatcgagcgcgaaagtcaccagggccgctgaagtgaagaaaagaaccgggcgggcggcagtagtacaaccacactccgaggcagaatcagaggaaacagatgacgagattggggtcattgaaagtaaaagccgggaaaagacacctggggctaaagggaaaaccgcaacttccaggacgagtcggggaaggagagcggctgctacgccggacatggggagtgagagtgagaacgacgataacgacgaactagcacagtcagaagcaccgaagaaacggccagggaggccaaaaacaaagacctcagccaaggaggagaatacgaaagcagcggcaggttcgaggcctaggggccgaccgaagggtacgtccgttaaggtgccttcggacgatgatatattaaaggagaatacacggagaaatgcgctttcccaggacagtgacgaattgtcgccctcacaacaaaggcctacagagattttcgtaaccacaggttctgctttgctgcgtgggcaagcgaagacaaagaagaaggtcacctttcaggaattgactgattccgaggcggaagtgagcgacacaccagctccgaatgcgcgacgaagaagaggagccgttatcgcaaaggattccggtgatttggatgctaaaccagttcgtaaagcctctgcggggtcaacgagaggtcgcaagcctgcggcagccagaaagggtagctctaagcctctgtcaccgaagaaggctatacaagtagcaaaggcgatttcggcgtacgccagctccgatggagaagaagatgagttaagcggcgagaaggatgctatcaagctcgtggtacattctccccagaaacgtacaccaggcgtgtctgggcttggctcgcccgtgagaagaatcaatttcactccgaataaggtttcaaacccggttgatgagaatggcgaaccaacccttccacccccaaggacatttgacttcggtgactcgcagttcatgtccagcccggcgcgccggcctccgccctcgcccttccacttcacattaaaagaaacaccaagacgagcagcaattcctttccctgagaaacctaatttgggccgcccagaaacgactccgaaccaaaattctccgttgcgaatttccccgaagaaggcaagcatagcaacgcccgcgcgaggaaccctgttcgatcgtgatggcggcgcaattccacaaccaaattttactcccgggcaaaactcgcctctgaagatgtccgctaaaaaaggcatttttggggcctctttctcatcccaacaacccatacaacagcagaatgcgaccccgttcaagtccagccttctattgagtcctgctaggaaggttataacaccgtttaaaaactcgatgacgcacgtgccaacaccgttggccaaggagactcggttgcagacagatacggagaccgatgatgagacggtctcgatgtatgatgagtcgccgctacgaggacagaactttgaggttacggggggaggtcaggctaataagctcaatgaggttgatgagcgttcaggtgatgagcgtaatcccgcgctaacccctgatggaagcccacttgctcgagaaaccgagcagttagaggaagaccgctcagccgagtcggaccattctacggagtccgttgaagaggaagatgaagggatgctttcagaagaagacgatgtctccccccttaggggtccagagctcgatgaagcagtacagcaagcggagcaagatgtccagcttatggtcaaggaggctgaaaatttccttgcccagtcgatcaaggaagaactattggactgccataaggatggagaagatgagagttcaactcctcagatttctcacgagatggaatacgagaatgagcttgaggaggaacttctgcaaaatgaccaaggacacggagaggcggagcatggcgagtcagataccgagctcggggacgaacctgaaccatcaccatctcgattcggtcttgctgatgggcttgaagatgtattcactgatgattaccccgctgagaccaacactatccatgacgatgaggaggatgacgaagatgatgaggttgtcattgatgtggacgatctcacttgttacggaaatgatgagccaacactcgttggtgaggctgctgccgaccatctcataagcgctggtgcgattcagccgtatgagattgaagaagttgaggacactccattcatgaatttcctcctgacatactgggcaccaaccctaccgttcgtcgaagaacgcgagcctattactcccttcaatacggagcgatcaccgtcacctatcacgccggaagaaagccaagataacgtatcaaaaagtccctttcttcccattaactcagaacgaaatagtccgaatgtgcttcaggagccatctcttcgcagccaaggccgacgcttcacccttctggccgagaaaatgagtcagtggaaatcaagcagccctgcaaacgccgaggcaagaccacgacgtagaggcattttctctttggggagacccagtgatattgcaagtgccgcctctcggacaccaaaagtggacatctttgcaaatgccccgaccctttcggctgagcctctctgccagatggagcccactcctcaagcgctcgatgttcatgaagacaaggaagatgaggcggagatggtcgttgaggaggatgaggtggaggtggtcgatgaggcggcgggatcagagtctatacgctctacgaggagcccgatggctgaggtcatggaggacgaaaatccagatgagctcagcattttcaaagacctttctgatggcgaagacatagaggaaaagcaacctgaagctgcacatgtgtctactgttgacccgtgggaagaggaaaaggagaatggtgtaccatccccagcccctgccacacctgctaaaaatccgtcactacccagacagacatatcatactgtctcgaaggtgcctctggaacctgagggcgaagagatcgcct

SEQ ID NO: 5413 - DNA, 6781 bp, Emericella nidulans
gaacgaagagaggccagagtcctcagttagagtaaacagctgggaaagctgatccgacctgggggaagaggtggcactttgatgattggtggtggctcagcatcaagccttgtccgtttagcggcatccaagccatcagtttgttcagtcggcaatcctcgtttccgtgaggtatcatcaacttgctctatgcgggattgcatgagtcgctcaatatgttgctgcatcttacccgcgagagggtggctcggattcctgaagatatttagcactaatctatgggagtccagcgggctaaaatacctcttcataatatttataaatacagcccgagctgtcctttccatagatttgactccgattcggaccgcaggtgtcaccggcaagcgcatgtgtcgtgcgggaaagaagttaaggatagcattgatgatcttgttgccaatggactgtcgcgttcggatgacgactgctaggcagttcaacgtcgcattcacaaggacgggatcactgcacacagcaaaaacccattagcatctgttatcagatgggcagattggccgggacggtggttaccttgcgtcttcctggaaaatggataggatcctatctaatagcccggaggattctgcttctagattggggagagagagaatggcgtggtttcgaggaactatcgctagggatgtttcattcttgtcgggtcgcttgcttgaacgttaacatcctggacgctcctatcaagcccaaaccgggatacataccctggggtccgctatcgggccatgcgtttgtgtgaggacgacccgttgggcgaatttgatgcagcaaactttgacggggcatgggaacgagtcccaccttcgcaggagatcctgtttgattgcttcgatatgctcccaggattgcttgtcttccggatggttgatgctattacgtcaagcattagtgaacagaattcactgacagggcaggcactgcctccagctcccctaccaacatctacaagaggcagcccttaggggagaagaggcgaggcttggggggttagggtagggtaggtataaacaagtactggccacctacatatgcctaaaaaccaggggatatagactggcggctgtctgggtaatattctgcaagaccaattgatccccttctggcagttccaatatgctccgtaccgtctgcaacacattgatcgccaactgttccttcggggccgtagcgaacgctggactggcgaacgtctcggccaggaactcggttccccatcgtcgcaattccactcgcgcgtgcgcaccaataatcggaaggactccgttgacgatctgaggataaaaagcggcgtctcctaggacgagattacgggcagcattcagctgcgcgatctgatcggtgacctggtcccccgactgagccatggcggctccttttagcgagaggcaccagttgaagggcggaagggacagaggtcaagggtgactgcgatatttctgagatctgtctacgttgcgcagcaatctagataggcaagcagcaaaaatcgatagacgtgaccggaacacaggcgcgacaattatgttgttcgttgaacacgtgaaacagtccgagctagttgaaggacgggatcaagccaccggggatgtttagtccggaggtcttcgaaacccagtcgaaacgcaaggaggatcaagattcgcgacaggagagagtgacgaacagtgcgtgggataataagttgccttggctgaagtaggacctgttggtaaatgacggatttcttgcacgcgctcggagcagagtttggccgctccgatacaatatcaatatcgagttcctataaacaagcagggagtgatgaggaataatgttacaggatcacaaggtataagtcttatggactatattttatgcccctattcatacgaacactcaggcggtctgctgtcgaacgaattggtctttggggaggacatatcacgtgatatgcccagtatagaccgagtgcaaggagaaccgaggataacgcagggaaaacgtgcgaagcctggacagctactgaaagctggcatgataggcagttatttatgtattcctggattcaaggtcatcacctaaggtaccttgcagcggcccccccaatagcccagactgcggaccgtcacgaccgccaagcccggcctgggcatcattcgatctccagctttctcttcgccgagtctcccgattttcgctgcatcctcaattccagcaattcatttgattctccgccctaaccgaaccaagatgccagccggaatgtatgtgtctcatgagttctcccagttatactgccggccacagagtcctcaccactcatccgccgctccttcagtgtttgcaagcagaggatagaaaactgacccaaacccacagtttcaactccacatactacggtaaagactaccgtgccggtgctgctcttctccgtgcgcgccggccatatctcttcaagaatgccgcgaccggacttggcctttgcatgttcacaatcggtgtctgtacgttatatccgatatattaacgagtttccccgctgtgctactagaccgctaatacgccaattcaactagacgcatacacaattcgcgctgtcggccaggatgagttctctgacgttaaagttcccgacgcccccgccgccgcgccacaacagtcaaagcaatgaagctatagcggaggacatgtatacttctacgtaccgtctgcttgcgagctaaggataagggttttattagctatggtgtatatggggttcggagtatatggtgaatatctatgtctcattttctttgactgggttgttcgatgtacttgatccatgaagggctgcagcccggaacggatccgctacctagaggcctggataatgtatcctttagctatggcttttgtcgccaaagtccggtttgtcggagcagctagggatgccaaagaagatgcacctccgtcagttgttcggacggatacctggccaagcgccccacggcgctcgagaaggatcatttccattataccattgtatatcctatcaactctggacggcaaagttattggacttctaatcatttgccatatcaagggcacggttttgtacaaacgagtctggcaattctagagcgctgaaaccatttttagccttctacagttccgcccgaaacatcaaaatcaatacatgtaagaaagaaatacacgcaaaaagggagttcaaccacttccttattccgacctcagaacacgaggtccctttcgcttactcgccttcttccgcttgttcccgcggtcaaaggcgacggcgttgctgtggtcccgccccaggttgtcgagatccttgaccttgtagatgcggataatccagttttcactggtgaaggcttcttccagagtagagagctgagggctctcggccggaagcttggctccgcggacacggtcagtagcctggcccatagggaagagcttgttaaagttgtggtacgacattttgtacctgtaagcgtagtcagtaagtacttcactcaatatactgaaatccaaatgccttacattaagctgttgcgcatggttggggtggcttggtcgtccacgcggtactctcccctcgcggtgaaaaaatctcgctcctttacctcgtcgggccagataccttctgctatacggaccatccaaaggaatttgttgatatcatcaccagaataccctaacaatccaccaaaaaccaccaagacatagtcaacatcatgttggcggagaattgggtaactgacttcctcgcgtgagctcatggcctttccgacagtagcaatatgagtgttattccacgtgttgttgtcgacaagcgttgggcgatctgccatgccgccgatttggtaaccataatcccaccaagacatgatcttggcgtttgcgggggtgttctggcgaagccagtagtaagcctctcggtaatcgtcgatgataaattggcttccgtccggcatccggctcgccaggacgacagatggagatgaataggcgttcgatgtcacccaggtgcagtgcgcaacgaacaggagaaggtatacaatagcggcggatgtcgtgacagctttggagaagtaagaagtgattccgacttcaggagacctggcagaacggagaccttcggaggattcatcgttagaccttccccgtgtaaccgggccgggtgaagtcttcaaataagtgtcgagaatgtatgataagaccagggcagccgcaacgcacacaataggagtcaaggtcagcatcaatcgtaccataacgccagcaaagtagctcgcaaggacagcgtagatgatgacaaacacgtgctcgtctctgagatcacggaagcacatgtaaacacccgcagggaagagccagattaggaagttgagatcgaagaagaatgatggccaagcggtgggctgatgctctgagaccgaagcaataatgggaatgtggattttggcatagccggtatcccacagtgaatagaaacgaccgctccaaggggcgataatccctgacatgctcaagacaacaagccccgcgaaggcgaggcctgtaattaggatgatggaggcagtcagcagtctctggaactgcttgccaggaatgtaactgcgcacaaactccgcgaaggccacaagttgtagcaagccaaagacacctgagccatgattagcacactgctgtggctccataagaatcacgcttacccagggcggacatgtggtcactgttccggattggcaggaacccaacaaaaggaatttgcatgctggcaagagttcctagcgcataccatgtcgtgtaactgatgtacagcctggggctatatctccccatgcagagcaggacaaagacatgcagggggatcaagttggtaatgaatacatacccaccccaggcggagaccatgtagccataaaacagagcagccagtgctccccacataatggaaccgttcttgaccgccttaatccataagaagaaggtgaaaacgaggaggaatatggcaatggcttcattgtcgtagcttccggccacggaacgagatatgtatccaggggcaatgcccatgaaagcggccgcaagaagacctgcagagggagaggaggacatctcattggttaagaggtacattgcgaacgccgtcaggccggagaaaccgggtgctagtaagacacatatgttgcgaatgtcgacgggaaaggtcaggaatcggagtatgtgatagatgacaccactggtcaccataagtccagggtacaatgtgcctccggtaacccgaccaagaggatgccatgtgcctgaatgacagaaatatgtttagtgcgccgtgatcaatggagaatatcccaattggcgtttgttggccgtatgctagcccggacggggaagagcaacgtacggtcatcgaaccaatcccaaaagtcgtaaaaaccattctgaaccagatacttagttgcgcggaaattgaaccaaggatcgactggacagttttgcatcagcatgccattccaatgttaaagtcagcgttgcgtgggagtccgaaatccgcaactataagcacgtcttgttgtatacatacattcgtggatgatgctttcgaaacctggagtagaaaaagactgtcagcattccttccaaggggaaaggtcggtaacaataagcgcctgaagacatacgaatgacactgaacagtcgactggaaacggctgcggctgcaatggtcactagaatgatgatacgtagcaggccgcgcgcacttctgccggagctgcccttaagaaggacatctacgggagattcggccatgatggcaggaacaaaagaaagaacgggttccaatgagaacggggacaaaggcaggatgagataagtcctgtccggagaacgactggccagatgtagtgaagttgaggtgttgacgacgactaggagctgcgcaaggtggtctcttttggaagtcttggcactaggtacttcgcaatcattcattcggacctttccccaaggcccccgcatcactgtcactcccgctataacataaccaaacagaccgtcagctcgctaacctttccatattctccctttccatattcaactatactggtaatacgttctctgtgccatggacctccctccgctttctctggatcagctctccgcagttatcacagctggtcccacgcccactgatctttatacctcattatcggcctatgaagaacaagcgtgcctcctctcggctacagaccccagcgaaaaggacctactgctcgaattttacactgcgttcttcttttcccaccttctcacggatcagatgtaagttcatgggagcgggcacgatctccgcatggcaaatagttaatgggagccggaatagttgcgaagcccgtgctttaacacggcgaataccacgagaaatatcacgactggatgccatgcaaacctgttcgcttctcttgcgagctgtttggcaaagcaagcacactgaaatttacaaaattctccgagaattaccctggcctgggcggtcgcaacccttagtacaacgttatgagagtatggaccacattgatgttattcgtgaccttacagcgccctgacaggaccttaggctatttccaagaaaagacgctggtagaagtgagcaattcttacgagacgatacggatcgtgccgccgcaacatatctcgggctcgacccagctgccgttgagggtgacat

SEQ ID NO: 5414 - DNA, 8440 bp, Emericella nidulans
  unsure (1)..(8440): unsure at all n locations
atacatattaattacagtatattagacagtttcttaaacaagagtatgatataaagcaaaagtataacaagcagacccaagttggcctggaaaactcatatttgatgtgaatgtgtggaagtcacccttctccatagccccgtccaatgcgaggaaatgatgaaaagagaaaaccacaatgtggaaagtgccaaagaatacgcctgtcaatgaccgaagccgttgaacagaccgttccgccgcgctgtgcaatgcagggaccaatctgtggtggaccgccttcttgatcgcagccacccaaacaaggtaagtatgaagaagaaaagaaaaaaaaaattaaacggtgtcggagggtagcgggtatttataggcacgaaccaaggctgtttcgacgctagtaataagcgagaatcttaaggccaatcagagcacaggcagaggcaagggactgaggcctcaactttgaggcattaatactgagagtctggtcacgtgcaatgcgaagttttggccgtcggaaattgaggactgagcagtcggagaagaacatcaagacaactgcaccgccaggatgaggaacagggctaccacaccgctaagcaagccagtatgactgcctcttcgaggactacaagatgaaaacgaaaagctgaccgaccccctcgcagaaaatccggcagtcatggagcaaatacaacttgtataacctcaaccgcatccgcaacccacccacagcaaacagaaccttcttccagcaaaaatggacagccaaggccatggcccgcgcttatcacggtgaacaggttcgcgagagtcaatggacgcgcatgttctcgcggcgcctccgcagcgtcgtgcccatgagtccctggaagatggcgcaggatgatggatccagcatggctgctgggcgtggttcgggcctggaaacagacatgcggtctcgtgctgcagacgtcaggacaaagacaccatacacgaatatgacgtttgccccattggagcggaggctggatgttgctattttccgggcgctgtttgcgagcagtgcaagacaggcgaggcaatttgtgctgcatggcgctgtaactgtcaatgggaagaaggtattatttaatccctggcattcgagaggatgatctgacaaagctagatgaggtaccctggttaccttctcaaccccggcgatatgttccaggtcgaccccgagcgtgtgatgtatgctaccggtgcgccgaaagacaaattcgaacgccgcgaggcccgtgttgagcgcaagaaggccgtggagaccgaaaagaaagaggagggcgagggcgaggaggccaaagagggcgaggaagcagaagctaaggaaaccgaggaagagaagcttgacacgcgcgagacgctgaagcgcctcctttcccaggccaaaaacatcatgggaagcaacaaggacgtgctacccgccaaacgcaagcaggaactgcgtggcttccaaaaagccgtccgtcgtgtcatgtccaagagtggtgcatccacatctacgctgaccgataacctcgagacccaattcgccgagcttctgaagctccttaaggccactaagatccagcccaaagaagagaaggagtccaagaaggaaaatgcagacgccgcagccaagtcagaaccagcagaaacagaagccactgccaacgcgtccaaccctgtggacaccaaacccacagaagcccttaccgaggccttccgccaggccacgcagaatccagaaggcgaagttgatacatcagagctgactgaggaggaactcgacgtgctcaagcgcgccctcgtccagatgcgcgacaaccccatcgatcactcaaagccctacgctaccccttggcggccacgcgattacatgagcgccttcgctttcatccctcgatatctggaggtcaaccagaacatctgcgcagcggtataccttcgacacccggtcgctcggcccggacactcagaagtgcccacgccgttcgggagagagcatttgaaacgcgcatgttgtctctaattgaggccactgtagaatataggtacaagaagaagatctgtggatgtggaatgttaggttcaccagcatatttcgattcctattccaattcgaatctcgttaggtatcttaacttgacttacccggcccagtgcaaaaccattcccgttgatagatactgatttatgccatattgggactgtcatcatatattctgcaaacaaacctctacaagaccaaacccaccaacattgtttcccaccccgtccacccccttaaacgagacgaacccctcatacgtcggctgaaatggctgactcgcattacaaaactcttggtcgtccctgattgcttcgatgtacagcctcgttccgtctggaagtgcaatagtccagtctaaaggatatgtgcctccgcacccgggtgatgtccaagttctgccggacggggtgaactcagttacggagaggacttgctgttggcctgctaactgttcaaacccgagcactgtcgcgaattgcacgcgggggttggagtcgtagtcccagatccacacggagattttggagggtcgaaactgcgaatttttctcattgtttcgatgttcgggacggtcgtagtgcagctggaaccaagtccagttctgcgatgctgcagagccgcttggatctattccactggcaaagacgacttgtcggtcataccaggtcagagagcggacggggtcaatggtcagcctagtatcattgacaacaaagtttcccatagtaatgcccccaacaagtgaccactcgtacgtcaggtacggaccccaagtaaaagtgcctgagccaccgttcaagatgacaggtgaagaaagctcaaacgttaagtcgaattcaaaatcggacgtactccacgtccgcatggcagcgagggtatctgcagggtccaccgcctcaaagccgtacgttggtaacgtgatatttgcaccgttgatgtgtaccgagactggatcggcctctgagccctggtatgcatattgccggtagtaactgggattgctgacgtcaaggatggagtatctatagtaaccgggccctgggtttccgacatgcgagacgatgaagtagggtctgttgtctgaggcgtagatgtacgaggatgcccaccatgagttgccagctgcggcgacaacgctctgggaggtggccaggtctagcgtcagagggaggcgttcctgtacgcgcatgccatgtcagaagaagcgctctggttgttcaaggagactaacatagtcatggacattgaagccctgggtatccggctcgaagtccaaggccagaacaagaacaaggctctcaatcacaactagtgtgctttcaagtggcaggaacttcatcttgattgccagaggtaagtggttagattgtgctggctatgcccatgtttttaccctgtggtgagaagaggctttgctgaggcacggcttcgtgaccataagcgtagcatccctcactcgagtcgacatttatttgaatagataggaatagttcaggggcatcgggcgtgaagaaaaaaaaaaagcaaaaataatcatactccagcttcgtctcactctgctgacgctaaaatcaaattccggctctagtagatgatgtcgtaatccatccttatgcattttgagtataccaaggagtgtatatcaagtcgagatgcttggtgtcatatcatggtttatggatcatgatgcactgcaacatgccctaaggtagctgaaatgtctcacagcccagaacatttagtatggtataacccgacacgccttcgggggtcgagttcttgacccgttaccttttatgctccatctatactgctgaaacgtatttagtgacatgaaaccctccaatgcacaccgcaaagcaacatttacacatctcagaaaacagcaatagcaaatagcaacgtaagctggtacccatatattctatattccacatgatgaccgcatgaccagcgccttgaaaaatacaccgattcggtgcatgatggtggaggtcagggttgttcttcggctgccagggttcctggcacacgcagaatagtgatattgctgtggattgtattaacgactaggttgctgatgttatcaacgtcaggttgacttgcttggctcgttcgcagtcgcttagttcatctcttatatatgtgcaaggtttgtcaacctgaagccctacgtctgagttggaatgactggaggttgaggattcctcgcccgtccattatagacgtcagtatttcagtacttcttcatgcttcgttttatcctttcttttatcgttctctttctttcgtctcgttttgtatcagaatctgtcgtcttatcgaggctgagatgccgctcagaccctttctcagagattatgcattgcatcaatcaattagcgcaataaccctgcaataatctttgaatgctcgtaatttgactcagatttaagtagaagagatcaggtggccttctgcctaccctggactcggaaagaccaacatcatggggatgatttgagatgaagcacaacaccatggaacctgaagcggatcatgtatgtcagcgatattgactgcaagagttcaacctgcaacggctgataacttcaccgttattgcgataaggacagcttgatagcgtcgtctacttgatccatggtatatcttccagtcacagaatcaactactcaattgtcaggtcttttgaatggacacgatgtcataatacaagatagcctagatcgaatgcgtgcggcgccgaatcacttcaagccgagttccgttcagaccgcagggaatccctgcgtcttcggggacacgagtgtcttgcgatatctagggagcgccatcggtctgggagttatcctaggaggttcaatgattcaatgatcaacgggtgattcgggaaccgtatttgtttgcagaattaagacgaatatgagcattggggttgcatagtgacagaaaacgttcatggtcagattatatgagtgaaacaaactttacagctggctaagatctgcgtttgctaagtagatactagaggaaagtaaacatgaaggcacgtgttctgcggatataacagaaattatagtgttccccggctttatgctcgctgcagtgttggaccagagaatcaaccagacggttatgagtacagaacatggcatacccaatgtggttatcctaatctcatgttctatcatgatatagaataaagcccgtcagtatatagttaaagatgctgcatgtcatgcatccaaatccaccaacgccagtgatgcaaaacagccagaaagatactcaagatatacaagttgaaagaaaaattatatgaagattagacaagcagatactaccagtcgacagcccagccgttctttgtcaaaaagtcctcgcacgctgcttttagtgcgtagttcggacgtaggtcgttcaccgtcattggcgtccgcgtaatcgggtccacgccggattgctcaacgtacttgagtatcccgattcggtcaaaactagtgcccgacggcacaatgactgggtcatgcatgatctcaaaggtgattgggtcaacgaggtagtcagggacgatctggcttgttagtatgcagcgcaatatcaacgcagattctatgacctacccgttcttgaatttcgcccttggatgcaatacggaacgcctctctcaggttctggatgtttttctccgcatcctctcgcagctctttctggctctccaagaaccctgtctgcccaatctcaccctgatccagctgtctctgcagatcgcctaacgcacggttcaagtccgcttcgaccagctgctccatcatcgccagagtctggttcatctcacgcaggcgagcagactccttggcggcccagatctgctgcttagcgcgcagcacggtcttcgacaagttctccgtttggcttgggggtttcttgcctggcagatcggtgtttctcacggccaggctcgcgcgatatgcatcgatggcgacatcggacgctttctgcggccgttggaggttcaggagcgcctgcgcaaggtagttgcaactcttcaggctgaacggcttcttttgtccgtagagttcaatggcggcgcgcgcatcgtgttcggcgccggcccaattctccagctttgatcgcgtgatggcgcggtttgcaaagtaggctgcctcgcgagggttctttgtgatcctgtaaatgcgtaccctctctttagttttcgcacactacagagaaagatttgtctgcattaattggactcacgcttgtgaatagtagttctccgcatcggtgtagttaccctccttgtaggctttgtcgccctgtctcttcaactcgtccgacattctggctagccgggttgcttcggaagggaagaaaaggaaagtccacacccgggttactcctttgaggcagcaaggagctgtgtcgaattgctcaacggattccgggaaagtggtggggcagttggtccaccgagccgggtatactccgagtattggatgtaggtagcctcagaagcgccagcacacgcactgcccaagattgatgccggggggacaatggatattgagacagtacaagtgtctctagacaatagtattttgatctgaatagtgtaaacgcagctaagccgatgacagttccgacgacagtccgacgctcgtatacagctattgtgaggatgccgcacacagaggcaggttcaaacaatcacagtcaagtgaaggtgtctgcctgtaagtttcaggagttcgaagcacgagggaaattgcgaaagccatcttctctgtgatcgggtgtggtgtttaatgtcttgccgtgaagctgggatcgaaagtaatcgatccccgcggaatctacatctgactcagcaatgctgtgaatctgcatttatacacaacaagtcgatcagcagaggatgaaacattttatttctatctctatccctgtagtttaaggtaatataggtaaataatcacaaaatcatttggcctgccaaattatcctgattgtgtggcatcgtggctcgtgtaaacattttcaaagaatcgtcgctgagaaagcacaacaagagctaggtcgggagtcggtctggcttgttccccacgcctggacgcttggtattcctcgaaggcccgtcgatgtatacgatgtcacgagcatcgccgactttccaaacatgtcccggtgacatggtcatacagagtcggtctcggtccgattgtatgctagtagaaaggtgggggccccgcctgagcctctctcgaccgtcgaaatccacatttacttcgcgaactcggcctcatagtccttgatagcctggaccttgggggcagaggaactgttgggatcgaacttgtaggtcacccactcgttggcgaggcgcttggccagctcgagaccgatcacgcgctggccgaagcagagcacctgggcgtcgttgctgaggatggcacgctcgacagagaaagagtcgtgggcagtgacggcgcgaatgccggggactttgttggcggagatggcaacacccagaccagtgccgcagatgaagaggccgcggtcagccttgccgtcccggatgagcttggctccctcgacggcagggtgagggtaggcagtcttgtcggaggtcgagttgacaccgacgtcgaggacctcgctgacattggggttcttggagaggacctccttgagggtctccttatagggctggccagcctcgtcggcggcgaagacgatgcggaggctctgagacattgtgaagtagttgaagtagttgaaggacgactggaattgataggaaattgatagtatcggtagagtatgtagcgaagatcaatggaagatatccgttcaaggaagatagaatagaatacactttagagagacggcgttaggagggaatgaagaggccttttatatcttgactggtctcagccgtctcactgataccacccccaactcgagcggagacgatagccaatgcctccaggttcaaatcggcggaaccaagcagtcaacatgcgatttttggtcgtctccacgttggcgtcatggctggctcggctggcacctcccaggcccagtttcatgtgtatttcttgggtggttggtgtgttctgattgattgtttggagatccactgctaacatctatgagggcggagattaacacgaaccgtcgcgagtaccttcatcttgctacaataacagccgccattatggcaaggttacaaagtaccatccaatcagtaaccaggcgctcggngcttttaggagcctggcgtcgaccttcgtctcttcaatcgcgccaccataccctcttgaatcgtccgtctatccttgacgcaggtggagcttgtttcgacagtctataagcaag

SEQ ID NO: 5415 - DNA, 1549 bp, Emericella nidulans
tgatctttgcaaaataaggcctaactggttataatatatagtcaaataaagcagaaattagtttattatttatagtagtatatgtaataaatagctaattatataatatttattctagatacctatatctataatagagctctatgatctatattagcttataatatataaggctataataatcttcttatatgacaatagattctttatatttctaggttgtagatgatttattgttatttataagtttataactagtaaatatttatctattatagctatttataactacttaagaagctatttagaaggccctagcctatctaattactatacataatattttactatttcttttctaatatattaataaagttactagcagagtaaaatttattataggaattatcctatattatatttttttgtaaaacagaatatgatttgattactctgataaagtaataataataatcattatagagagttatactgccgggaattagaaattattactctgcttaagggtggctatattaggcaagaatataatagaagactaaagaagcagtgacaagctattataaccataatattatataggattataatatacgcccttccccaggaaaagttaatatccttattaatatctatattttattggtttttatatcagttaataggttccttatatcaagtaaggtctttggcatctatatattaattatctattaagctatatttttctaaaaaaaaggtattaaagatattaggtctattagtaattcttgtagatatagtatttttttaataattttattttataataatcagagtataatcagagtctgcaggatattatttattatatataaaatagtttataaaataatttatatagtattgtacaagcttaagctagataattaagaaaactagataaattttaaatatattatagtagattaagtttataggcttgataactaatatacttaatagttttatctaggctagtattagcttgctaagttcttagtaagtattttcggtttttttagtaatagacttattaaactataggttggggcaggtttttaggcctagctgttctgcctacacagtttttggggtaggttacctgaacagtaaactgcccattggtttagcaaataattctaacccaaccccaataacccaaaatatcccagttatgcatatcaatactttaataagcggtaatctacatagctaatataatactgtattgaatactgtattataagccatctaagtaaaaaaatatgatctaaatacagtaatatgcctattcagatatcttggcaacccagcgggttgctccgccgggctttggggcagccaaaaatatccaaaacccaatggataattagaaggtctaacccaacccatatcttggcgtgtcgggacgggttggggcgggtttcgtgggttgggtttaacaagtctagaccaggatggaaatgtctctcatcttttaaaacaaaacttagaaaccaaacaataa

SEQ ID NO: 5416 - DNA, 3673 bp, Emericella nidulans
cagcccgaggaagggcggggaaaaatttggaagccatcgccgcgaaaggggggtgtgaaggagaattagaatgggattgatggtgttgaaggcgttgatgaggttgagttgggactccgaactctgaatctcgcggattgcggagctgcgattggccaatcaacggcgagagattactccgcccgcctctcctctaaagagccactgcatctttttctatagacctggtctggtatttgcaagcactcactgtcggtaaggagaccgccgctggtgattttgactgaaattctttgcgaatttatacaggctatatggccaaactcgctataatgggacatttgatacgctccaaaggtcaagggcattccttcactgaactcggcttgttctagtcggaatcgaatatattatcactctactctgatcagattatgtgctggagctggatgctgcaactagcttgatgccgcttcgatacactatcgtttcgattgaagggtagatccatctgcccattccatcgctattctaactcgtttatcgctaagcatgaaagtctacgtacaaagcttcgggctttccatccatatatttcttgtccaacgcccaaatacagggtaatcaggctccagtattgcctatgtgacgactacaagagctgcttttcatgccgatgatgtcagacacatcaggccaggtcttgtcgagtatgcgacgctgctcctggcacttgtcgttctcagaaaagaatgacctaggtcggaccaactgtccgttctgaaccgaaactctgtcatcgatgattagagaaaagaaagaaggaggaggtagtaaaagagcaattctctgcgagaatagccattgagagcggctaaggggatgcgctctccatcttacgggtctagctataagacaccctcaaacctcttgacacattcatcaatcctccacagcagctcgttcttcctttcctccccaatccaactccctttgacaccattttccgcaataagcctccagtccgccacgctcaggttaaaggccttctgcaccgacaacagcactccaggatataagccccaaagtacgctgggtcgtcgctgctgatgctgaacctcactccagcgtccaggaactttcgaatcttttcctcagccacagacttgacacacttcaattgcaagttcgataccggacaaacagtcaacagcacctcctccctcgcaactctctccatcagctctgggtcctccccaagccgaatcccatggtcaatccgcgtagcgcccatatccaatgctgcagcaatataagaagcatctccctcttctcccgcatgcgcagtcaagttgatgctcttctcctttgcaccgagataaataggcctgaacaaatccttcggcggtccgacttcactactcgaagccccaaggccatgaatgacgggattcctgccatccagccccaaatcaccctcgtttagcgctgtatcgtagagccgttgtgccgactccagcggcaaatgtttcagaaaacacataatcaacctcgtagagattcccagctccttctctgcccgcttacaaccgtccacatacccatcaacaataactctgtactccaacccccgctccatatgcacctgcgggtcaaaaaacacctcggtatggtgaacgccctccgcgtgtgcccgcttgaagtacgtccacgcaagctctgcaaagtcgctctgtgtcttgaggaccgtcatccctataaagtagaaagacaagaagtcgtcaagggagctgaaatgtccataccgcttgctgagggtttcaacagaggtataggctgggtttgaggacggagaggggagagatacattatttttgcgtgccatagaaaagatcagaggcggctcgagacagccttcgaggtgtacgtggtgttcgcactttgggagggagtgcaggaaggcgtgccattgggattggtaaggagtgtttgggggacacattctctcggcgtgattgctggtggttttagaagtaacttgttaagtggaagtgcaaatgtcgacagaaagaaatagaaagcccaaggaagatgtctatatatatactgggcagagtctccaagagtagagttctactccaacatccgggtaatgttcttcagccgtgatacaagcttatttcattagcccacgggcgcgtttctcgatcattgaaagccaatcaacgccctgcgtggtagcctaggacggtgtgagtcaaggaatcagagctggtgactcaaaattgaggaatgatataaaagacgggtgatatccgtggatcctccatttcgcaatatatccacatttatctgcaacggagaatgccgaagacggagaacgcagatggtcattacttctagattccacttataatgtggaagaaaacgtgataagaaaaggagaggattaggtaacccatgattcgtaaagactcgcctaacaccgccaagtagaaaaatgcctaaaacaagatcattggagatacgaccatacccagaatcccatctatttttttgtctacactttaaaggttgacccagctgcctttctaagtcgattcatcacagccgcagccaggtactcggtatcagaaactccctcgacataaataacatcaacttgcttctcatccatcgcccgcaaagccgcgaatagcccgcgtgcgatatccttgacgtctgtgcccagatgacagtcaaagacttcctttgtcttcccgccaacagggatggagaattggaccaggctgccgacaagtgacgcggttgccttcgccatcttctcaatatcctcctcaggtaagagctgaagcccgcgcttccaggtccgcgtccgcacaagaccaatggaatgtgcgccgacggcagtatcttgtagatctcgcttgacatgatccacgatcgcctgagactttgagccagcttcgaaaagaacgacgcgggctttcggcgagtagtgtctgtatttcatgccgggagcacgagggatctccttcacgtcgtacgtcccatcgtggtatgcaagctgtacattttcccacccaggacaagttcgcagttcttcaatactcacgccagcaggccgtaaaatgcacggcggatttgagagcccatctacggactgtactttccacgccagcaccgcgcggtccgccgtcaaggatcagctcaattcgaccctgcaaatcatggaacacatgctctgctgctgtgggcgacggcttcgtcgacgcattcgctgaaggcgcagcaagggtctatcggcaacgtgtatcaacagccttgctaacggcgacaaaggcatgcgcactccgaacgtcgtaagattagacgtaacctccggcgcaagacgcgagcccgacgggttcgggaggagaattgtaagtgggcccggccagaaccgttcgatcagggctttgtagatgggaggaattgtgctctgaacgactttcgtggggcaggaagtatccgaggcagggttcagcagccgattaagcatctgtaaagagtcgatatgtacaatgagcggattatccgatggcctttgcttcgccttgtatatgccctgtactgcatcacttcgcgtggcatcggcgcctagaccgtatactgtctctgtaggaaacgcaac

SEQ ID NO: 5417 - DNA, 6302 bp, Emericella nidulans
  unsure (1)..(6302): unsure at all n locations
agcctttggtcaacgaccaagatcgacactggtggcaccttgatacccaccaagcactagctaattatacgattgacatccagtctatcagtcagaacttagctctctgaagtggtcaccccttttggcccagtgggagtctaagatatttgttttgcggccgtgggacttgaggcggttgtctaaactagtagggctcttcctacaggttaagcccagcctataatacaagtatagctacaatcaaccagatgtagttcctatatcagcaggcagtaagcaggttttattagttttctactaaatctccttgtccctccctgattattaggccatctggttttattttcaagttctattcaagtactttcatagaataatccaaaaccagttatatccaagtagtaatgaagagtatgtagtgagcacttagagcttgacaccctcaaggcagggacatgtctatcaggattctgtgcgctctagtcgggggtgcatgattcatgatctgctaaccaggaaaacccaaagaaaatcccaaagaaaacgatttccatgctcgaacacagatgcagtgccgccatttttaaactggccgtcttggatgatgggctttatgtccgacaaggtgaaccttttgtttatggttgagggacacagctgccctaacccaccatataaatgtagagacgcaaaaacacctaaaaccgcgtataactccctcgttttggcgtcaccctcaacagaatcgcatcggtctcctgctccgtcccgactgccggttgcccacccgacgcttccaggccaaacgcaccgttcctctcctgatactgtagccggtaccgctgcgaggacccgaacatactcacgaggtgcctcttcgcaaagggcttcaatgccggcacgctcgcacacaggattcccgcattgacctctatatacgaccagtagaactgctcggtgatatcccacgtgtagtccttcgactccagagccgacagcatctggaccgtgcgctggatcgcaatcgcacagacgaacacacccgagctgaaaatcagcacgactgacacccgctgcgcaagacgcatgttcagtctcatgataacggggatcgggaggatgagggtgatgatgtccatgacgatgttggcgatgctgagaaccgtcatgatcgtgcgggtattgatgcaggagcccgtcgtgacggtgatgtcccagttcttggggatcgggttgcagcggaatatgaagaggaaggtgtatatgaggacgtagcaggtggagatccccattagtacgaacgtgagcgcgcggaaccagagctggggagagaggcgcagatagaaagctagaatggagagtttggacaggatcacggcccatgcgtagaagattgtcgctacgagggtccactgctccggtttagtacgcagacgtaggtgaatatgtatgagaggcactcacaattcccagaccagggttatactgcgccatagtgacgtcccacatgtgcaaaccgacaccagcttgcatgactatactcgacagtgtcagtcctcaatctagagacaatgcaaatcttgggcggacagactttcaaacgatattgggattagcatgatcgagcatactgccgcacagcaaacgaacgcatcgtcgatctggaaccgcgccgccgtgaggaagaagcgcgtatacagacggagcccgacgatggcgacggcaatcagcgccgtggtgatggcgcacgccgccatgttcggctggatggaatcaccgttgagccgttgacaccggctggcgggtcagccatgtagatggtctctgaagacgatgccatgatgaggagtattgggcctcacgcccgagcagggaaaggcgcagtctgcgaagggaggtcaagtaccgagacgggaagcttgggaaggggataaaggagagagatagatggaaggctcttggctactacatgatgaagccgtctactccgtaccaagtacttatatgagatctcaatggctacaagcaccatgcaggctaaacctgacctcacctaagcgaacggtatgtacggacttttcaaacgatgacgggaccactgttcggttattaatctgatagatacactggcgggtccggatcccagtctgcctgacacagatcggctgtcaatagacggtcggcgccgtccagctggctccactaaccagggtcgacctcttatacggggccggtggctccatggcttgccctagcgcggacgccttgcgcccctgaccggggtacgagggactaaagcacgagcttgcagagtacgaggcgctagcgggccgttcggcgcggcatcaggagcagaaggagcagcaaaagcaccactaggaatggcaccagtagcaagagcaggaaaagcatcagaaaagcaccaggcgagtgagcatggccaccatagcactgccggcgggcaccatcggctggaaagagcaggcagagcccagtaccggagcctcatccagacaacctgggccttgaacttgacaggacagagacagcggaccggtccaagcagcgggcccgggagaatggcagctgccgctatttggtgcagtcgttgggggccgtcgacccactaatcccctccttgcatgattcagtctttgcggatatgtacctatcaacgtcgtgccgtgtctccaagtaatctgcagcgcgttgattggcgtgccaacaggatcgggtcacttccgttccccctaggcagtaaggtactttgtctccaagccaagtcgtataccgtcaacggcaccagggagaaaaaatccgagtagcggggttgagggggtcgaggggcccgggctgccagtggtcttgtccacagccgttggagatgttgtccaaaggacctattaatatagccgtaacctctcctctggacctgaatgcattctcgccgcaccgtggcgatggcactcgaatcgattctttcgctgcctgcggctacgctcgcagcgggcgtggccgccctggtggccatgtactggctggcctcatatgcctacctctattggtttcatccgctgtccaagtacccggggccgccgctcgcagcggtctcagagctgtggtatgcgtcagcctggacgggcggactctggaaccgcaagatcgaggaggcgcatcgccggtacggggacattgtgcgcatcgcgccgaacgagctctcgtttgcgaccgcacaggcgtttcgcgatatctacggggcgccgtccaagactcgcaagctgttccccaagtccgaccggttctatgacaacgggcacccgaacatcgccttcgtgctggacccggaggagcacgcccgccagcacaagatcttcgcgccccagttccgcccctcggctgtgcgcacccaggagccgatcgtacacgcgcacgtcgacttctgggtggcccagatagcggcccgcggccgcagcggggccgtccctgtcgatgtctctaagtggttcgagtggttgacgtttgatatcatcggagaactcacctttggccagtcgttcaatgcgacccgcgacaacaagagccatccttgggtgtccatcctcctggacgcgacgtacagcggctccatcttcaacctgcgcaagcggctggcctttgtcggcccgctgctgcgctggatgccgtatatctcctcgaccgcgcgggcggccgttgagtccgtctcccagcatggcgccatgacgctcgccttcacgcgcaagcgcattgaatcagggcctgcacgtaacgatgtcgacgacttccttgcgcacgcgatccgtgccggtggcatgaccgacacagagctcgctgaccaggcgatggtcctgctcacggctggcgcggagaccagcgccacggcattgacagccacgctgtggtacctctcgcagccggcgcacgcacactgtctcgagcgcgtccgcaccagaggtgcgaggcgcttttgccagcccggccgacgttaccggtgacgccaccgcacggcttccctaccttaacgccgtgcttgaagagacaatgcggctgttccctccgtcgcccgtgggcccgccccgtatcagcccggccggcggcgagaccgtcgacggcaccttcgtcccaggcggagtgtatgtctcagccgacgtctggaccatccaccacgacgcacgcaccgttggcgcccgtccggacgcattcgagccagagcggtggtgcgacggccagaagccatacacggtgccctttagcatcgggccgcgcatgtgcattggcgtgactctggcgtgggtcgagatgcgcattgcattggccaaggcagtgctcgcgtttgactgggagttggcggaggacgctgttggtgggagcggggactgggtagaggaggctaggctcaagcagctgtggcagaaaccaccgctgatgatgcggtttcgaccgctggaggcgaaggcatgagtttacggattctgggagcagttatgttgtcattgcacccatattgcgaaccctaatgccaggcatactagcctgtatgcgtatttgcacgttttatttgtatctagccgagttgtttgtattgtaaagaaagtcatacagtcatacggtacgaagtacagtacgtgaatttcgctggtacggcaatacatatatccttgacctacctgccgcttaccaggaacgttggcaccagaccgtactccattgaagtaaggcaaaatacagcgagaataccattggagcgcaggtaatatgcagtgtctgttctccaggccgttcttccctgcttttgaaatcggatctcaaatcataagagagagttgggataacccaatagtgtcaaagcagtatatttgttagatagaaagcaatcgtgcagaccctacgttctctgcagccaagtcctatagagccacatttaactgagaaactggttgacatggagggtcataaaactctttaaccatgaatagagcactgattgttgtaaagatgaatcagccccaagtcaaaggaactaatgagaatttcatgccaggcccaaggccgtacgcgctttccgtggccagggtttcaattagtgctggacgactcccaagggttcaacgagggaataattggtgatgctactgctatattcatagagtctgttctccctttgacccgagcggcacatcagcagatattccggcaagatgccgatccgtcctcaagcaacgatgtctcccgcagggaccgagacttgcaggattcggatcgagagataaggacgcgccactgaaagcataaggatacggacgggggcaatggaaggctgattgccatgctcatgatacataattctggtgcaacctgcacctactaccatcagatgctcgcctggtaaacagcacctcatgttgcgtaaccctcgtccggggtcatcgggacacactcatcactcagcacccacccgccgctctccttgttccactgattcctcgtaaaccgcagaaatagctggtctggacttttcccccatcttggtatgtcatgttcatgcggccccaggatatgcggctgatcgcgcgggcgaaatacggcatagtgctgaatccgtgcttcttcaggtatgtgaggatccgtctttttgactgctgtcgttgcttctttcccctcgaagctatcgtacggggaagtcaaaagcgcccctccattctcgccctcgggcgacggtgttctcgaaggcaaatcccttgcaaacgcttcctcaagttctgcaattctgcccgcaagcgcaagtccaaccctgcgctttactgaacccctgcattgggggcgaaattctcagcagattcaatgcttttcgncttatcgcaggctcgcgacatgtcaatgcaatccaagaaaagtggcaagcccacaccaagctccaaagtgaagaccggctgggtcccgtccggctgcgtaggccttcaggggcgaactggctggtcaaaaatgtgcggaggagtgacatgcatttttaaaccagttgcttaaaggctgttcctagatgttgtaggccttggacactcggggacggcccatctatgtattttgctttgggggtgtgggctggaacccgggccttttggcttagcccgactcttttactgccatacgttttggttgggatgccttcttcttgaggattgttctcagcatttctgtgggttggaacattcatcacgaaaatattggtgttttattaatattatttttttttttttcttcaatcctctctttctttctctttt

SEQ ID NO: 5418 - DNA, 6146 bp, Emericella nidulans
gtttccaaaaacacgatacaccgcctcccgcaaccgaactatcagctgttatcgcaaagatctatgagcatcaacagctacagaactcgagtttgtgttcacaatggcctcttgggaggaatttgacgcgatattctacttcaataaaaacttcacatatgatggcaaggttattgaacagatcctctctaaccgccgtgcgctagacaaccgactcttcgccgacaggttacttgagctgctcggtgttcaagcaggtactctcttgtctgttggtttctgcatagtttcaattgctaatatctcaaattttcagttaccaagctatatcccccaatttcaaattctgaccttcgtaccctcatccgccacattgtatcctctgagctcgatgcccaccagaaacaaagcttaatttactatatcctaaaggactgccgagctcctagcgatgtcgctgctcaatttgcacgacgatgccatctaccagaaaagtacaggttgtttatagagggactttggaaccttgaccgactggaattcaaggtattcattttttatttcctttttcaggactgccgtttgtcagacagcaggatgctaatgaaggcatagcgcgcaattgagtatctcagcgaaccttccattatcccaacatttcctgatgagattctttacgcccttaccctttcgcatcttcccagacatgacgacagcctcgtcatggcctactatctcacagtcaacccccctttaacctcggagaaagctcagagagcgtttatggaaacactgtgtcgtgctagcattacagaggctttctatttcacccgaaaacatcacgaggctctccgtcaagcttatcttacacagctcattgagtttgtccatagaacagacgcaggccagatgagaagcagacgcgctatggaactgatcggtcttccttttgatgaccaagaggagcagtggtttgaggatgctttgcttcgtggaagcgcaaaaacactgcatggtgcgaaggacacggtaatggcgcggcgcctcgctactgggaaagtagcagggctgtctgcagagctggaatctttggacggaaaaaagatagatggcttgaattgggacttgctcaagcaaagcatgaaacctcctctaaattcagccgacagaggccaatcccaatgataaatgaaatgaacagtgaatggtaatgatagtgttatttgaagcgggcgttggctgggattttgcattatcttctcgtggaccatgtaataaaggcgcaaggtggtttgaaatgttacagctgtcaattcttgagagcaagcaactttcccatctttcgggcctccatcaccagtttgcttgagcaagaggtatcataattgaagggcatgggtttgtttgtattgaaaacaatcgtgatagtactacagaataagtcgtattgaaattaccgatattttacaattggctccagcattgcgcgcccatgtgacgtacgttaccgtcacataaacctatgagctgttcatcatcgaaggactttaatcaagcctcattttgagaggatcgctgagactttgacactcacaaatattgaaagcctcggaagcattgaaagcattggattttagtctttttgagatcttgaatggccacagactccaaagtgaactctgaaggaaatcctccgccagtgtagctttgtggcaggttgagtgaatatggttgtctgcacatatttccaacaaggccgatgcaaattcggaggtaagagctcttaaatcctactaattgcatagatttttaattgattactccagaccgttgcaagaatgagcaccctcgctcacaacagacattcactgggggcaaccggtttggcgcgctatcagcaggcggcggcttcaacagtatgcccaattcccccagagcacttggtttcttgagtttccccgcatgatatgagcattgttatcccgaagtggagtggtttcgattctgttgagggctccgctatgctcccatgtttcatcgaaatcacagcatatgcttagaataataagcgttcgtgctatgccgtccactgttactgatacttctaaaggtcgtggcttttcagggcaaaatcagcaatcaaaacaagagccagcaaagtatgtactatggaccaacgatattattctgtttgagctaaagtcattacagctacggcataaccacggccgatatcaaggccgatttgactgctggcgagggaagaccaatttgggtcttctcgtgttatggacctggaaaaaatgctccaagacaactgtttggaggcccgcaaagagaacagagctttgaagagctccgattgcggcactacgaagctgcagcagcagggaacccaggcccagcaatacaagaggctgaaaatatgtataatgaggccgtgaaccagatggaagttgtcttgaggaacctgaacgcagccttgaaatatgtggtcgacggagccaacgaacatccgaataggatcgatatcatcaagggcgacacaggctccggcgtggggcagacatcagcatttggacaatcttcaacacctgcatttcagggctccggtttcactcaacaagcacccagtcggcccgcgttcggccagccatcctttggtcagccgtctctaggacagccttctggtttcggccaaccgtctttcggacagccttctggcttcgggcaaccaagcgctctaggtgcatcgtctgggtttggtaagccggcatttggtcagcccagccaacccagctttggcaagccgagcctgggccaatccggtttcggtcagccatcgacgttgggaggctctggatttggccaagcctctgatactgcatcaccgttctcccagatctcggctacacctgccagcggcttcggcaatgcctccccatttgcacaagcaggttctggcttcgccaattcatcaactgccccagcgacgacaggtggctttggcgtgccttcacagccaaataatcccttcagtcagccctcggcaccatttggccaacctgtccaaccgacaaatccctccccgttcggtacaacaacccagcagccagcggcggcaccatcatcagccttcggacagcccgctggtggttcaatccaaatctctcagcctgcgtcctccgggccggtaggcgctggtccacctccgtttataagaattgagaaccccaacgaactcgcccctattccgcctttgagcggtccaacaacacacaaccctatgacgaagaagctacaaacatggaaggggcagcctgtgcagtatatcgacgatgtgccttgctacttgcatccgcaagaccgcaagacgtatgttcggattttcttccctgatggtcccccggacgctgccagtctacgagatgcacaggccgaaccggatcagtataccccagaggttacggagcagtatgaattcttcatcaagaacgggtatttcaaggatgggcttatcccaagagtacctcctaagacggaatgggttagttttgacttctagaactgaaaatcaaggcattaacctcggtttgcactatattcttttatctttctttctgttagccgagggtgcactggctttgtagaataccagatataatgcggtcaagtgttctactcttctctaccaggctctacaatagttaagtcacaatacgaaagcgataggagctatatatagtatacgctttgcaactcttccatttttatgactgtttttaacgggtatcgaagtcgacccagcgttgctagatcttctgcaagcccatcgacaaccacaccgtcatgaacccagctaagggttgatgcgggcgccagttcatttcccctccttccagagtggaatatgaactattttaggcggcaatggtaacctcaacctcaacaccagcctcgatgttgatgatgatctgcttaacggtctcagtgggagcgaggaggctgtactttatgattagtattgtttccatcattcatttttctcatgaagctcgtggctccagagtaagggccggaggtacatactcgatgagacgcttgtggatgcgcatctcatacttgtcccaggtcttggaaccctcaccgttgggggtcttacgggtggagatgtgcagggtcttggtgggaagacggacggggcccttgacctgaagggacttggagcgggcacgctcgatcagagcagcgcacacagactcgagagaggcaaccttgcgggaggtgagggtgatacggattttgtggaccttctatatgcaggaagaccgattgttagcacaatagagtcgcagtcggcattgaccagcgcgaccacttagaggaattgacaacgtacagggccctcgccgaagtccttctcctgcttgtaagacatgttgacggtgagttggtgagtgagaccgggtttgagatgctgaggaccagttagcttgtggtagcgggtgaattggattgaggaatggacatactgcagatgaggctggatgccaatcaagacctgaacttcgaggctcggtaaggtgatgatggccgttaagctcaggatgttgctgtcgatgtggatgcgatcaaaaaatcgactttttcttgattcggccaatttcttgtgcggagggattcttggcgctcgcctatctggagctaactcgattagagtagcttggtaagaataccgtaccgtatcaatcttcaggcaaatgactctcactcaggacattccgcggggtggactggagctgagacatatacaaagacgtacttacacctggtttctttatattggtataagcagactgcggccttcagtcaggctctggtgtcattaaggcggggtgctgactcgatacgaagccaggcggcaccactaccatttcggacaggtggactctacctgattgactccgtccttgattatacaacgaagatgaatcattatgactgtgaagggagatcggatatgaaagtgacggcctcatcctccattttcacaattcttgatacgcaatcttacagctcctcaccttgaaccgtgttcaacatggcgacgttaccgcctttagctccacttcctccgccagaggtgcagaggtccatacacttgggagaatgggagctctacctagatgcatggatcctgttgcttgaagctcgtttagagacttcggagtctgagttcaaggcatcggcgctgaatgatgaatctgctgtacctttcttgacatcattctaccaccagctcgccgcatctggaggccatgcttttcaatctggagaaaagagtcgaacattaagaaaactcacctttctcttaacgaggagactcgttctggagatcactccacaccgtcggagcttttggaatggacttacctcagtgaaatgggtgctgctatccctcaagctcggcgctgaaagagcttctgtctgatgcctggaataagcatgagaatgtgatcacgtcgagtcttgagaagggaaaagcccagatcatcgtacaactatcctccacgaactccgatagcatctccagagccgtctccaatatccggctgctgaccatcttggtgtcttcactcccagactgtgggcatgtcctcatggccggctctgactttttggatattcttgcggaaacatatcagacgcatgaatcagaggacattcgcaagtctctggttgccaatgtctatgttggcttaacctcgttattgaagggcgcaaggccaaaccttactcttttgttggatcaattatttggcctaaaagccagcatcggcgtcggcacgcccaaagtgaagagggagcctacgctcttgtcagacgttatctgcagctcagatttcctatcccggctcgaaagatttttggtcatgcagccccagaaacggggacaagacctcgtcttaagcctccgcgcatatcatactgattcgagaccattccatcaccggtatcagataccacagaaacgagtgaataaaggaaaaggccgagtctcggatttccctgtaccagacgatgtgcatgctcataggatgtctctagtcagccaaattcaagatctctttcccgacctcggctct

SEQ ID NO: 5419 - DNA, 5787 bp, Emericella nidulans
ataagtttggaaatataaccgctcaacgcattaatactcaattcacttatcatatgtttcctaagctagatatgagtaggcatggttttttttatgatacgttccaataccattctttaacgccttattgtctcgttccatcgtgaatgcacaataaacggtgctgctgtacctgctctaccaaagagttggagtccctcaaaacatctattcaactcgagccctcgaagataccttcgaactcccaatcccaacccttcttcccttgcccatcccctgacctctcgtcttcaactctacgaatcccaactctttcagccgcaacgtaaggagcgatgaatcccgcatcccagggaagtctttggccgcacacacgcggaacggttcagaccagacttccgcaagaataggcatggactgccccgtgtcttctatggatccccaattcattagtcggaactgcagacggtacagccctgctgtgcgcacagataggtcggagaatatgaagaagcatgccggtggttttggtaagggtctgttgcggaatctgtgcgtgacggttcgaggactggcatcgtatgtgctgtcatctgtactggaggggtgagctggtgcggtgttggggtctggttcctcatctacaaagaagggggagacaaatgcttttcctgagaggagcggagtcgattggcccgtggcgtggctgtcttctaggttgataccgagttgagaatacgaactcatagattcatggcgggacttgtcattggagtatgtgttcgtgtccgatgagcctgcgcctgagcctgaacccggtagataggaaggattccggacagggtacagaagacatccaacagtaaaccgcggatcttgaaggatagatctgtccttttcagaattggggttgaactctgtgaggagtaattgaatgattggaggcgggtcaactggccgtcggtctctatcgccagcaccgcaggcgcgtgcggctaggggttgttgtcttatgaagaggcggtagcgggagaaggagcttgcgcatcgtggtggaggggacggtgatgttgaatggtgatgaagcagattctcaaaccccgacggcatgctggatgtggtatgtcgctggtgaatgggtaactgctgctggtagcctgaaatcggcgctattgctggatagatggggctactgtcggagtgaacggggctaggaaacgccgttgtagagccactatatctgaagaccacatgttagacccgcggcccacaagattgaagacgtagcacgctgcacgctgctaattctatccagcagagagcaaagaaagagagaaaatggagtattatggtagtccctttcgggcttctagaccaaagagatgtaagagaaggggcaattactgcgagtccaagtcgttcattcgaccaatagagcccacggaaccgcggctacaacttggagcatcatagtacgagcttgaagagcctgcattttccatgttcctcgatgtgctcggccgctgaatactatactgtgccaaagaacccgtagttgctggaagaggcccatacttgggatcgcttctgttgtccagaacccgattttgttctggaaatccctgtaccggaagcgtggaataagttgcactttgcgacattgtcggcgcgttattctgggctgtaggcaggaggaaacgaggtggctcctgtgctaggtatcgagggtttgagactgttgtctgcctccgacgatcttcatcggacggatgggttctggcgttggtatatctaccctccgtaacatatgtccattgttgaaacggcgtcccagacatctggcaagaactcgcttcacaagtctgaacagcttctcccgcaatcagcgcagatatctgcccggtttgatgcaagagtgtagtctgagggcccacgtgggtggtcattaagaagtcaagaagcggtcaatgataaccagtaagggtcactgaaaggatgagtcggccccctcggagaatcggtcaacaagcacaagggcaaggtttcaggtgatacggagggctgatggcggatagccagcagggcgactgctctcaagtgatggacgactatgaaggcactatactgtgtcctgagtgcccgtatggccggagtagcattatccacccagagtgacggttctaaccagggggtattgacatgcatgcggtcgttgggtgcttataatatggcacctctatcaccaaccaattgccgtgtacgagatatcaggaatggggaaagtgcgccatcgcaggcccagcgaatataggtggtcaaataccgaaaagtgctatactgaaatggcaaagctgaaaagttgagggagtgtttgaagattgacgattaccggcgccgtctaagaggaaacgggatgcagtgaggggctatcacaccctgccacagttagtctcaacagttgtagtcgtaaagggaaaataaaggagagaaaagaggcggatctggggaagcaaagtgtgaaaggattagcgaagagtgtgcgtgtctgctgcatacataggtgtgtggcattgcccgagcccacattcagcggtaacatggcgtatcaactatatcctcgacccaagatcagcccctctttaccttgccagtctactcctgactagggatctatgtggccccaaatcctcgtgcatgtcgtacggtactttactaaggctcggcttagcttctgccgtccggcaggactggactcccacttcccgtcggagacgaccgatgctaattgcgatgcaggtctgacgttgtgggaatacagccctgaaccatgcagttgcaggtgaagttccagcggcaattgtcaaagccacatccaattctcattggaacgagacccctagtcccgctaaaacggccagaaaatggctaaaaggcgcaagcgttcttgtagttccatcgaatgttgtcacgtcaacttgtgccgcttctgctgcatatacaagctgcaagcacacttcgctcacgcgggactcagtatatgattcgccactgcttttgatttctcccacatgcaggtgctcgaaagttgagaggctgacccaaccaggcgaaggtccaacagcaggggttggaggtctgcttagttcaaggaaaaagcaatgagcgagaaaagtgcactgtgaaatcatgtggatgaggaaggtgagaacagtcgccagtttgtcaagcgcagacttagtattgtgcacggatcacctaaggattgcggtatcagagctacaatctgtgctctgtagatcttgcgggggcttttattgagctcccaacgggcgccccgaagaaaagtggcgggctgaagaccctggaatggccaactctcataatctggttcggatcatgcagacagcctgtcatctagaaccaagtatggaatagacctgtgtgcccgtcgtgccgatttgaaataatcatgcttagatcatttgtccgggttaaacttctaaccgcgagaatgataaatccccaaacctggtccatggctaggtaggctccgtactggaaggccctagggaagtgccttgatgtgagtgctcatctttccaatgatgaacctgattctaaaccgctaagtgtatgtaattctaggtcgtgtaaaggatggtgaaaacgatgtcctaaaagcagtcactgattccgcgtagaattcgacccagtcaatgtttgataatacatcctagtcgaatctctaacctggacgcataagcctccttattgctaagccccatgattgtttataccgactttgacttgacggaaggtacgtccggggcaacgcctatgcaacggaccctaaaaataagggctgatggcgtggggagctaatctcggatctgcgcggttcagccagcatccttgtgtggtattgatccttcacaataagttacagactagtattggctggaccgcagagttgccgcggaagaggtacagtgatgcttaccgtatcacatccacggagttcccgtaaggagggtaagtgtggcattatgctattgcggagaaggcaatggaggccggctatgcattagcaccagcagaagccttcctcgcattcgtggacgagccactagcttgtgagttgacctccacggctgatgtatcaactcaggtatcaagagacatcccaatgtcggtccgttcgagagcgagctttcgagtggccaacgaagggcagaagagaggcaccatcatgctggaacctcccacaaacttcagcgtttgaccgctaaaacggttcaatcactaccagcacttgagagaagacgggtagttcctggtagcgttgcggaaagttcaagccctgttcccggaacccgcgtgggccccgcggatgaggcacgatgctgacctttcgagctctcgactctgttctaattgtcagttttatggccaatcacatttcaaaattggcaatttaaaacagctaccttgaatgattctgccgatgaatttttgtccctgaaggctggagcgagcgttgaaacaggctaaccgccgagatctccagcatacgatatcttgatttgacgacgaagaaatgttgaaatactggtttgtctagggctttgtcgaaggtaatttgtcatttgctagtctttggcgatacggccatctgttagcgttgtcaacgaaaggaaccattgaggcttaacctgctaagttgacgatgcaactaactcactagtgctagcaccattgagggagaggcaatgccaatccttttccgaggctgctgcgatggttctagagcccgagagcctaaggggttcgcgggagaaaggtccaatagtttcagatggggaggttgacaaacggaagatattaatagaaagctggtggttgactggtcaagtgactcgagctgcctcgacctacatcgcaaactgctccttctgctcactaatgaacccctcctagctttgaaacaccaatggtcttattcataacgtgtacatcggctgtcgcctgtatatactagtaatcaacatttctcttactcccaccctacaaagcagccagcgcctcctccaggttaatcaagctcacagtaaccttattctcttctcccagaagcacaccgccaccgtgcagcaacaggaatcggggatcctccttgagaatgcgcagactcctagtgtagctgtgtggttcaggagtaggcacctccgtccactcgccctcacccagcgcctggttcacaaagatactgtcttgcgtaccagaactgaccacaagtgttccattcttgccaccccacggggtccaagtaacgtacggagaggaggtagggatcgtaccgctcgagacaaccagctcatggtgctcggcatcgatgaagccctctggatcggcactgatgcggtagtacaagggaaacgagtaggtcgatgtgttgaaaaatgagccgtattcgtaaacgtagaagtatttaccattgggaagcttactcaagttagtcaaggaggatacgagagtgaacgaggttataccttggtcacgacaggcattccaggcctatctgtataagtaggataggcactagcatagacaagttagtcggaccctctttgcgatggcagggaagtcatacacgtcgtccacaaccggtccccagttgataaggtcatcagtggtctggtggaccatcttttggccgtgggtttcattggccctttggtcggaatagagcagatcaatttacctttactgttttcgcagacacaacga

SEQ ID NO: 5420 - DNA, 2890 bp, Emericella nidulans
cccctgcgctccgctcctccctccagggggatttattccggcaccataagcctaatttctcgcagagtcatagatcttttgaagatggctcagcccccgaaattccgcattctctccccagaatctgctctacgacgcgcccggccagacccgtcctctacgccctcacaatcccaagctcccttccaatcgcccacaacgtcacattcgccccctaccacaaccacagcgacaagcagcagcacgccaaaatctactcccaacccccgatcctcattctctcccttttcccgcctcagaaactactattcaacccttccgcgccccttccgtcttgccttccgtactataggcgcagtcgcgcccatcgtccccatcggcctatacttctccgaatacgttggccaactcctcctggtcaacggaccttccatgacaccatacttaaatgaagactacgatattatgcacacaaagaaggatattgttctagtcaaaatgtggcctggtctttcggcgttccgctggggtcagaggaagatgcgcattgagcggggaatgctcgttttgtttccgtatgtgccctgtctcacctcacatactctatctagaattatggctgaacggttctgatgctaattgtgtgatatcgtaggtcacccgggaatccagacaacgtcgccataaaacgtgtcatcggactccccggggacagaatcacaacacgcgagccctgcgcaaagccctcgcagattgtccccttcaaccacgtctgggtggaaggcgacaaccccaagaagtcgctcgacagcaacacatacggaccggtcagtatatcattgatctcggggcgcgtgatggcggttgtttggccaaggttccggtggttaaattgggaggagtgggagagtggagatgtggacggcggacggtttggggaagggtacctggcagaggtgagggagagggttgagaaaggggctgtagagcttcagaagccgttcttgatctgattatgtagactacgagtatccatattatgtagtgttgagaagggcttttctatcccgtgaagagggtaattatactgtataattagtgagtattgtacgtgtttagcatttctgcagaccagatcctcatgatatcaaaatatgtacactttagatgaatgaaaagctaagacgaggtcaacctgacatcttcagccttcccctcctgtaagcgattaatctcagatgcaatacacaacacccaccgatccttctccactcgactcctcgccttgaatacaattgttctaccatgcacccccagcttcgacacctgcttcagtgtctgtcgtgtcttcaccctcccaccgccatgtccatcgccactctctccgccctccacctcgcgctctcttgcccggaaaagccccttccggaggggctgccaaatcacaaatgtgattgccgtgtcctcatcgctacttgtgtacatatccgaggaaagatacactcgtggcaaggccccatgacccggatgattactgtcgaacgtctggttagaataaagcaggtcattctctgcgatgaggccagagtagatgtagcagttttcgaggtcgatggtggactcaagcgtagagtggacatggggcacttcggcgccgttgtacttgcggagggagctgtggtacacaaggagctttccggccgtgaggatgacatggaaccgcttaaaggttgcatggcgtcggggtttcttatacagcaggccagacatctccatggaaaggttagggctagtctatggtaagggttcattgcgtttgttgtaaggacgtacctttattggccggcagccaattaaggagcacatattatgcaggagaggagaggcttctgccttcctgacctcccacttcttcgcgtactgccctatcaccgactctagctcttcgtccatacccagaagttcgaggtttcgctgccgagtgttcttgagctcggcagcatctgcgacaattcttgccttccaatattgaaccaaggcgtctaatctctgcatccactcatcccttgttgcgctattatatgcctggaagcgcacaactagaccattgtcaaggagcatttcaaatccggcgttgtcagtagactgctcgccaacattaccggcttgcaactgcgatgggtcatttggctgcgtaatcccacgatcgcatgtctcccgggtatttgaagcagatgagaaatcatccggaatagagcgtacctcttgcaccagacacaggttgatgaatccgtcggcattgctgagattgtggatgtccctttgaaactgagcatatgcttcctcatcgcgacgcttctgatgttcggtatttccaatggacaaccaggatatttgcccgtcctgcaaaggaaaaggatctatctcgtacgagagaggggccttgtccaatatttcctgagtagatggtataccggagtccagagcgcttagccatggtggtgtaggaggaagggcctgtgatggcttgcagaaaaacaggtaatgatcttgactgaaaaagtaaagacgtttggaaaacatcctgttcatccgctggtgagctcctgtctgagaggtaagtcgaatcaagaaaccttctactggagcgggctcttccttcttctttgctccatatccaacggaagtgtcatagtgctgtttcggtcgtagctcaagttcgtgtgttccctgcattccgactgagccatacatgtctttctcattaactccatatatccattctagtcgatcatatcgtttccaagccagtccgagcttttccgtactcgtccatctcttcataaccgctgaccactctgggcgatcctccagcatcgtcaagcagcct

SEQ ID NO: 5421 - DNA, 1615 bp, Emericella nidulans
accgaactcgtagcttgtatggtggcaggtattgggtaatggcggtccagatatcaggggcacactcgcacaccttttgcctcttccactccctaaagtagcccctcgtgcagaagttgagcatttcacatcccggttgcaccatggccaataattacgcccacaggccggggttttattaaaaaataaatcagtaattggacaaaactcagtaggcccgcggtgctgaatgtactgtagtgtgatgctgaccgtaaagccctccttgtctggcaacttggcttgctctccgcctacgcccgcttccatctatcgacattgcgccatcacctttaataagaacggcttttgtgggtgcgttgcctccatcgatcttttagtctggaggatggctgaacactgtctatctggctatacctgatgcaatgtcaccgacagtcgtggttccacttgtaggtgaggctggggtagacaatggaagtcacaatatatacttcgaatatcagagacgcacacacttgacgtgaatagtgactagtgccacggccggccaccacgggcagtgtaatcatctgctaagcagcagcgtacctcgatatataccagtagtcagaaaagtgccatgggggcaaagcgacccgtgcgagccctacgattgaccgcgttacagtagcactacccgcataacaaaatcacctccccaacggcgaatattggagctggcttgcatttgaaacgataccgtgctctagtacacagctgacaacagataaaggatgagtgagtagccgaagtatacgcgcggtaatagtatctacaacgggcacggcagaccattcagacggacatgggatacaggaggttatgagcccagagtgtctatctcaaaaaaaggtatgttcattggtggcctcggacacctcctaagtaagagctgagaatgaacgatgattggagcggttacagtgagtatgaccacaccacaggcatcacaatgttcttgatgggctatgctggagcagaaggcttgtgacttggatacaaaacacggaagttctcttttttttaaatacgcatatgttatttaagtaaaaagctttattttaacaagtcagcatgttagctcagggggagagcgccgtgctcataacccggaggaccctggatcgaaaccaggacatgctaagttacttctttttttctttttttctttttttttccctttctggggttatacacattttatctaaatttttatcaatattttatattgtttcttttttatctactcctttaaccacccacaccattagtatcttggactttcctgaggttctccaattgtttagaataaattgtcttctgtcgtccccttttatgttgaagccgagattcgaccgatactcggctctccggggaagctcatctgtgcaacgactttccgctccccacctgtggcgcagtgcgccacaccagacatgtgactgcgacagttgtgacctcatctgatcgtggctgatcatcagtgagataggcatctatcttcgtcattctttttttccacctttgctcctcaagttccatccttgggtagataaaatataacttcgggctt

SEQ ID NO: 5422 - DNA, 6562 bp, Emericella nidulans
cccccggagagtctctttacctttcaacggacaagtgcatcaaggaagcgcgggagtgtgtggagaagaagctcggtgggcttgtcctgtgtcgggttctttaatgatctgttggaagggatagactcgctaagatattgtttccgcgggtgttgtacgatgggtttgcattatatccggagtttggtcagtcgcgtttctcatgtcttcctgtgcgactcttgggataaacagctactgtgtatattaacctatgtaacttcatgtacttttcttcgttctgatccccagtgtttctgtcatggacctgatcgaagcttgagttgatgagcggcttggctggcatgctcggtcttgtgatcatggcacgagcaccccgtatctttcccagtttctccctctttcttctcactgcgcagttgaatcgacagccagtttcaaaccacctttcactttgtacccttgattgttttcttaggtggctagctccctacgtgagatactagagtctccaacgcagtctagcgagggctggcggctagaatgatgattcgagtccttcgacctacgggtagagacagccgcagataatgggacgtggcccgtctcctgcatactgagatcccttgaatggataaaaactcaccttatatcagcaacgtcgtcaactcaagcgggactggtcgttggagcagccaagccgacgcattcgcgagcggcacccagatgtgccattactctccttgaatcgcatccttcaggcctagcgaatgtcgtggcggacactgctgccttcactaagcggacattaccgcccggtggagttacgagagcgttgcagcagacacgccggagctggtcatatgcgccggcattgttccagaccttgctggaagggtggatggagactaggaagcacgtatagcgaggcaatgtcaaaggtacaaggacatgttcgacgctgtaaagagaagtgggtcgaaaaccattctctacacaaatacctgctcgttatgacggattacctgggagccttcagcccaatatcgacgagcgctggctcgcccttcgtacgccctctgctaccgtgaatctaggtgtggagtcagtgttatttgtcatgtcccacatccgtggcgagcctttctgaattgctgagggtgctgcggatcaactgttaggctgctgctaagggtttgatccctccggtatccaagagatgaaatgcctacggagtaaatgcgctctccgacatttgatcctttctggacctggcgactaccaactagtccccgcattccatgcatgtctcgcaaaaaaggaaatgctgttgtgaaagagacagattgattccataaaatgtcccgtacgtcacaaaggtcgcatacgcggatatcctggcggccgaagtctgacgtcctcgagaactgcctctgggaagctttcttcatccaggactatcatccaggactatagattcatcactctcagggaactttggttcgcaaaatgggcccatttggccgcactccgccattcgagatccacattcccacacagtcggtttgctttgctgggctggtcgtctctgagacattgacgcgggtctaggggcaagcgacaaatctcagtcgggatagtctgaaggatgcatgtgctgtcagattgcggatacaactggagaaaaggccaggcccatcttggggaacgaggcgcatgttagcgtggaagacggaatccgcataagttgcgaggtacatttccagatttgcactaggttctttcgagtttctattgatgttgttaacctaggactatacccgcccactacggtgtcgccatgaagcacagggaagaatgatgattgacttgcacttttgcgccgtctaatgctccaactataggcggtgcatgtcagaaacgccaattcccatgaaactacacattcctagcgtgttcaaagacgaatgcccatgggcaacgcaccagggtctttagagaagcagccacgcagcgcaatggcatcgagtatgtttggaggaatgtcatttcttatcaccgggtctgtgcctggcccaagaagtggttggagttcctcttgccagcaacccataacaccgtatcagtaatagggattatgagccatagttaacatgctttggaagttatcatctcatggttctcgtcgcctcaacactcctttgcttctttgcttttcgttccattatcctcttggtttgacgatccttctatatatgttatgggtcattagaccctcattgatcgaactttatcagttacatatcaaatgtggggtaataagaggtgacatgactgctttactggagtatgtgtataactaatccgctcggcattgcccgcctctgtccatggggctcgatatatctcattagtattggtaacctaccaagttatcaataaatgtgggagtctttgccttcacagaagattcgattacctgtgaagtataacagactgggtgctgaaggaaacaaacacgtgaagccctggcccggtataacatcatccttgcccgatattcaagttgtttagattccgtctcagctcgccactccccagtaatgcataacgaaagccattctatttgggtactgtaagttattctatgagcttgcagggatttcagacctcttgttgctcacaaattcgtgatataatggtacgagacctatcaaaaccgtattcttggtgatggtcagtaccaagccagaatgctgcgcagattgctacgtgatgaggaggattgcgcaagggccttgctataggcgacctagagagtcgacttcctcataagggccaccggttctcctgatctcttgcgcagaatcagactcctcaacaaattcgaaccaaacggtccttttatatctctctaccagtcaagcaaatcgctgagcaatccttggctccaccccagaatggttgacgcagtcttctaccacaagggcatcaagcaggcctacttctttggcggccgcggccgctacgcccgcatcgacttcgtccctggaagcgcaggcggaaagatcaccttcggcctagccgccatcgctgatcactggccctctctcaaatctatcggcttcggcactgtcgacgccatcctccccatcgacggcagccaagatgaaggctactacttctctggggcgcacttcgcccgcatcaagctcgttccgtcctcagacgacgatactttcgtcgatggtccctgggtcatcacgcagaagttggcgagcctcaacaaggcagggttcgacaccatcgacgcacccttcctgctcccggggtttctggtgaaacgtacatctttcgaggcgtgtattatgtgcgaataaacgttgacaaggacataatcgtgcatggccctgcaaaactcgatgcagaatggcctagtttgaccgaggccgattcgacactgttgatgcagcgtttcctgagccgggaagtacaaacggcactgcgtacttccttagaggagatcagtatgtaaaaatacgtgtcgttgcgagcgctccgaatacgactgtttacgggcgaagttaatcaaggatcactggaagactctagactggatctaggtagcctgggtctgctctgtacccgatggaaggaaagtgacttgctgagtgactgatatttgacacagtagagcttcttatttggctcatagtctagctggcataagttatttgtcgtagtatgcgcttaaccgagtctattcttaatacaccgtccatcattggtacacctgggactcttgatttgctgatagacttacgtgcaagacataagtaagcgtaaaaaaggcagagctactacgttgacaccactccaggcggtagagcaattgcatgtctatgtgttcgtagtctatgtctctgcgtgtgaaggttatagcttactataatattatatcacgtgactggatgaagatcggccttgatgcccccgccaggtgccccaactccaccttcaactgcccacgatacagatgcgcaatcagcattgttgcacccatcaccagggcaatgttcaagcaggcagcagaaagacaattgggccgttacttttccctcatgcgttcatggtgatttggctcgttctcgaacccagcctgggactttgggcaacaacacatgcagccatatgtctgcccaactctccagaaggggctctatgacccccagcagagccaggcaatgaagatctcaggattttactgcctgggccaatgggtgagcaggcttgtcttggtggcttctgctggggttcacggctgctgatcgttcaacctgcttcccagcagaagatgtcgagcccgtgtcttttgtccaacgctgtctgtccaacgacggcgcctcgtgtttgagaaacgccaaatggaccagagactgctggatgataattcaccaagcttgtgaagacctgctaccgctcaccagtctgctgtagccatacgtcgtgggcgtcgagccatgcagagtatcgaatactcttggccactagaaacctcgcaccccaggccatcagattacagaaaacagtcactcctgagtcagtggctgcaaatgatttgtcgacttcagtgctgatattcggctgtcacttgcgcaatgcccaatggtatccgacttcgtcagccatctcatgccgttcagcgtcgcggaaaaccatggacgtcgctggtaggccactccagattgagaaatcaccggaatacctcaatgtgatttgagacctgacagatcttgatgaggccaagccctcaagattggaaggacgctgccgtgcctacgtctagcgggtgcatgcgccctgccgacttctgccattgctgcccaaagccctaaaccatccatctcgacccttgcttctcctcattactcttcatttgaggataggatcagcttaccaacgatggccacgttcatcttgcgggggcgagattttggtgtttcttgagccatccatgccaaatcgcgctcaatggccgccgcagctatccacctgatagatagcgggacacgaagggtaagggagtctcgccggagagatttactatggctttattgcgatgattgctcgatctccaatgtcatcttgtcgtgaccgccgcctgttgaatctactcccaccctgctagtgtcgacccactgggccgtggagactgaccctagactccgctgaccatcgtgtacgactccatagaccaggcgcttttgatgcccggctacttccttgcccgaatcgagattctcctctagcctgtctctgtccgggtatcctggtgagtggctacgggtagcaccccacccttccctcacactttgcgggtcttaaaacagaagagcttatctgccgcttcgacagttttgtgcccgtgccctgaatgttacatatatgcctcgaagccgtgccaatccagtgatttatttttgtctgatacacatattgtagccaaggcgccttttatagagcaggacagactcgaattttttctttcttttattatattaagcctttgcttccactggtacatctcatatttcctcgccaccttctctatgtactttcagcacatgcctctcgttcttcaccccccagtgtccgcaatgtcgtcgtacttttccagttcaagcacaggcagcagcacctacgcgaattcaatgagtaccgactcagatacctggtctcgtcataggttagcttcaactggaatctgttttccatgtcttgccttttcctttgtgttgtcctgattcttcagcttgcatcctggatgagactcaccttaaacagtgcgatgatcccacgtcagccgccgatatatgggacctctggcgaatctccggtgatctaccagccaaggtattattactgtttgccatctctgatctccgtcttggaaggcacgatgctaaagtccttatagcacaaaaccttttccgtccccaccaaggcttgaaccaggctcgatacactcgcaaatcccaacgtcaaggccaccaaaacttgcaccgcctgattttgacttctctttccctcgtgggtctatcccagtgtcttcaccgggaaccatgtctctctccccaagaggacccttgccacccccaacgccaatgtatcgagagttgaatcaccctgctcgcctcccagtcgactctcttgcacgggattacggttttgagaggccatctgagagtgcggagtacctcattgaacggaaaggtcgccgtaccgcagacaagtacaaaggaaccgttcgatatcactcgcagagacgttcctcgaaccgtgacgagtttgatggacctcatcagttcctagacccgccctctccgcaagtgattgcggaacaaggacgagatttaccccatcttcctactaatcttgatgtctcagaacaagatcgaatcttggccttggtgaacgaccggctttcacagtgggcgtttgatttcttgggaagtcccgatccccattccgatcggccagacagagagagtgagggtccatc

SEQ ID NO: 5423 - DNA, 5525 bp, Emericella nidulans
atataaggagacgttcatgcggtgggtgacgattttgatctgctcccatagaggcatcgagaactcgaatccgtcatcatgtgtcccggggggcttagaggctgcgtcggcgatcatatcctccagatccttgatcattttagcattctccggtgattcaagccagatctggtgccagtcgttgtccttcacctctgggatagcgccagtgacaacgtcaatcatgaactcggccgggttggcctcgacaggacactgtgcgccatatttgccaaagtactgcttgattgtgcgtccgttctcgccaatgtctccaaagtacacggtcttaccacccctcgccagtagaaggagagtgtcgaactcggcgaagagctgggcggacggttgatggatagtaaccaggatagcttgcccaatatctgcaagttttctcaggaatcggactgtattataggccgactgcccgtcaagcccagaggtaggttcatctaagaagatcaagatgctgggtttcgcaacaagttcaacaccaattgtgacacgctttctctgctcgacgctgatgccgtttccaacccccccaatcaaggtatctgccagatcctgaagctcaaggagattgatgatggtgtcaacgtatttcaacttttcctcttctgggggtggtcctaggttgacgaagcaaggcagaaaactccaatgcttctcggacagtagcatattcctcgtgtatgtccaattgctcacagtatccagcagatcgctggaaggaaacagggagaggtcttccgtccaccatgatagagcctttgatagtaccgtcggtcttgcgctgcgccaaaacatccagtagcgtcgttttgcctgcaccagacgatcccatgagagcacccagcattccgggctttacatagccattgaccttgtccaagagcacacgttcaccggtaggggtgtttacagtatatgtcaaattctgccaggtgaagatagacgtgttgcgcgagatattcccttcatccagcgatgtatcaccaccgtctcgggcggtggctgctccaacctgcgactgggactcttcatccttgtgtctttgatgctgcttgatcttctctcggggcacgaagagggtcgaaccgctgccagcccctgcattccagaaggtagtgaaaatgatcgtcaaaccggcaaaggggccccagagaaacccaggccacagccgtagttcgccaaagctgcgtaaatttgtagtgtaaggagccgatatactgatcctccagtaacataagcagcaccagggagtgcaccgccaactccagcgcaggcttggtggccggcacccagcgtcttcgtatccagggccgcttggtataaggttttcgccgacgcaagcgatgtgctgatcgtgaaattcattggagagggcagcttgaaaggcgtaggcgaacggattagtgtagtataattcgacgaaccagttcctgacatcaggcttgggaatcatgtaaccggcgtacatgacgatgccttttacagccgtacctgagattttggatgcagcttcgaatgtcttgaaagcggcgccgatgcagcggaacattgctgtcaagcactattgaacaacgtgggttagcaaggttgtcatttcccatttcggcttttaagacttaccagagtaattgtgaacaggatggcccaaaacgtgaagaaagcagcagcagtatgttttagtccgatcatccagtacatcacgacactgaatattgtacattggaaaagcaggacagggaaatcagccataatctgagctaaacagaatgctgctgggtggtacatggcaaacgacttgtgcttcaccagcacagggcgacccttgaaggactcggtgacttcagacatggcgacaatgttgttatatagtacagcaaagaagacaccacctcccttaatgaacaatcctgaggaatcgtcgggagcatcgtagaaacaggatcctgcaatcaacgccatagccagagatagaacttgtttcatcaggaacgtggacttttcaccccagagaatctgatattgacggatggtgcatgcaagcagttgtgaccagaagccgacggtcaacgagcttcctttggggagctctttggcttgttcccatgcgacggactctttgaacgcctctgttctctctttggctagcggtgtctgcggatagtcgtactccgcgatcatctggctgtaaattggcgatttctcgtacaaggccctaatctcgtcggcattcctgggaaagcggctctcgtagccaggcttaattctgcgctcagtcgggactgtgacaccggtcaaaaagtcgcctgttatctcttgttagaaacgagatttatcaagactttgtatgccactcaccgatatttccaccctcagtatagacaaaccctagttcttccatgaacggcttcgcttctgccgctggcccatagtatatctgcttcccctcgtccaggacaaggaccttgtcgaagaggttgtaaatgccatttcccgcttgatagagcgtgacgatcgtcgctaacccgttgacatcggtcattgctctcaatgctttcgcccactccagcgaagtgcttgcgtcgagtccacgggtgctgttatcccaacagaacactgatccccgcgttgccaggcactcaatgatagaaacaccttttataatcagttcttggctcttgaaaatggtcaattgtaactcacgttttcgctcgccgccggatacaccacgcacaaactcattaccgaccttcgtatgtgcagtgtgtgaaattcccatggactctaggagaaagtccttggtttctttaacatacccatctatcgagtctgctccatccggaagatgcgcgggaaccttgagcttcgttgcaaagtccatagtggcccctacctggaggtgcgggtagaagagctcctcctccgtgttcatcacaatctgccccctatacctttcagcttccttaggatccatggtcccgaatcgaacatcacccttgatcatgcgatatccctgacgccgattcgacaggaggttcagaagcgttgtgcaacccggatcctggccggccaagcacaagcagcatctcaccaggtttgacacagccatgagagtccgagaggatcggacgcacaggcggcttccggaaataatcctttgcaacctgagggatgttgaactgggagaacaggttctcgttgacggaggcctcggcggtaggaacctcgacggagagaccctgccatgtcacacccagctcacgcggcttgtagccagccgctcggtcacggtctcggttcttgacgacttggtctgttaaccgccatgttgtattcttcactggcgctgttgatgtcgtggggggatacgggtgggcgagggcgagcgtctctgtgcttgttgctcctgtgggggtgcctggtggaacgacgagggtatcgtggctgtctgctacgcgcttttcctgactatagacttggtgcaggttcgaagcgggagtctgctccttctccggggggccgtcgttgtccattgtcgataatgaaagttgaagccgaataaaaactggaagaatatactataaaggaaattttgaataaaggactgaatatgaagaagaggggagatgtctgtaactagatcaaagggaagggagaaagaatgaaacagtgggttagtattccaggggatagtaaactacatggggaccctcgagtgatatactactgggatcaggataatcggatcgttgattcaggttgcaatcaggtaccatagcgttctactaggtgtcatcaagcccacggcacgaagccgatctccccggggtggatatcagggggatgaaaggggccggtcctccataaagaaaaagcctcaccatcatgttgccggtttgggattttggacgaaaccgaacaatagattagtgcaagaggcgtatatgcaccggcccgatcagcctcaggattcggcaacggctgcaggcacattttgcatcacatcggcctcggcggcctagacttggcatatggcatctagcagctggatcgtgcggacaatccagaaacaagctttgtcctttgccatttgccacactcagaatgttagagacgtgttgttattgggtaccagggcgagagagtgggatattgccaccgagactggaaggacgcagactcgaactcggcgcacggcgcgaggaaaccggtccttgccggcctatccggctctggatggagctctggctgggactcggatgaggcggatcaagcagcaaccaactattaatagccctctagccctccgagaggacaagagttttgccggactgcataacaccaggtataacggttatattgttgcttatgactgcttcacagggcataacatcagctggacgagaatttcagtactgacccaggtcgtccaaagcccactttttcgttggaggctgaacttctgagacagcacgacatccaaaacacattccacgtagcgttttgctgcgtcgggaaacagctgccggtcataatgaatgagaagagccgcaactcacaagatttgatctgggaagatgcagatcagagataaaattgcagtcattaattggtctacgtcaaggactaggctagtttgcagttagtgccagttacccccgttatagtgcccgtcctacagctttgatggttgaaattgcattttgcctcgtgcccgctgtgactatggacaaggtatgacgtcccagtgtactgtcagccagatagccaagcaagctaatacataacaggcacaacgtctcgtgaatcgtctgggtcctctccactatgtaagggacactgattggcttgcggctatccgcatcggatccacgtatccatcgtaagggacgcagccagagatggcaatatgatacagcatattatatcagctttttgcggacaactcggcatggttaggcagctgctttttcattacgccattaagcatatgttagtgatgctcttagcaaattccctgcctacccaatgcagtgaaattctccgaatactatgcttactggcaatcgacggtcagtgcttgtgcaatttgcaatctacagctctagggttgatttctagacctccttatcccatgccactacatacgctgtgagacttgaattggagtctgaagactaaatagtctactgttgtccataaaaaaaaaagcctgggccaccagccctgaagccggttaacaatatcacaactacaggaataaagtagaaatgggtatagtgactaatatctgttatcacagagcgatgcgttgctctatgtagccacgtataaagaacacggactcgtagctggcctggtgtccttgagctatacacatcaagatggatggcagtacaacaagctccaaacctcttaccacattcagaggcgttcagacaacagcttggatgatcacaggtataagagataaa

SEQ ID NO: 5424 - DNA, 2533 bp, Emericella nidulans
aatcggggttttacagcttccagccggttcacaagcttgggccccacgccactgcaagtgtcatggccttggtgtcgttgcgcctgcatgctgaatagtcttaattcgtggtggacttcagtctcccgtctaagagtgattcgatgagacgggggagaaaggcttgactgacagagaagtcgtttgtccgcaccggttttgaggatccgatgcaacggcgcgcggggaagccgatagggacggcacggcaacaaataggaacgaatcgaaaccgtgattcgaaaatagagactcgaggagtgcttggggtgatcacgggaggtaaaaacggcgatggaggctcaaggagctagagtgtacttgctagagtgtccttgagtggcctgagacgctcacgttggctcagactgcctcgggatgatcgccggcctgcacttcgcatctttgcgtcatcaatgcagggcgtcacgtggcaaacctacacacttgggatcggttcccacttcacactaatatggggcaggttattctacggctagtcctaccggtattcatgatgggctttttcttctttaatcatcttccagtaactctgctagctctcgctcctcttcctccgtcagcatagattctgggttggttgatggttcgtcagttggatgttctgttgcctgtgctacggcattccgcaggtcatcaggtttcagagaccactgtcgaatggtggcgtcaatgctgacgctcaccagcattgttcctagtaaaaccaggcctgttacttcctcgtaatgcccagaaaatgtgtggtataattgtccagtctgagtatggcatcagcaaaaagcgatcgaagggagaacaaaaacagaaaacgcaccgatcggttccacacacggatttcttcatctcgacacgcggtgataacccagccccctcgctcatcgacgacgacatccttgacgtaatcgggatgagtgagtgtgaggtttgccttccagccatcctctctaataagacattttgtcgttttatccgctgaagctgtccagagatcaccatcttgatcgaaatggagtttgtaaacgttcgtatcgtgggccaaaagagcttctgtgcctgtgaggtcctgactgcctttggatagatcaaattgtcgtatttccctgtcgctaccggcgctgaaaacgatttgctcggtgctgttgtcatctaacgtgagcggatcaatcaggaggtcctgaacgccctttgcatgacccttccatacgtgcagccgttgcccgcttgagatgtcaaatacaagtatttgcgcatcggccgccgcctgacactaggagatcctggccattgaccctcgtagttacgaccgacctcacaaagtcggtgtgtccctcatactgtagctttcgttgtgttgagtttacatcccagctccagattgttttatcccagcatcccgcgaacagaatccggccgtttgggctaaaacaaaggctcgtgatgggggcagtcggtcccttgaagatggaagcagtttcaccggtctatatacgagatgcaattaacaagaagcttgatgtatagtccagctgagaagtttacgtactgcgagaactatcttcctgactgttccgccgctctgggccacaaatacagagccaaggtcgaaaggatccggtttaacggcgaggatcttgctttgcagtcggataggagagccattggtattaattgacttggcctcctttcgcctctgttcatcaagagcagaactaaacccgtcagtgttggggagatgcggggagatatcggaggtcgcacgtagtctggaagaagtcgtcccgatgggaagaaacagccatgatgaaattcgattattttatgtagtccgccagtgatgagatctgttataataagagaataggatcgaatatcatgcatgcactgaaaatgcctgcttggggaatcacagactagggtagccagactgctgaactgctcttggagctcgtgtgggcgaccgtagcggagagcccttttcccaccacaaactctgcttccagcttcttcctccctcttcgacctctctgtctctagtccccttccccatcctacgttcgctgcctctattctcccctcactccacaccactcccctccacctcccatcttcctcgcgcgtcagtcgcgccatccttcacgtcaaaatggacatgaaccatttaatagggtcagtggcctgagctagggtatgtgcggctaggctggagttaacacctggcagtcaacggttcaacctgatctcaaagagcgatattcggtatgcacctcatctcatccatcaactctccttctattactctgcgaccttgggtagcttcgtgtctaacatatcctagctatgtcggcacgttacatgagatcaacccggaagcttctacgatcgccttgcaaaatgtcgtttcttatggaactgaaggcaggcgaggcaaccctgacgaagaattaccctcatctagcagtgtttacgaata

SEQ ID NO: 5425 - DNA, 8369 bp, Emericella nidulans
ccacacttcgttgccgctcctttgtaacatagtatgattttccgaccggaactcgcccgataccaaaccatattgtctgtgcggcagaaccatggccgagttgccgtaaaactcattaagaagttccatatcatatttattccgtttgttctcgccctcggtgccttcgatgccaagggccgtatctaggagggctttgtagcggcggtacgaaggctcgatcacaagaaggagggaagagaggactttttgttcggggagaagccagtatgcgcggggcattgcgacaggtgtgtgaggaaggaagaacagttcatccatgctctgcagtaggaggacgtcggagtcgaggtgaataactcgattgaactcagtctcagcaaacgcgagcaattttgatatgctcttttcccattcctcgccaggtcctattcagagaatagaatagcagcttttagcaaattgatcatgagcaattcgaaggaccagagaagatgctaacacacctgcgtcaggtttgatcatttccagctcaattggcaccagcatggccttgtacttgaccttcgccagccggagcaattgacggtcccgatcattgtcgctatcagcgataacatcccagtcctttggataatataacactcgttgcgcccggcttccgaatctctctagcgcatcaaataccatgacggcgttgcataggtacggacttgaggtggcatattgagtgtacgcgtacttagaccaatcgaccaggtcatagttaatatgaggcagagcaggaggaggagtcggttcacgtcggaggaagaggataaaaagaattaaaataaagataaacgcccaggtccgaatacgtcttagttgacgtttgactatggcaagaaatggttcgtcggggatgtcgaagaaatcagcctcggaggccgcagagcctttacgcaaatgagagctcatggatagcttggcgattgggtaggctattgtttatatgtttcgagcgcaaatctcatcttgggatagatgagttagatatctgtcgttgtaaggaaagggcaaataatactacaacgtctagctacttcggaggcccacctcccgaactcaattgcacgtgattaaccagaaggccaggaatctaaatgacaagagtatatattaaacagtatccgtatagagaagtctacaataccctgttttcttcattcgtagatgtttatgcgagctcgaattgttttctcgtcgaacggtccattttcaccggcatagttgcggagcgcctccatggtcattaatcggcgcggcgcctttcgtccagtcaatatctcgaattgcgcaatggcctgctcagcaacattgtcaaggccgtctaccaattcccattgacgtccagtttcgctacgaaagcgacgcatctggcgaagcagtggcgtttccagcggtttgtacgcaaactgttatgcattagtcgaataccaaaagctcgcaacaagagtgatgtatagtgcgaaggggttttatcaatgtgagtaaatctgtacaacagtaagtcacatacctcaaggactactccaccggttgggcttcccaaccactgcgttggcatttcgaaattagctggcggctcatctctgtccgggtccgctggaacgcaagaggcgaccatgcacggagggcaggcatcctgcggccattcttcgtgcagcgaccgaagcacatacactacttccgtggagcccacttgggaggcggcccatgaattgaaatggcgagcgacggtctctgcgcgggataaagtccggttgtagatgaaaatctttcgacaaccgagtcgaagcatagcatatatagcggcacgcgccataccaccggctccgatgaccaggccggtggtcctggacgggctgatagcattacgcggggagaggttgcggttgatgcaggtcataataccaacccaatccgtattctcgccataccatcccagcactggaccagccagatggcggcggctagcttgttcttgtagagggaacatagttccatccgagtgaccccgaagtggcatgattgtatttattgcacctatggcttcggcatggcggctctttgccgcgagcttctggaagacttgcaccctccaaggttgaacaatactggcgccaccgaaattcggatctcgacccagttcgtctaatgctgccaatgttggcttttccggaatactataagtatgattcataccgcaatggcggaaagcggcgttatacatcgcaggcgatagactgtaagctacgctgccgcccaggatatagaactgcagaggatccaggacataactctggaaaagagcttgaacagcgtcacgggccatgatttgcggatctctctcgttgtgagaaagacgatcgattgcagaatgcgacacagaggtgagaatagagttgaatacctgagaggtgcggccaaggctaccgaggttgaaggctataaccggtgggtggtcacccggtaacaattcaatcctattagtgaatttggcaatggctgcattgtcttcgcgctccgttgctacacgcagaatgcgaaccaactgacaccccagtccagcagcattgagataagccgataggcattcttcattatcccaactaacaccagaggacggttcaaaaatacgctgaccgatgatttttgtcatgcccctattacggatggtttcattgattagcgcctgatcttgatccaggtcgaccaccagatactcgacggcaagccgtaggcagtgttccacaatctgagcgtacacattactgccctttatcgggtattgatcgccaccagtaatcccaagcgagcgggtgtcgattgacagaattatcggagcgtgcgtatttctcctgaggatagaaacctgcttgctcacagtcatcgccatatttgggccccagcgatcgacacacagctcaatagcatccccaccggactcgagttctgataatctgactctgttatcgatcatgtcggaggaacggacaaagatcgcataggtgtacgaccgtagctcgggtggagtttcgagcagcacgaaaggcgagtcatagctagaatggccgacgtctgtacccgtgacgaagcgaacgaaacgtgtgaaatcctccttcgcctccttgagtttgaaagaatagacgactgaacgtcgatcttgcgtttcttcgtcgagctgagcgaaactcgagcgatcctccgcgttatagtactcaaaatttgagcaagtccggtgtagcggatcgccttcacaaagtagctttgccgcctgatcatcaaatcctagcaacttttgaatgcgatccatatctcgcgcaatgtacaccacggggttcgtaagagaatactgtcgaaggtattcctggacgggacgagtaagagttcctaagccgcactcaataacgcagcgcgaacggtggttgtctagcatcaatttgaggacttcaatatctcgctgctggaaattctggcttccatgctgcttcaggtactcgtggcgcgaaagtccagtaacttctttaaagtagtggtcctccgtgatgaaacgccgcttcaacgctgtagcagcaacaaaccccagtgaccgtttcccacatccccgaatcccaatgaggaccagggatgcctccgggtcaaccctgcggtatacatctgcgccggaacaatgaggcatctcggtgctgacaccgggagaccgacaaatcctcttcctcggacaggaagattgaagttgcgagtgaccagccacggtggatgggttcgccagaaagccagtattgtgtataaaccaaatcctgatactttgcgccgattatgccgagattcatctcctaaactcccatatcttaaggggaaaccggggaacgataagcgcaatgcggagtgaaggaggtttcgggcagggagtggtcggaggcagctgtcatgctgcaatggaatgacagcaatcaggaaagatgctgtcggggacgataccagctcgaaaacagcaaactagcgagcgaacggacatgactgggaggagcccatcaccccagacgcgtgggtgcagagtgggtggttcggcaagcaatcgagagcggagggctgttctgccacgagtgaccgcctctacgccgggtaagatctctgccgcaaatgcattctacccagcaaacgtctctcaacagcccagactaccgagtcgggatgccgggcctcgggccaagtctgttaccaaccgtctcaacgaggacatctctggtactcagcattcgtagatggtcctcgcctagctggtcaattgtaaaatgtaacaattttgatcaattagcgccccctaaactcagttttaatcagttacaggcccataactggttcagctgcattttgccttgcaagtgtggggtgctgtgtggtacctctgtaggcggtcttaatccagagagctctgctaatctctgctatctgtgcctgagtttcggactatctcagtccgaattggaagcgccgatcatcggcagttggacagcgaaatctgggcaaatatggggttttgattgaataatttgaattggatttatggagcagacgatttgctggacaatgagctagagctagaaaccggaagattccagctaccgtcatccttgtgcgggatcgttccgtgacagttccgtgacaggctagcaatccgcaaagctggtaaagccagtcagtttgagggtcactatgccactgcatgtacagaaggtatagaaggcatagaggcatagatagatatcatcgattagagcacagtaaatggacggtgtgctctggacggagaattccgtcgatatattgtggagaagtggggttcgatcactgatggatagttccggcggatttattccacagtccctcaatactcagtcctggcagcctcttggccgtcttcatccacttcccgaacttcgccccgaatccccttcgaggagccgttcttgcttcctgtctcaatgggtctggtctcgactttcccggtcctgcgccgcccaaggtgacgccctcagacgcatgttttacttgatcccagtgaatttctgattatcaagcgacaactcggcttctctattccattgctagtttccgatctgcatcctctttaaagatttgaaatgcactactgtggctgctcccgttgatatagaataaccggcagccgcgaccagctcttcttcggtagcccgagctgtatggcacgtcatttgtccaacaagtgatccttcatggacgagggtcctgattcgaaagcccctcggcgcaagagggtctcgcgagcatgcgataggtgccgaagtaaaaaggtgagccagtgctctattagccaacgactggttctgacctctagtctttgctaggacaaatgcgacggccttcgtccctcttgctcggcctgtctggcttccggtcaaacttgttcatatgatccgcatgcgaagaaacgcggtttgccagagggttatgtacgcggtctggagaagctctgggcgcttgccatctgcaacattgatggcttcgaagataccatgctctctcttcttggtacgacagccgattccgtcggccggaggaacaagctgatctccctctgggtggatgaggccgcctcggaaacattacacgagtcctggaaaacatgccgactttataacgctctagaaaagatgctgtcgtctagctctggtccgtcaagtcctcgcaatgcggggaagcgcccccgggaagaacatgggtctctgctgaacgagactgggagcgaatggggtttccgaattgaccgcagctccacgcctctctcgcaagacgctcctcgtgtcgtagagcctggcgcctcgcctcccgtcaaacgagctcggttgtctttgttaggggatagccggctatcctctgcaacgaacggtttacacgcccttcaactaccacctaacacctcccagttgttggacacgtacttcgccgccacccactcttggtttcctatcgttgccaaacacaacatcctccgagcctcctatctctacgcaaatgcgccctcaatatctgttgccaggctttctccaggatccggcgaccacgccgcgttgtgggcgctcctcagctatacagtatttctatcccggtcaagtccagagagcggctcgttcggagttctgtcaaaagcgaaagagcactacgcggtagcccggagcttgatcccatccgaaacagagcactacgaacttggacatgtgcaggccctgctgcttctgactctagttaacattggcctcgaggactggactgcagcttggatgctgagtggccaagcggtccgtatggttgttcccatggacgtagctgccttctccgacgctcgccggcccgaagaatcaaggcaaggaaaagccgtgttcttgggatgtttcgttattgactcccttttgtcattccggttgtcccggagacccagtatgcactcgcgcgacctggttgcagttggcttgttagaagaagatggcctggaagagtggaattcctgggctgatgtcttactcctctcgggtaactcccaaggaaagaatccgcctcgtcgaggtcctttacagtctctgagctgcttcaatcggcttgtcgaattggccagcgttttgaacaaaatcgctcgagactctataacgggacctagcgcacatatatttgcgcagcaactagtctcagagctcaaacaatgggatgaccgtctgccgcttggatgtcgacttatcgggcctgagagtatctatcctgaacggcactccgcattactgccgcatcagacctacctggggttaacatatattgccacacttctgttgctctaccttcggattgccccccatgaattaggcatgcaccgttctcaaagaccagctacagaaggtgctaagaaactcctctaccgtgccctcccaatgctcgctcaacatctggacaatttcagtgtctgtagcttgccgccagtcttcgaattatccctacgcaccatcgctgagcaggcattcgcccttcgcaacaaaatcgagagcgacttatttccttacggtcgatggactgaagcgctcgtgcagcgaacatccgagctcagtacgacttggccggtctatcgtaccctgacgaccaatatcgaacgctggtgtcgctccaagaacgcggtcgccaattctccatcacaaccattcgctcacgactcgaacaacaatcctgcaagagggatgaacaggccctcgaattacagcccttcccaaaattcgctatctatgtccttaactgagaatagaggttttgaacgcgactctcagttaccaccatttgccagacgaaataccatcgacgtcgtggagcctaattacagttcctctatcatgggaattgccattcccgttgatggacaatatatgactcccaaagacacaactatggaaagctccgatgcaccttttccacctcagtccatcaataactcgcaatcacataatcctaaaatgtcgtcctctgcaatggacatcttagacccagcgaacgagctagacgcaatgctcgatggcccctctcatccacaccctccaacaccagactcatcgatgtccaacccgccagtttcgggaacttccaccacaaacgcagccgcacctgcaaacgagcaaaccacagcattagcagataaaagcaactctgcatctacatccgataatcaaatacaaggtgataccagcgcggccagtcttgacgctatcttcaaagaccttgcttacctcgacacaaccgagtgggctaccagccgtgaagcaggactgaaggatttcggcttcatggatgataccacgttccaagagttctgccatgacccagaccgtctcgcggggtcgcagccgttagtacatccaccttcaatcgcggatatctggcctccccccgggttctttccagagacatttcgggattcagtggaagaggcaattgatagttgatagagtagctggttgcctttgggcttttagacgctccgctgatggagcgcgaaatcttggtttatgctagattttctagctttgtctttgtgatacccacacgtgtgagaacaaggtgtttctggccagtattcgcattggaccttcggcagcctcaaacggattcagggatatgtatgtagacgtatatattgatgtccttataataacatgataggattttcatggatatcgttctcgaacaagcgatgctatgacgaccatctaaacgtggcgggctttgatagtgcttgacgccgtattgtagag

SEQ ID NO: 5426 - DNA, 4026 bp, Emericella nidulans
atggtccgctcattggcaagttgagacgcgggcaagagctgaagatgacttgtatcgcgaagaaggggattgcgaaggagcattcaaagtgggcgcctacgctgctattgggtttgagtatgatccgcacaataacctcagacatgtggattattggtacgaggaggatcccgtcaaggaatggtacgttgaaataatgggctactttcgggctttcagatctagcccttgactttatgcgagaattgcctactaaccccctggaaggcccgtctcccacaacgccgcctgggaacctgcagcacccgcagaccaaccgttcgactatgacgcccaacccaacaacttctacattgacgttgaaagtatcggaaatcttgaaccagacatgattattcagcagggtatcactgttctccagcgtaaactcgccgccgctatcaaatccctttccggtgaagatggcacgaatggtgttgtggacgaagatatgatgggagttcagagcccagacccctatgagcctcgtgacgacggcggctacacagcctgacccaatggcgggagtgccagcgcttggggtggtgctaatgctgcgacgccctacggcctacgccatatggtggtggtaattttgggttctagtcttgaagccaccacaatggctcttgtcttgaccgtaacagaatgacagagggaggcacagggcaaacaagggcccaaaaaaaaaactatttaatatcttcacttagcatgggacggagttcgcggtttggagggttcatttgagcctaggcgcggtgtattctcattttgtttcaatttgacgacctctgctttgatctaccgactctatatcagcaggctctctttgtgtatttttttgaacgcacacccccagtttatgtgaccattagaccaagataatgtggcgacaatgactcaatcagactacctctgacatagactgattctccaggtttgaacagcgtgcatgaacctacggattatgttgatacgaacacgaggagagaaaagtctaaacgcttagcatcttcgtatggggtatatctcggtcaattctagtatacctgttgtgcggcgggtagttgatccgcgccgaggggatatttgttcgcattaagcatcaaccgacctctccgcatcttgcacattgcaatagacgccgaagacatgcgtctatttgctacgagcagggccctgcgccttggcagtggaagatggtctataacctctgcccgcagcagcattcgcctgccgctttcccaacttctacgcgctggctctgtcggacatagagagtggagctctacagttatacggagaacacagcacacaataaacaagtccgagtctacagcaacaactccttcagcttctcccaagagcctgacagtgggaggcaaagcgtatcctattgacgactggacgaacactcccgataccatcctcgcgcacatcgatcgcagactctatctcgatgatagccaccctctcgcgatcactcggaagctgattgagagtcaatttccccgccccgtctacggcaactattctgagaaggacccaattgtgacgactgcgcagaatttcgatgtcctgggttttcccgcggatcatcccggccggagtcgcacagacacatactaccttaacgaaaagacggttcttcggacacacacaagtgcccatcagcaggcttatttccagcagatcagccgcaatgaagaaactcgcccggaagaagttgggtacactgttgttgcggatgtctatcggagagatgcgattgatcgtagcactacccggtgttcatcagatggaaggtgctatgttgtggaagcgccctgccgacaaaccactagagcacgcgaaacaaactgccgccgcgatcatgaaggacgtctatagcattccgtctcatagcgtacctgttgaagacccaaatcctactatccatccgcagcgaaacccgcttcaggccgactaccatagcgaagaggaagtcgaagccatcgccgcgcacctcaagaggtctttggagagaatggtgatcaaggttttcagcgaggcacaaaaggcttctgcggcctccgagggcgcagaggctgagactttgagggttcggtgggtcgaagcatacttccctttcaccagcccatcgtgggagctggaggtattctggcagggcgactggcttgagattctgggttgtggtgtggtcaagcaagagcttcttaacaactccgacgtgccgaatcgcgtaggctgggcgtttggtttgggcctggagcgcatcgccatgctcctcttcaacatccccgatattcggttgttttggtcaaaagacgagcggtttctctcacaattcaaggcgggccaaatcacgcgcttcgagccgttctctaagtaccccgcttgctacaaggacgttgctttctggcttccttctgctgctaccagcggtggaagcgcagctggcggcgcggtaccggttcatgagaacgatatcatggagattgtgcgtggtgttggtggcaatctcgttgaggatgtcaagctgattgacgagttcatccacccgaagactaaccgcaaaagtttgtgctatcggatcaactatcgtagcctggaacgaacgttgacgaacgaggagaccaatgatctccatgacaaagtgcggcagaagcttgtcagccagctttgtgtcgaattgcgatgagtgcctctatgacctatgtgtaaatatatttgtataatatcgaatagactgtataacaccacttccgctaagaccgacctgcttgaactggattatatagctagctatccagctatcagcatctccacctccccaaccacaattcacatatccacatgagtatcgccatcatcacagttatccagacaagattttgtcgtcaatccatgtagccgatcctcaaccgaagattgccgcatcgacgtctcgccgccagtggagcctgcaggtaagggtaaaccgcgatgctgattggtccaccccgctgacgtttccgaggcggcagagtctcggagccttgatctatctccgtcctgcatcttaaaattctcagcaattctcaactccctctccactccaactctacgccatttgcgcgcaatctgcatgtcaacgtgctgtcatcagccatggcaagcactgcgaagctggagatctcgcatccccaacagcaggtcgtcaaacctgtaaagaaggtgcattatcccttctggtttggcggctctgcgtcatgctttgcggctgcggttacgcatccactggatcttggtgagtgtttccctttctagctctattcgaccgtcgagctgtcccttcttggaaaattgctaatacttgggtttacagtcaaggtattccctcatctatagcttatatcgcataatgctccaggagctgacactcgggtgaacaggtccgactgcagacccgagggcctggcgctccctcgacgatgctgggtacatttggggcatattctgcgaaataatgggtttttgggtttgtatatggagtatgtcactatcttgacaatggtaatcaaaaattcgttctgcgctgacaaataaatctttcgtcatagctttcagccgctcttctgcgccaactcacgtattctacaactcggttcgggatttatgaggaactaaaatctcgattcacgtcaccgtcgcaatcaccaagcttcttcacgctcctcggaatggcctgcacctccggtatcctcggaggcattgcaggaaatccagccgacgtgctcaacgtccgcatgcaatccgatgccgcgcttccgcccgcccaacggcgtaactaccgccatgcctttcatggcctcgtccaaatgactcgcacagaaggtttttcgagtctcttccgtggcgtgtggccgaactctactcgagcaagtcctcatgacatcctcacagcttgtctcctatgacgtcttcaagcgcttgatcatactt

SEQ ID NO: 5427 - DNA, 6774 bp, Emericella nidulans
cgttacgataattgacatacatgagcccatatattgaactatgcctccctggaagctggcgtaaggactattttcaccctcagaatcacccgacccacgcattctaaggggtttaggagcatgacaacgcatacgctatccctcgcagctgggaggcagagctcttaactggctagtctactagtagggtaaatatctcaaaaacaacttcaacttgcactagattaaggaaatttcttagcatccggggaattctggcttgaaattacttgatacgtcagacatactatatctcacgccgttcgtgaccaggaccaggagttaaggtaaatttcagaggaaaagagtaagggggtaagtcaaaaaacgatggtcacaatcaagatttcagagtgtggatcacgacttgagtcaccgctcctttgggttgcgagtcgggcatagtcgaagattgcgttggatctggcgttcggcgcagccttcagtgcagtgccagtctaatgcagcggccatgcgaaatgccctcgatgaggaagtctccattcaaacgcggcgcggtaaaggagatagcgacatggctccagctggggaataagtacgtagagtaatctaatttaagataaaggtcgaaagccgagtagagacccgctccttaaggatagtagtactataaagtaagggacaacctgcacgcgagtctatagaatgcctaagcatagactaatattaattataccaaacgcccaactacctatgatatcttgcgaggagcagaaccagaaaagccgcctaaagaccgaacttcgacccaagaactatcggttattagcgaaatggttggcattaagtatggatagtgcgagctcgcaagacacttaccaccaagaactgctttcttcttctggttctggacgtatttgttgacgtcccgcgcccagccgctacttgtctcctccaatctgtccatgttatcgccagcgaaagaaagcttctccgtgcgctcttgcacctggcgctgcatgtacgcaaagtatccctcatcgttggtgttttgccgcgctggagttgacctgccttctctcgcggcttgcgacgctcttgctcttctaaccgcatttgttctatcatccgctttgacggcggtcgatctggacctccgactagagaggcgttagtactgaaaacaaaaggaaggaaaagggtgacgaactcaggatgtccatgtcggcggttgaaatgtattgagtaccagagatccattgcagattggtaatcgtaggtcgaggtggggatactgcttgtgggttgaacaactgatcttctgacggccgactgttgtttggttagtaatgttcggcatagtggcttggatacatacagctcaataccggcgccccaaacgttgatcagcccaatttcggacggacttgtccagaacaggacactgccgtttggcgagacagtagactgggaaagacggctcatgtcagccatatgaccgattttagcacaaccgatctcctttaagccagggatagagaatgctcgggcattgccgtcgccaaacagtccaaccagactacatcctcggccaggaagattgacaacagaggcagagtcgcagaggtagtcatcccaggatcgatgtgcgcccttggacgtggcgggcttgaaaatcctgcagctgttaacagtgacagcaaccactgccccgtgaaccctggttccgttccttaagcctccgaatgctttgcctgtagcaagagccaggctgccatcatcggcattgataggtatgatgttgattattttatcttccaatgcaactgcgccagcgaacgacgctacaaaggcgccgccgctcgacggtaagatcttgaacgtggccaggttgcctctgtttgttcccacaaaacagcaaatgctggagaattctagtaaacgttagcatggcccgatttgtggctgtcgaaacttaccctcgccctccagggtcagtataccaaactcgatggcggtgggcacctcaggaatagtttcgctggagctacgagtcttgaggaaactgctccgtttgttctgcttggataattcggagatattcgcagtgtggatgatggctggcccacgtaggtctattatagcgatactgccaccttcgaacccggcagcaacaaaccctattggactgtgctttagcgcagtcactggaccctgctgcatgctcagaagagtcaagggcagaaggccatgtttcagactggggtcagttctatgtgtaatgtcggtcaactctccaggcccattattcgttccggagggttgctccaagccaaagttttggttacttgcccatctgaatattgcaaacctaccacttttgaggccactgacagttcaccactagaccaccaagagacatctctgtgacatcgacgacccctactcggcctagagcccgagccagatcgacctgaatcaattccgagttctcgatctcatcgtcgtgccctacgtcccaaagtccggacggtgccgtccgcatgtgctgctgtgataatattgcgactctctaagcgtttgagctgcttcctttcttctgcgccccctaagatgaatttcggtccttgagaccttcgttcctttaaacccagccaatcggcacgatcgactggagtcaaagtgatcttgtttacaaatggatgaataagagtcagagagggtggtagcatgttagtaggtggaatgggatgaccacttgggaagctcagtgtaatgagttcccccgatgttagaagagcaagaattgcgattgggtcgtgggcgcctccataatagggagaattgcggggaatgaggcagaatcggacaacttcagcacctgggggaatggaaatctctgcgatagtcttcggattctcaagatatgtggtgatcatggcccaagaggatgtttgatagttaggcgacgggcccaggtcgatgaaagtaagattcttgcatctctcatccttcggcttaccaccggcaataagaaggccactgtcgtcaccatttgccttgacacaccacgcaacgtcagtgatggggtctttgaggctgatagcggactcgggcgcagcgggccctctgggaccgacacctggctggtcaatgttgggcgtcgtgatagacctggctaatagcttgcgaccgtcctttgtatcccagaaaaccaaactattgtcgtcatgaacagtgagaatgaatatgccgttcggatgccatagggctttggtcaacttcggttttcgaatatctctgtatggcgcaataccgtttccgcctagagcgcctggtggtacttcatactcaaagtaatgctgtgctacgttctgcttgaacgagaatgttaccgcaccgtctgggtacccaatgaggatcttgccgatgtcacggggcgaaaaagccagactgatgacgggacaaattcgcgctcgcggattgcgctgagcccacaggttggatattttatacggcgttacggtttcacgatccagatcgtacgcgatgacgtcgcctgtgatgattagtgagcgataacctcaaaccatagaatccataccattctgcaagccaatgaatgcatagtcgagactagggtcagagagcaacgcgctagcgatactcggaggggcgtatgagacaagtagtttcttcgtttctagggagaagacgctgatttcgcttttcgagtcgacactgatgagcttgtcgccacaaaactgcaggaatttcgccgacgccttccggggtaaagagaagatgactgagactcgtccctggccgaaaacgtagacctggccatggccgaattgcgattcgctcgtaccaaccgcaaggagagactgaactggatcgtaggcaagggcactagtctgtgaattgataccacatctcaagagctacatacgaaaagtcagtagaggtaaaaaagaaaagctggtgcctgaacgagccaagcatacatcatcgatatcgaacagctccggcgcgagactgccagaaaagtccttctggatgccggcttgcttgccccttaggaaatgcgccatttcctacggttcgaagcagtaagagaggtgttgtgtaataatgatagctcgtaggtagaaagtatgaaagggagaaagctccaaggaagattacggtctaatcgattaggtatccgactgcggagccgaaccccacacggtcaatgacggtcggccttatggcgccccgcctgcgccactgagactgcattgctcagggcgggcgtctcttcatacgaatgcgatatatgctacggctgcacgctaaggcagagtataagcgtttcaaacaaagtgtctagaaagagcagggtctattgatcaaggacaaatactgtcttccaagacgcttctcaccatgctataaaaaactaattgagctcaaatcttctggcaccatgtctaacaaagataccgacgctaatgctgagacgaaaaatccacgggtatcgaagcggcaaacttgaatatatcgttggtagtggtctttggtggtctccccattccggatggggctcccgttcacactgcggccattttcgctagtgccgtcatcagctctctccttgccttgatctcagcagctgtgtctcgactcttccgatagtattgcaggacaacatcgttaacggctcgatagcaggagtatctaaatcgagtcaggggtcgttagatgtctgatcaaatgcagactgggggatacgtacagaagctgccgagttcctcctgtctgagttttcgcatagcaagatccaaacccatctatcacagaaggtgacggattctcaaaaatctttgccataaacacatctccccagaccgccgtcctaaagctggagatcccacatagccgtttgctctcattcaccagtacctgcgatggctgaccaaagtcgatcaccaccagtcgtggtgtcaaaatctcatccagcgctggcgatgctcggtgcacctggtatctaatttctccataagggaggttgatgaagacgtcttccgcgtttcgaagcagcccctcgaaaagtatgagaaagccctctctccaggattttgttcctcctgcactcgccacctgccctagacttccaaaggactctgaggtatgctgcgcaatccgctttgccaaaaggcctaagcttctctcaatagaatctcgctcttggatagagagctgggagtctatcttatccaggcttgtacccgggatgtaatggcgtagtaaaaaagatggtccgagcaaatctcctagggggtcgtaatggagaagctgtgggatgcacggcatatgactcaaaagagacaaggctcgtgcctctgtgtccagcattatatgttcacgacgtattagcggcgttgtcggcttcggggagcatttgagcaataaatgagtctcgtttgagagttgaactagatagaaagaatgcaagtgaccagccagcggccatattctgtccacatgtattggaactaagaaatgtcgtcgaagaatggagacgagtttgtcggagacctctttctctggatcggaaggagcaggtaagggagggaacatgacgagacgaggtgtttcttaaagatccaagtaaaatagggtaggaaagcatcgcatatcatagtcgaaggaaaagcagtattactcattaagagttcgctcactgtaaacaagggaccaacaatttaaagcccgcccattcattgtagtcgaattaaggtaagtctgtaggttccagcaacagcagacagttgtatatcagggattattacgtcccttggccagtcttaattgatcgtaagcgagcatagcttctcgcccatgacaaattacgcaaatccagcagccgatctccggaatcatagcggttgaaaagcctcttaagaatgagaagatgcggtgggacgagcagtaacagaaagagcagtaggtctgccatgttcgcaagatttggacatcattctaagaaaacaatcacggaaattcgcctaagcatcccagtctgagaaaggtgcgacatggagattcggggtggcccaatcagaagagtcccttgccgagtgagagaacgaatcggttttgtgtccactccggtacaatccaacgacgagctcccgtgttttgtggagtctcggcccgccgctttctacttgttctttagattagcgccggagaaaggaggagaagcagtagggtttctcttgggtttcagaggttttcatcgctaagtacggagtaggcttggacctattgcgctgcggtaatgctgatcatcgcgaagaaaaaagtgtccagtaatcgcagcacgggccctgaagacgaagcccgccagcggagccagctggcagctgacgagaaccccatataccgagcattgagcacgcttggctcccggtttcaactgcgccacgaggaggaatttctagaagcacgatgccaagccaacggggtttagcgaacatgaactgattgacataagttcgtatttagggttcttgaggtgttggctcagggttatagagttcagcgaggttgaatcgtttcaacttgtcataatcactccctacaacactcatactcatgacgttctggtttctgttagcatgttaggttttcgatgtaaattgggaggtatacctggacaatatcgactagaattaacagatcataattcttcagatcaaccggatgctcaggtcccacgatatc

SEQ ID NO: 5428 - DNA, 7003 bp, Emericella nidulans
ctttactccgcgcctggacgacgcaatatacaaactcaccaatcacaacaccacggtctgctacacctggagagtgccgcctacgcccaccgcgcgacgaacgcgtggagaagcctcgacaccccaagaatcctccaaccccgccttccatgtccatgccctatgctgtcagctctgtgccccaaggaaacatgtgcaatgtggaccggggcaacggcgcacttgagtatatcaacccgagcctgctgctatttccacaagactatgcaagccaagagtccaacaattatgcgagcgcaagacgggttagtgaccgacggattggtcagtctccctatacgcgtcccaatacaccgaacgtggaaggtgtctccaatgtgtcttcgtcggatcaacggtcctcgctgtccgggcgcaacgggcgagaggagcaatccaacccgccagtagatattttcgaagggattctagcaaaaatgctggcgtttgatgttgtgcggccgccgtctacgaacgaattaggcaatgatgagcctccgcgtgaggtggaggcgaaacaaccgactgtccatcatggatttgcaattagtgttggctggtccagtacattcttccccgatgacatacaggaggggtcagggcattcgagaaataccgtggatacagttgggcatttctagggctgaatgggaaggagagagttttgaaataggcgttccgttctgcttagggtatttgggaacaatcaatgttcaatgtacatttaatccacgattttataaaacgtcatcctttgccctcccttcttatttgccaataccaaaaatcttactccagtggttcggtaatcgcagagttaaatctgggctcggtggcagatctgcgatgctccataaccgttcagatgttgattggaactgggtggggtagacagctcgaagaccgagtgaacgtatacctaagacactttgacacggccggaacactgtaagtcccttcgtatttctccgcctgtgtggagctaccatccaataacccccagctgaaaagctgattgtgatagttcccacttgtccgtccgcatcggcatccgcagctcgggatagttccgacctaggattggatgcatgcggaaccgcacgagggcggggcggaaattgacacaccactcctctccacgcaccgttcaagaggtacgcgtatagagccgtatagagcagagacggagcactttctggtactgtccgcacgggatgtccgcacggagagccacaaacgagcggggccccgtacgtgctctcctaccccaggatcgcatccccgcatagctgaacatctatataaagacccccaaggttctcagtctcaccaacatcatcaaccaacaatcaacagttctctactcagttaattagaactcttccaatcctatcacctcgcctcaaaatgtccatccccactatgcaatgggcccaggtcgccgagaaggtcggcggcccgctcgtctacaagcagatccccgtccctaagcccggtcccgaccagatccttgtgaagatccgctactctggggtttgccacaccgacctacacgctatgatgggtcactggccaatccccgtcaaaatgccgctcgtcggtgggcacgaaggagcaggaatcgtcgtggcaaagggcgaactggtccacgaattcgagatcggcgaccaagctggcatcaaatggctcaatggttcctgcggagagtgcgagttctgccgccaatcggacgaccccctctgtgcacgcgcccagctctctgggtatactgttgacggcacgttccagcagtatgcgctcggaaaggcgagtcatgcgtcgaagatccctgcgggcgtcccgctggatgccgcggccccagtactctgtgccggtattacagtgtacaagggattgaaagaggccggggtccggccgggccagaccgtggcgatcgtgggtgccggtggcggcctgggatcccttgcacagcagtatgcgaaggcgatggggatcagggttgtcgcggtcgatgggggagatgagaagcgggccatgtgtgagtcgcttggaacagaggtatgtacatgttctcaatctcaggaagcaagcaactgacctggacagacatatgtcgacttcaccaaatctaaagacctggtggccgacgtcaaggcagcgacgccggatggtctcggtgcgcacgcggtgatcctgcttgccgtgtcagagaagcccttccagcaagccactgaatatgtgcgctctcgcgggacaattgttgctattggcttgccgccagatgcgtacctcaaggcccctgtgatcaacacagttgttcgcatgatcactatcaagggcagctacgttggaaaccgacaggacggtgtcgaggctctggacttcttcgctcgcggcctgatcaaggctccgttcaagacggctcctctgaaggatctgccgaagatttacgagcttatgggtgcgttgactcccatatccgatctcattctctttgcgcgatatatttagatactaatggcttgcagaacaaggcagaatcgccggtcgttatgtgctagagatgccagaataagcgtttcaacggccacgggctggaactacaaacacaatcgtcagatgtttcatgtttatgatgtccatgcttgatatctttgtatatagttttcaatcaagatggtacaatgattttggccttggttcaaccgatttcccttccacttttcctagcctgatacggatagcacttgtaagcaatcataaaccacagactggatagactgggaagtataggtattatggtagccaaatgcgatgatttgactttgaatcaaggctcaaacagcccctcacccgtcttccttttttttgcgtgttatttttttagtcggattccagccaaggccacttgccacagctctgctcaatatttatgcacatataatactctatgccggtgattcatcagtagcagaaaggatcgttttggcatctcttcgagccaaggttgtatccaagggttcatcttacaatagtacagctctagcactgttagacctactgcaagctattccaagatgcaggggtgagctacaatattagcttaatatagactcaattagctcaataccagatgcccagtcttgatcactaccagaaagtgtgcggaatattccgactcttggacagtggagcgctcttcccagctagccgcacagagacaacctctagcttgtgcatgcctctttcttgctccagagatcctctcagctcttgataaaatccccactcctatctcgctcagtttctctgatcgtgtgcccaaatgttctaatccccctcatgagtaagagtaccatgtacgctcatcctctagtaatttcaacaattcacaataacacggagcgttgtgctgagataacgtattcataggaatacggtacctgcactacctgaaataatgtagattatcatcaagtaagagaaaagaagaatgtaagaaagaagggaataattgacttcctcgttctttaaaacctagtaaagttgcatactgctcatcaagcatggagtcactactaagatattatattttgtttaattcttgtaattagagcttctatgtagtcttactagttttaaacacggtagtcgatctatatattttgcgcgaacagagttatggctgtatcgtagtccttatgtcggtcgcctatcatcctacattttatcttactactcttgagcacgacctgaccattattaaaggcaagcactccttgaggatttattcgtcaagaatctcagctctagtccgcttttcaacccttcttcgacggatcttcgtcacgaaatttattggatatactccaacaaatttgtaggggtattggttttgataccatttttcatctcccagtcattatcaagcctttcagaaaggatttcctttgctcgcttgctagcctagtgtccgctactcgcaatatctatatacaagtaccccatagcttctgggtctgccgtagggtcgaccagtatccccgctgtctccgtctcttggcactgaatgggcatggacggctttggagccgtctcagcgtgctttagtccccggctcagcaccaattttaaaaagcagactatacttactctgagttgacatgtgtagggataccatgggttttgctggagtacgaattgcccgatgtgggtacgtgggtactgacatttctccatattctcgcttacaatgattagccgtccctcatgtcgagcaaagcctatccgggaatatgtgcacgagccaacgccaacgactcagtctgcaacgcgctcctgtttcgtacagaggattgccgtcttacctcgacatatgtttcaccgaaataacgtttcggggcaatggaaatttccagatgatgggctagcggaaatgcggggggcggccatgcggagccgcacgcgttctgtcgtcactggacgacaaacggcggaaactctggtttaaagtttgatatcgagcgccgaagccttatgtccactaccagctgggagatgacccgtcaaaggatcttcatttgactctcattcagctataccatcccatgggtccagagtacatcggtgcagtagactgatttcagttccggatggattgctcgagggtcgtcgtactcagaccaacacacatttcgaagcaatatacggtcagacttgccgtgccatataacatttgagctctcaatccgacccagaaggatggatactatactgctttcttccagatcttgggactcggaactccgggaaccccaaggcctcactgatcagccctaaaatgagtggtggatattccatgttccccacattaagcttcttctcattggcctttgggcactccgactccgctcgaccgcgacgaaccctggccaggggaacctgggtatccaggtcatgtgctggaaccccgcatgctccaggcctcattccccagatttcgactccatggctgacagcatccagaccgcacgtttttggacttctgataccatctatacagatatcactgtcgatattctcctgcacacagcatggcagatacgcgccgacgccagaatcatagctgcgatccctgtcgcaagggcaagcgacgctgtgatgccccggtaggttgccgatatcggctccccagcgtgtgcactgacagtcgctgagatgtaacacaggaaaatagaaacgaggccaatgaaaacggctgggtttcgtgttcaaattgcaagcgttggaacaaggattgtaccttcaattggctctcatcccaacgctccaaggcaaaaggggctgcacctagagcgagaacaaagaaagccaggaccgcaacaaccaccagtgaaccatcaacttcagctgcaacaatccctacaccggaaagtgacaatcacgatgcgcctccagtcataaactctcacgacgcgctcccgagctggactcaggggctactctcccaccccggcgaccttttcgatttcagccactctgctattcccgcaaatgcagaagatgcggccaacgtgcagtcagacgcaccttttccgtgggatctagccatccccggtgatttcagcatgggccaacagctcgagaaacctctcagtccgctcagttttcaagcagtccttcttccgccccatagcccgaacacggatgacctcattcgcgagctggaagagcagactacggatccggactcggttaccgatactaatagtgtacaacaggtcgctcaagatggatcgctatggtctgatcggcagtcgccgctactgcctgagaacagtctgtgcatggcctcagacagcacagcacggcgatatgcccgttccacaatgacgaagaatctgatgcgaatctaccacgatagtatggagaatgcactgtcctgctggctgacagagcacaattgtccatactccgaccagatcagctacctgccgcccaagcagcgggcggaatggggcccgaactggtcaaacaggatgtgcatccgggtgtgccggctagatcgcgtatctacctcattacgcgggcgcgccctgagtgcggaagaggacaaagccgcagcccgagccctgcatctggcgatcgtagcttttgcgtcgcaatggacgcagcatgcgcagaggggggctgggctaaatgttcctgcagacatagccgccgatgagaggtccatccggaggaacgcctggaatgaagcacgccatgccttgcagcacacgacagggattccatcatcccgggttatatttgcgaatatcatcttttctctaagcagagtgtgctggatgatgatgagcagcacggtatgggtgcacgtctagacaagctactcgaaaatgacggtgcgcccgtgttcctggaaaccccgaaccgtcagctttatacattccgacataagtttgcacgaatgcttctccgcggtaaggctttcaacaggctcccgggaggatctgtcgcatcgacattcgccggtattttcgagacaccgacgccgtcgtctgaaagcccacagcttgacccggttgtggccagtgaggagcatcgcagtacattaagccttatgttctggctagggatcatgttcgatacactaagcgctgcaatgtaccagcgaccactcgtggtgtcagatgaggatagccagatatcatcggcatctccaccaaggcgcggcgctgaaacgccgatcaacctagactgctgggagcccccgagacaggtcccgagcaatcaagaaaagagcgacgtatggggcgacctcttcctccgcaccttggactctctcccagatcacgaatcccacacacaaatttctcagccagtggctcgatggccctgcacctacgaacaggccggcggcgctttctcctttgcaacgcccgtcaaagcctcctttaccgcc

SEQ ID NO: 5429 - DNA, 4392 bp, Emericella nidulans
gaacagccgcgacttcgtttctcgcattgaaaaaatcaatcatacaacagaggtgataacagcaatgctccaagaatctccaattggtagggtcccttctatacaacagtcaatccggttctaaccattatatagttaagaatgtgtattaccctaagttcagtcctacactgcctttctacgaggcatttcgcactccaaatggaggctatggtggtttgttctctgtcactttccactccacagcagaggcgattgccttcttcgacaacctagaagtccacaagggacccagtcttgggactaacttcacgctgaggtagcgtttgcaggacaggtgctgtcaatgtttcagacgatttgctaataactgtctagttctccgtatacgctacttgctcactatagtgagcttgactgggtatgtattcatcttccatcacgttggcttagttctggtttgtctaactctacttgctcaggcaagctcatttggcgtagagtttgacttggtgcggataagcgtcggtttggaagatgtcccattgcttcgcgctaaagtgcaacaagcacttgatgcagtcgctaagatatctaaatagaagtcattatcatataacagcttcagggtcgttcagtcgttaccttgatacaccatctagccttctcggtttcgtcgacggcacatcacatcttaagattatcgatattatatgagaattaacgtgggaacgtcaaaattgtgctaataaaaaagactagcgtatatagaataggtcaggcaagggtataagtgacagcccccagggaagtaatgtactacaaaatcatgggaacagcataagcgttatttaacacaggtggtcgacgaccttcatgaagcttcaggctggtcgaacaggcattcagtcctcgctatctattgtattagatagctggttcggaggcgcgcccaagtctccgctacctgttcgcctcaaagcctgtctcatggtttcaatgttcaaatcgccaccaaagctgggggaaaccggtctgtagacagaaagaagtgggctctcagcaccccggacacaacgatttggggagagctccaggcccttgacagaggttgagatgctcgtcggcggagaagtaccaaaaccatgagaagacgccggtgagtacaacggcgatggtgacatattgcgatatgctgtagccaacgagtttgggctgcccgatcccctgtgatgaaattcgttactgggtggaaactcccctgtttcggcattttcagcgttcacaacatcagcaaaagagatgaaactcaagcggcggacatcagatgcctccaagccctggctagccgacggaatttcttcgaaatcatcaatatccattgtattgtcggatgaaagtggatgcaatgaatgttccgcatgaaccccattcgtagcagaatgatgcatattatgggtaacgatctccaccgaatctggatcgagaccattgtccgtaattgccgcggatgatgcttccaagaccggaggaatatgattctctgttctgatatgtgaaggaattgatggtgacgtttggggtagcaggatatcttcctgcacactgcgttcgaaaatcagggatgcgggcggattcgcctgtaaaggtgaccgttcggctgctcgtccaggcaacggcggagtttgttgcggcgtccttcctcgcggggacgagaatgaactattgcttggggaaaggctcaatggttttaggcgggtagcgccagcagtcattgttgaatgcgcatcataggtcattctcatagcagtttctcgatcggtctctgcattttctcctctcacgcaactgcagcgccgactgatcagccgtagcggttttgtatgttcagtgtctcctccactaggtgccacattacccgccagtgtttgctcggatgtggccatgctttgagtttgttcggcctgcgtcttgtcgcttcccgtctccttgttctcgctcatgtcgaagccctgggctctcggttcacttgggcttgatacggtgaatgggctcacaacgaaatcattcaacggtaagcggaaactcagctcgtcaagaattggccaaatagaagatatctgtctcggtattggtattcaagccctctgtcgttcgcttaggcagtagacggacgcaaagagtacctgagatttgaagtcatgaacagtccacgacctacgtcggcatcatgcggacagcttgtgaagaattacacggggctcacgtataacagaatggacttcaaggcgcttaatgactagatcaagatattaggacgatacgtcagagcggcgttcaaaataagcaccggaatttgttgaattgggaagcgcggttggagcagccgacttgaaggggatgagctatgtgcacgttatgttaatatggcgaataaaacatggtctcaaacagctggaaaagtaacagagactttgaggatgtgagtaagatgatttttattcttccataccagggttcagtcttgagctcataacatgctgagagcaagaggtgcatggagcgagaagctgtggtggacacatgacacctgccaaggccccgggaaaggtttggatcttcgcataatttctttatgtcaagctgacaaattattccacgaaactccacccgtccgccggtttttgtcagggaaaagtttatgggctcttgtctgctcttgtgccgtcgcgagcttctagggacccaagtcgcctcaaggcaaaaaacgccagtgctcccaatacatgtattgctaggctcataggtctttcttttccacgtttctgtgctcgtatcttttgtgttacattctactgactgcattctcaaggtggttgctttgcttggactcgatagcttatattccctgttccccgtcatcccgcaaggcgaagctattgtgatggcgacattcgtttcagtttccagaaggcccatcatgggattgcctttttttttatctccatgcgagcctgtctcactggagttgcggcggaatcagtcttcttacaggcgcactaaacaacgcctacgagtcaaaccggatgcctccttcggttttccttcggatcaaacccaaagtcatatcatctacaacccgccatcgagttcaccctctgtgtatcataccccgacaaaattccttcccgccaacgacgcccgaaggacccttcgcgccgaaacccctgccaatacctctaccgttgaggaactgccctctgtgttcaaattcgaagccgaaaaaaagtatcatttgaccccatcagatattactgaaatccgcaaactccgattaaacgacccaatgacttggagtcgaggcaaattagcgaaacgctttgactgttctccgctatttatcgcccaagtatgtcaggcgagcccacagaagaaggagatccaaaaacaggttttacaagccgtacagtcaagatggggtgcgaagcgtcggatggcaagagaggaccgcaagttgcggaaagagacctggggtcgggacgagtgacccagacgtgtacggtggactttccgcgacttcatgctcaccttctttattaaaattgccgagcgtttcgagaccaacccctaagggcgcattcttcatgtacagtaatagccagggctgattagcaagccatgtattccagattaaacgatgcatccgggtcagataacattacagcatctgctctaagccacattggggttcttccgctcgcagcgagtcatgatgaatattgcagtaaaagctggatctctgcctaacgcaaccgggatctagcgcgcttagacacggagaattggcagttggtgggtgtcgggaattgccgtcaggtaaacccacccaacagaagactgcatgtatccagcagaatgcccctcaccctgcgtagcataacgacttcctttacaaaacatcagttgtccctctcattatcgctatcctacttaggaggtaacaggctatcgcaatatactgatactcgtccgaagatacctcagctattgtcccgccgctcattctacggacacataagtgaccacaaaatggcgccccaactcgaaccctttttaagcagtgcgttctcttcaacccaatctgaaatacagtctagttagtaatcggtttctaaaaggctgatgacccgtctggctcgttctcgaccgaagtctttattccggaacacacatagggtgattataggcgcaaagtcacgcaaggctgggcgattcgctgatttgccagacagaatgaaaggtgttttagtccgtcaaaggtttccaaacctatggaaaccttggtccttttaaggagagtcttttccccgcaaaacttgggggggggcccgg

SEQ ID NO: 5430 - DNA, 1583 bp, Emericella nidulans
  unsure (1)..(1583): unsure at all n locations
cggtagaatctcacacttctctatagcaacgctttcctgcaggaagtcaagtaggtcatgctctgtagctgttggattgaggttttggataaggatgcagcggcgcaggttttggcatgggtaagacggggaggtactgctataagcgttgtaactgtgcatacctttgcctggggcagtgccgggatgactctgtctaaagctgtttgctatgacgggtgggtgcatctggtgggacatggcatacggagggataagaccgaaaaccattgggtcgcagaaagagggttggatggtaggcgagtttgggacacctgagacggcctgatataacgggtccgtaaagactggcatgtaggtttggtgagaaacatatattgggttgaccatagcactgtaatctgcgctgtggtagtttgggctcgagggtacaacgggtcttgattatgattagcctagacactcaacacggacggtgggaaagcctactcagtaggtacgggagagggtggtatagcgctgatttgggccattcttggcggcggtgaataccctgtgacatagctgggctgtataatacaggtaggactttttgtaggccctgcaatcggccgagtcggcgcactcgttcgcgcaagggtgaccaccaggctctgcccttcccaaccgttggtggataatctgtctttaatggcacctctaagtcattgaccctgatggaagcatatcttgtacttacggtatgtcctccaagcctcgtcctcttccttcacgatgatttgccctagcccagtaggaaatccatggtgatcatcgtagaccactgcttgacgaatgtgcaacgcggtttgtcggaccaagtccttaagttcttgccagcgacagcgaggtgggatctgtctttccagtgagccatggctgcggtgatattgaggtgagagaactcaccccctggaggaagagcacgtattcctcctcggtacccctatttctagatccacgacctttcccgcgcggagggaaagacattgcttcggtagtacagactctgctttggtggatgagtcggggataatataatgcaatattgcggaccttgagcgaaatcacgggttcctatccggtgggtagtcgatatcgcaaccccggaagagtagtgacaccaataaaacgacgcgtgagacactagatcttgctcgtctatcgatgcagggataattggggctcgttctctgcttctgacaggatgtccttgtgccactattctacccccaggcgtatcaacttcaagatagaatcgcaatcccagggcaaacagcaaacggtaccttaaggatgtagcaactctaggtcgcaaactgagatgccagtgaaagataatggtgtctctggactttaagctagagcactagaacgagtagaaagaagcagcaggtggcttgaaatgacggtgcttcgatctccatcgagtcgaggcacaataacccgggaaaaagggcaacagccacacccgccggaatgaccgtctagatcggcccaatgaaagcccgtcacaacgggtgaagcaacgggtggcaanaagt

SEQ ID NO: 5431 - DNA, 7069 bp, Emericella nidulans
gcaacccttatctgaatccccagctctcaagatgctcttcgacatgtaatctgtcatcctctatggactgatggcgctggcccatgcctcccctctcccagagctcagcaagcgcgccaaactcagcgactttcagtgccctgacggcaccacattgtctgagcacgacatccgcgaagcatttcacgagtgccgaagactcgatgatggctctatcggcaagtacccagccttctttggcaacaaaggccagaacggaaaggtgttcagcaatattcccgacggcaccgacctgagggaattccccatcattgttgatggcgtatacgaggccggtatgttcctccagcagtgcataccctgacagaaagctgatgagttcaggtgaacctggcccgtaccgagtggtcactgattacaagaccaaccacggtgatttccgcggcgtgatgcagcataccggtgcaaccgtcggtggttcctatacggcctgcacgcgggtcacggctccaagcgtgagctcagcaagtatgacgaaaaggatgataaaaaggacggcaagaaagatgacaagaaagatgacaagaaagatgacaagggtgaaaacgaagagcgcagcattaaggcgactgagaccgactctaatgaattcgaccacacaaatgacctgaccactcgcagcaagaagaagaagatcggtagcgctacctgctctgacggcgtcacgctctcaaaagacgctgttgccagtgcgttcaaggaatgcaagaagttggacgactatggcgccggcggctacccgcacaaattcggcaacacgagcggtaacagccaggtctttgcgggcgtcaccaaggacctacgcgagtaccctatcattgaaggtggaacttggactagtaagtcatcaagagcacggttatcagatcaaagttgaccattgcaacaggcggcgaacccggcaagtaccgcgttgtcaccgactacagtaacaacttcgttggagttatgattgaaaatgccggtgcctctttctcccgctgcactgtcaactctgattaaactggatggttgcttttgagttaattagggtgtcacatattaggagctggatgggttgtctttcttgcatgcatggtgttctatagagattttgctttgtttattgctagttcaacggactcaaatctgctaaagtttgtcttttgcataagtgactatgggagttctcccaacagtcttgtgcagtagatagagatagttcttgctggaaggctcgattctagttgtctgttgaatttccctaagtagctgggatgttgagcgttaacaacgcattaagggaggggttggaacgcgaagaggcggatatcggtgtatcattatcattctagtgctgatatagacgcgatgtattggtttatagccttgcatggggtgtgcaaggcagtcataactaaacgtttattactactgtattgggtactctgtaaaagagcctgccatattagtctgccatatactggcttttctggtaaagttaatctttgcctttgaatcgagtactcgatcaaaatatatatttgattgtccaggcaatacttaaacaatcttgtcttctactattggattagatattgcgtatttatatctgctgctactttcattcgttcttctgcaaagccgtcctgacagaggactcgctaccaaagctagtgactgaaatgcaacaaggggcattttagggacagtgctgacttctggactcagccgcatttcacctaccacttgacctaacagcagttagggctgactggtcgtcacgtattttgtgcgcctactcagagtacccatgatttactgacctataacctattgccatgtttgatcagcgtaacggcaatacttagcacctagcttcagaagtgtgccttttttttactgatcttcgtatctattttcgtcagacaccacaataggaaaagtgaaccaatcaaagtgcgtacatcatccacctccctgcatgccgtcgccgcacatgccgacgacaaaattactagagaccgcttcatccacagtaggttcgcaacgactttgagctacgacgagcgggaaaacaccgacgccagaccgacatcgcgggactagcacagccgcaacaaactaatacgtggggcttcgtgcaagatgccacaaaagcggactgcaacatcaagagcctcttggttgaagatgagggtccaagactctagcagcattacagcataagtcctagcctcaatttgtgcaaggaaagaagtttaggattgtcgtcgtagttgtatgagtgcgaggtctggttccgcactaagtctgttagttcgcatggtgagcgtgggtctgtgggcggtgctacagctggggtattcgccgacagcaaaaccgtactggagttagtcgttacggcgagaacgaaaagtccactgtccttaaggcggacgacgccgcctggcgttgctgctcatgagtttgttgagccattggtttctggctggacatatttcgtgtacagtttatgcccactgtgtgatggcgcatcagccttctggaatagcctcaccagaactttagtattgcccacgaagtgcgcgcttaatgtagcctccaattctgttagtacgaatatttgttccatgcggcaataaatagaagttatatgaaacagatagaacttgaccctgttcagtctcgaaaaaccggctaagcctaagtaagtctagcatacatgcttccacagaacacagaggtataaggggctgaaaagcaaaaaatacaatagaaatagaacacagcaacttagtcatgcaaagacagtaagcaacgacaggaaagccatagcaagaacaaccaaccatagagaaacccccaacaccatggcgacccgcttataataccgcaaatagcccgcctcattgccgtgcgggaaggggttcggcctctgcctccccagaaactcacacagaggcccccacccatcctgacacttgaaaaccagtagccgctcccgtggcacaatactcttcacccacgcactgtgcgcatggtacagcttctccgacggctcgggctcgacgccgaatcgctcagctgaaagctgcatccacccgcggtagagatcgttggccgccaccacgccgggcacccagtatccaacccatcgaaagcagtcagaccgcagatcgatgccaaagccacgccatgagcgcagccagacggccgcagaggtgcgttctgtcaggatgacttttgcgtcggggtacatttccaggaggtcgggtaggcatgcgctcccggggacctcgagagtgacctcgcagccttgaaggagtttagcaagcttgcgccgccggagactcgtgtcttttgtgtggacgattgcggcgctctgggacaggttgtcgaattggcagaggggctcggcaaggtggaagcatggaccgtagcctaactcttcaagggcgcgtttcatgctgattgtgcctgtacgagggagtccggcctgagcaatgttagttatgtgtcgggtcgtgggtttgttgctgggtgtacataccacgataaccttgatggtccctccatggtgtactcctgatgtgatttggagctttgcatctgctttggggttgggtctagtgatcgtgatgccagaccggaggacaagccccaacgtttggatgctgagcttgtagtagagccaagagttggacttgtgcatgtccatttgtaggtctgtgattttcatcgtgatattcgtgtacggtagttgagatgagtgttggggtgaagtggtcgactttgacgcgcattgaagacgtattaatagacttttggcctttaacaagctttagtgtacgaagccgcacagtgacattggcccccatctcaaagcgaacaagcaacacagcccaacaagcatcgccaagctatgttgaagatcatgactcgttccagctagagacatcctcaccacgaatcgtccttggacaagagccctaggttagttaattctagccctctattgcagcttgcgcctctcgagcacttccctctttgaagcccacacgagggtccgcatgaaggtattggccccaatagtgaaacatccccacgtgggccttcagcttggggcagttgtagttgaaaagatgcagtaaccagaggtttactttctgggaccaaccgtgtgagccttgcatggagtcttcgtgaccaggataccgcaggattgagcggcataacccgacatggggccaagatttcagggagcgtgcccctgctcttccccactaaagtgctgatgggcatccgaaaatagctgaggcaattctcttcgtatctagtaacggtaagtgtcgttcgtgcctattattagacaggaatactctgccgcactttcatcatataggattgtgcgacgtgtgggacgtgtaaaagctcatatgtttgtaatattctggtcttacagtattcaccgggcgaaaccttccagcagtagttcacttagttaccctgcccttatctacaaccacagagctttgcttcaccactgagtcggtataatcggacatggagaaaaaagcgcaagccaaaccatccagtctctgtatttacatattcctcaaattaatctgatgtcgtctcattgaacgaatttgtatagtagtactgagattgttatatatcaatgcattatctgaacttaagttgagatattataagacatagttcctggactgtccctgagcctaagtatgagctagattacgcctccggacatatgatgtgtatcgggtcattgaacatctgaaaaaccgaacaagtgatgttaaacaaagtaaatcaataaaaaaaaaaataagaaacaaactgtcaccagataccacatctgcctctaaaagagcaacatcatttctcaagtctcctcatctttgagggaatcagccccttccgccgtctgacccaccaccttcctcgcggtcaaggaaatcgccgtggcagagagagtgactatatactccataacaatgaccatgaagaaatgaagccaaatacttgtctcatcctccgacatcgggttcaagacagacctctcccccgaaatcaacgatccagccgagaaggccaaccggacagccataaagggcacacacagcaaagcacaaacaacagccgcacgctcagtgcgtagcccttcatctggactttgagcatactggttatggaaagaaggacggtcccaataaaaacggcgatgaaaagggcgatgcagcgcgcatcaagcggaggtcttgcgcttgatcatcccggcttgtgtagaggtctcggccgccgtatgcggtcatcactgtggcagctacagtgatcatatgcagcgggatgaacatccagagagggagacccttggttaccggggcgttgctgcggttgttagacgatgtatcaaggagagcagacgacatacgctcgaatcaagagtcctatcaaaagacacaggacaggtgcgaggccgattgtgtctaggagggtggctgtcgataggagattggatttcgcggggttcatcgctgctaggccgagtcctgctgcggcgattcgcaagccggaaagaattatgagggggatcacgatgggccgccatgtgtaagggtgtttattgccatggaatagaatgatgaagaggatagcagggatgatgggcccgtagaatgccagttcaatcaggtaaactgcatctcgtagagcgaacatggtgaatatggaatggatcaagcagatgggcgcgacagtggaagttgaaagattctgtgaggtgtcagactctagtgtgttatgaaaactgagggacaatagctattgatcctttaataaatggcataaagatgctacctacttccagacactcaacattctcctatagaattctcattttaagagcaacgtggagaaacgatgttgcggccccatggaacccatttcgcaaacttcgcagaggcgaagcaaaaataatgacccgaagtcttctgtgcaatgagcttgcacagatagagtccactgaaccttactattaataaagacatatgttggtaccataactatggcacacgagtgttgtgcattgggggccaatccctcgacagccctaatcttatacctgagagtttagtgaatctccactcaaaagatgatcgccaagcataccaagcaaataagcctaagcctcgtatttcagccccgcaggtattattttcgggtgatctgcagtgtgcaagccactgttagtatacaagaattcggccccagcaagaccagaaatagattcaacatcgggacatagccaacacaaaatacgccttgggcggtctggaaaaaattatataagagctcagtaaggtcgccattaacacaacaattcattcagaatcttacacagcagtatgcttgaggttgaatacctggcctatcttgtcgcttcttcaccactccaactctgcatctactccaccagcgacgatttctggtcctcaacgcttgacgatacccatgctcgctctacttctcgtcctagtggctctgacgagctacttcctcgtgagaatgcgccagcaacgcgggatgttcagaaatctccctgggccgccgcatcacgctatctggggtcactttttaatcatgcgagatatcgcaagctctcttccccctgatgcaactccacagctgtttgcgcacttgatgcgccaacggtacggtctcggtgatttcttctacctcgatctgtggcctctcgcaccgccgcagcttgtcattgcccatccagaactggctacccagatcgtccacaagatgaatctgcccaaggagtcggcagtcatgcagaaatggaccggtccaatccttggcgagaaatccatggtctctgcgaatggacacgactggttcattgcccgcaagtctttcactccggcttccagccgcggaagctgcagcagcatatacctcatattgtggatgagacgcaggcttttgctgatat

SEQ ID NO: 5432 - DNA, 4725 bp, Emericella nidulans
tgctctccggttaaagcgggtcaggcgtgagtctgatattggcgtcttccatctcgggcggctggccggtcttgtgggtgcggatttggcgcgcacgaagggctgtgctcaaaagggccttttctttgcgtgctcgctcgtcctcggctctacgcttcgcagctatccgttcgagagaggcttttcggtctgcaatcttggacgagatggtttggagggatttgttgtttggatccagggataggccacgagtagcgacatcctcagcctccgggatcttgtcgagcgcgtatagcgccatagcagaacgatagtaggctttgatgcttttggggttcagcttcagaaccgcggcacagtcgagggtcgttgaacggtagttctctgtgtttatcgttagccatccagctcccacatgacgccaacatgtttaaaaaaaaaaaagtaaacgtactcagctccagattacacagcgcccgatttatatacgacgcctcctcgacctcccgcagaagcctctcctcctccttctcatcctccggcttatcccacttctgctcctttgagcgcaataccgcgatcccctttgtatagtactcctttgcgtcaatccacctcttctccctcgcagcttcattgccttgctcgcggaaattctgcgcaacgtcgccgcgcgttccttcgttctgtagtgcgcgcaagtcctaacatgatattttcgccgtctatattacacccgtcagcaatctactcacatcccacggtccctcccatatttcgagatgagcgaaagacgtaaactcactctcatctcccgctttgctgatatccgtcataaacagcggcgtcttgttcagaatatccgccagctcatctgtcgtatgggactccacggccgccatggccggcgggagtttcggcgcctgaccatccttctcgagttcttttaatcgctcttcatttccaggcacggggagctcggggcctgcagtgggcggggtggttggttgcggcggggcggcgttgaggtctagcgactcatcgaagtcgtcggggagttcttcaatccgcggatgggcggacatatttggtaccagtcgctttgatttaggttttttagtgcgggctcccgtaaaagtcttctattgttgttgtaaccagctggctaagggcttgattgatgctcttgggagaaattttgagacaaacggtgcaaacaggcggggagggttagccctacagctatatggagtataccgtagaggggcatttggagatggacgtaggctctattgctggaaggctcgattagttcgttgtttgacaatgagagtattattcattacagtataatatccactgcacatacgcgggttcgtttgctaagctgcaggttgagattctttgtatttgcgtagatatatatccagacgttgaacggcatctgagccgtcccaaacatctctacaagcttaacctacaatataagatcactacaactggcagtctacaaaagcaaaatggactccttcacagaatccatttcgcataaactcccttacctctcctcagaccaaaaaacggacctgatagactccatcgcgaagaagatgataagcaccatgatcatcatttccagagagattgaccgcggcaatctagacgccgacaacactacgcccattcacaatttcatcagaaccattctgcgccacgagcgcgcgcagctgcggaagctagagcggagggtggcacggtaccagcgccgagcgcgacgctggcgggcggagcggcggcggatacagcatgagattgcggagatagtgcgggttttgcacgaggcttggatggagaagaatctgaagggttcaagtccaagaacagaggcaagggcagagcgacggccagactcgggatcgggcgacggttcatgtggcaattttggcgaatcagagaacacacagtaagaaagatcaatcgagactaggccgtgatatggggccggttgtcccgtctctcttttgggaagttccgaggttgtggttgaagctgaagttgacggggtcagggagaaataaaatgcggattctcggccgggtattggtgtcgtttgtcggcatttgtttgttggcgtctgcgagcagttcaaaaattagcaggcagatcgaatagaatttccatcccttttattcataaggtcagaatattctgggttcaaatcgtagtcgataaccgggcgaaagttgaagaacctcggtttgacgttttccttggctgtgaattgatttcggaaggccgaggctccaccgtctcgtcggagtgcatgtgttggtcgccatcctgaatataccttcaccccttcatcttcttctctcctatctcttttctctcatacatccacatctcttctagaccatatcttcaccatgagcaaacccggagactacaacgcagtccgacgcgacatcgccgcgcagctcaagaagcccggctacgatgatggtagcgcaggccccgtcttcgtccgtctcgcatggttcgtccctgatacagaacttctcttgtatcccgacggtgaccgctaacaagcttttaataggcactcctccggcacatacgacgctgcaagcgataccggcggctctaacggcgcgggaatgcgctatgaagccgaaggtggcgacccggcaaacgccggtctccaacacggccgcgccttcctagagcccgtgaaggagaagcacccctggatcacatacagcgatttgtggacgcttgcaggcgtcgtcgcaatcgaagagatgggcgggcccaagattccgtggctaccgggccgtaccgactttgtcgacgactccaaggtgcctccgcgcggacgattgcctgatggcgcacagggcgccgaccacctccgcttcatcttctaccggatgggcttcaacgaccaagagatcgtggcactggcgggcggacacaacctaggacggtgccatgctgatcgctcagggttccagggcccttgggtgaacaatccgacgcggttctcgaaccagttcttcaaactgctgctgaatatggagtggaagcccaagacgttagagaacggtgttagtcagtttgtgtatattgatccggaggcggaggaccatgaggagccgctcatgatgctaccaacagacgttgcgttgagggatgatcctgcgttccggccttgggtggaacggtatgcgaagcacaaggatctcttctttgaccacttctcgaaggcatttgccaagttgattgagttggggatccagagagatgcgagcggcaaggtcacgaataccgataacgtcaagggtggctaccactctgcgcccaagaagagcgatgagccgactgggccgccccgtccgcatacagctcagcgtgctgctaagctgtaggccgatgctggggtcaattagggtgatttttgtatatatatggttctctgcacggttttgttctgctagatttagacgttagataaataagaaaggatagacaacgtaccctgaagacactttgacctgagacaggggctttgtggtgtttataagacttggctagctggcggtcagaccacctcgaaatgcggggaagttggggaagtcctcgctctggagaaggacaattttaatagtgcgcccgttattggcaggacaattaactaaccctgcagttagcagtaggctgctgggtctactagatcttggtagcccgacccgaggtagcaggtagcatgcttagcgcagactcgcagtacatctaaaatcgaggttaatttgcatttcagaaaaagacaagtttacattgacgctatgtacagcagcgccaaacaaccaaaaatttcagactccagtctaccgtcgaatccctacacaatatctcgtacgaaccctcgtctctaaacaaggtgtttagactctcgggccccttgtgacccttcttggcctcgttgcgaaatctgatgaaagcatggcatctatgccctgttggaagcccttgcggcctcggtctcggctcgaatgctgagagcgaacggatttgggactgcacactgtcaaatgtgcttccattatcgcttcttcttccacttgtggagttcctgttcactaaatgatgagagtgaattcttgccgacgcgaacgtcttacagttttggcatttcagggtccgaacggctacaatagtgcagtcgtccaaagcctgcagagtgacgtcctctaaatccctctcaaggtgaaagactagggtgcatagacatggcttggttgttcgaactcaataacttttcttgcttcccgcttgagatcaacctcgaagccgcagatgattacttgcacaacaaacaagatctctattgtgggcccgtctgacgctcgacgatggttgtatcccgggattgacttgttcgaaggaagtccagagcgtttagatcaacctctggttcggcttcttcactttgtgcgggggctgtagcgtaggtgtagtaggtgtcgtaagtttatgtaattttggatcaatcttccctttgtttaagctgcgcatggaaaccggtatacggtgcgagcaaagcttgatcaacagtaagtaacgagagacatgaagtgtgagaacagtgtttaaaattttggatatatagaggccaaacacctagttgcccaaatgtgtagcaccctatgactaaaaccacaaagg

SEQ ID NO: 5433 - DNA, 4163 bp, Emericella nidulans
agcagagttctatattgagctgcctctgacatatctccttgttgctaaaggacaattctctattgacaatgcttttgttctttgaatatgttatccatttgttctttacggggctgacccggccttgccaatcactgcatcgtggtgatttggagaaccgccacgtcaaaagggactgttggagctgaccagggggcgggataggagaccgaacattcggagacaacacggatagggagcattaggtaagggaatggaaaagacggaggctccccataatgagacattagacagctagatgcccacctcgtcaacccctgaccagcccttcttgaactaacacgaccgccagtatggctctcttccctgtagtaaatactctggggggaatacgcccatgcttttgtcaaaaaatatggatatcatgataagcatatcgcaactgagagcgtttgcctttatttagggctattcggaagtcagatatcaaatgacctgatgcgcataacgagattgcaatcggcacttatgtacggacgccagcactgttagaagacgcttgtccaatgtctaaggtcttggttacctgtcaatctgtagatgtcttgcaagaagaacccaagttgaatggaatagaccatgtggacggtctgtaggttgtttgaggcgctggtttactgatataggactgctcattctatagcctagactaagctaaatctgattctacagccttacaatcgccagtccttatctggtctcctcaagcccatcacgcctttctccaaagctacggccttgaagaggtctttactgggaaaaggtgcgacggacatttatcagcatcacatttgcctaacgaacagaatctcagttcagcctcaggaaggtgcaactgactaaagtctgtctactgcccaggaaagagcacactattctcaaccactgcgttcgtcttgtctaattgtagaagcatctgtgaaagatgcggcttcatgctcagatcccaaggttaatccagtacggtgcaagcctggggccccaggtaccgcacttgtataccgtgtacgtgtgtgggcacatgatatgctctttatttaagtagatacaaacttgactcgtttaaattacatgtatgaagacaatctccttcaatatatgaacctgacctagagcaccggataggaagtatcgattgtgtgtccatgctcaaggatagatatagagataggacgtaactatcacctcaaaccctgtacaccatcaccgcaaatcaagccacccgtcttgctcaaccccgtctgcctcttctctccaaaacaaagccctaacctgtctggccggcatgccgagcaagcccccccaaacccccgccgtcccgggactcaccagttcctccacctccagactaacaagcacatcaacaacccactcctggcagcgtctcttgccgtctctaggtgcaggctccgagcggatgatcttgacagcgtgccgtcgttgctctgacgtaaggtctgcgatcttcaccatcccttccgcttggagtgaggagatgtcgatcccctcgcacgcgtcaaactggaaccagagcggagagagagagatcggttggatgtgtagaaggtcgccgtaggaggcgcccggcgtgcgcaggaagaaggaccagtgcgagcaggatgttggggttaggccgagccccgagatggggatgtacagctcgtgcgttggtgtcattgttcaggccctcgatgctagttgaggctcggccggcctgatcgggttgaatctcgtgtgaggttagtctggcttggatgaaagggggtgttctgggtgtgtcgatctacgatggcctggtaggattgtagatggtggggtcttacagtaggtgggtagcacgacagaagacctcggggaatatcgtgatgctgtacttctccagctattaactcagttgataggcttatagttgtccgtttgaaagagtaacagcgatgaaccagctcgcgctggtttggagccggtcaaacctggacggtcatcgggaatgacgagatgagatcgagctgaggtgagcgaggcattctttggagctagcctaggccgatgcaagcagattaaataagcgcgggcgtggtgaggccgttctggttagttatcctaaccgagactcctcattggagtattttggtacttttgtagtatacaagaatacatttattcttggtggaagagtcttaacgtcccataacacctatgctaaaatcaaacgaaaagaccacaccaaatcatatactgacacaattatccaaaaacgaatttcatccaaagtctatacttaccacaccatccgcactataaggaacgatgttcctatatatattcaccgtccccaatataaccctcacgaccgtccaacctctggcccaacctttcaccaacttgtccattatgtttcatcatcgggtacgactacaggccgcaaatcccgctcccttccagcttcgccttcggatacagaaccctcggcaagccgctctccataggcactgacacttcaccgctgcccgagactgtaatgtcctcgcaggtatagatctcagtgactgccgcaccagctgtgaacccggtgttcggaaccgagacagtcgatgaaccagcgtcacgccacgtctcgtaaggattgtgatgatctgcgacccgtcgaatcctttgcgcatggcaaggacgttgttttcgttgtagatagcatagttctgttcattcattcgccgtcagctctattatataaacccattactcaaggggccgcggtatgtaggggaaaggagagagatactttgtaagacaggtaggtctcattctgccagatcgcatgattccggatctggttcgtcttcgaaatgaactggtacagctcgctcgtcgagtcgtatccggagagccaggtcgcctcacggtttgccgggtctcctgcgccggagtagtgctgttcttgaccggcgtagatgatggggatcccgtcggagaggatcacgaaggcggcgacgttcttggcgagggagatgtcgtcggtgtacctgtattgtctggtcagtggcattgcctagaagaaccggggaaattgggttgaggaagcgtacgaggcaaagcgtgggttatcgtggttctcgatgaagttgcccagcaaggtagcgtctgagcaggtgtactttaccgtttcgatcatgttggctagatcactgagactgccagatgtggagctgaaagcgcgcaacagggggtagtagctggtacagttagcgggcatgcaggtaatcgggataaatagtgggaaagtacatgggatagttcagcaccccgtccataacctcctggtacccgcatgtgtaatcgggatcgccctggaagacctcgccgacgcagtacacgcccgcggcatcgttgtagtcgcgccagaagtccttctgtacgtgtcgagcggtgtcgatgcgaaggccgtcgactttgttttggatgtgagaacaccttcatagatatgtatacagtactgggaggataggggaggggctttactagagtagtcagacacaaggtcacccacccagtcgtaccaaatctccttgacctcctcgttggtggtatcgacatctggaagactgacagcgtcggtgtacagccagcaatcctcgacctgggtctggttgtcgtagtccgtaatatcgcagggagtgtggaagtagtctgccgagttaaaggggttgaaggcgctgtagtcgaccgacgcggccggggcgtcgtagccctacatggaccatgagtattggcatctataaaagcaagcacacctgcagttcaaactcacaaaatgattggcaaccacgtcgaccataaggtacattccccggtcgtgcagcgcgtcagacagtgctcggaggtcgtcttgagtgccaaagtgcgggttcaacgcatatctgcacttatcgttagttttatgccactggatatgaaggagacctacatatcctgctgccagtacccatggtatgcctccccatgctgcccatcctcgagattggcagtcactggggtgatccagatggctgtgaagcccatcccctggatgtagtccagctggttaatgattccctgccatgtcccgc

SEQ ID NO: 5434 - DNA, 9578 bp, Emericella nidulans
ggcattcctccgagaccccggcgttcgcgacggcgatgtccacctgcggaacttcgtcgaagactgcccggagcgttggccatgaagtcacatcgcagggcctgtaatggatcgcttttctctcctcttcctcgctaccctgatgctcctgggtgggaggcggatgtatatcgagcacatacacggtggctcctttggcggcgagcagctgggcagactcccatccgatgccggagcaaccgcctaatttagcccagggtcaacggagtctgacaactgaaagggaaggcgatggggtagtagataccggtgattatagctgtcttcccgtccagacgggggatatcgtctactgaaagattgagagaagtcatctagtatgcgtgtgtgactgcgtgcttagtggcgggatgcgacttcggtctcatgctctacaaacccaacagccaggctgaaatcggacatgaaatataattcggttcgatcgagatcgaattagattgttcgcggatattgcctctcttcgaccgacaacctcgaaatgccagcctttgttagtccacattgcacatcacgggcattacggaatgggggtcacagtgcgattgtttccattaggccattgtacctcaacttctataactgaatcacgtgagatggacttgcgtccgacatgaaaagtctacggagtactaccctccgctatcattgttcagtaagccagggatccgaaataggctgccctatcggtttcccatgaatacaaggcttccatctatctaatcaatgaaaggagggcggcctcgctcgaatcattctgtcggcgagtctgagcctcattggacggtcgcaggctgctatcatcgcgtaaaacccgcatacccagaaagcggtgatttgtagtatcccgaaaggggcaaatgtacatggctgtggacgccgtcgtttagggctacggcaagcgaacgaaacaagacgatatctcagttcggctccccatatcccgagccaatcatgttgctgcaaatacagcccatagatttagccgcacgcgtgatacgcattcaaaatccacaagacagatcctgaatctgactgtgctgcacgatctcctcttgcattagccatgtttggcagcccgcgcatattaccaatgtattacacacccctctcagcagcaatgggagcggctcaattaccaccgaggaagtgcgtaccgcaggcagcgcggtctgtcttcccttctcaaaatcgtcgtatatttctcccgttctaactcaagtagccgtcgggctgtgggtccgaccataccagtctcagcccgattctttcgtattccttcgagccgtgccgaagactaggtacgtgggggcgggtggtccgaattcttccaacccgattcgccacggatcgcgctgttctgcggggcgtctctcttgagttcagaccaggggttgtcttacactcgagagcacgagttatctgcgaccactcttacacactgccacccagctgatgtgttccaattacaccgctgctataaaacgtgggctattccagtgcagcactagtattattactccgcagcctgtcagccagcttgatgcaagccgtgatttatccgatctccacgaaccgcccttcaggcccaccagttggatctgggccgcgaggatgcgttcgcaggatgaacccaaggctgaacagccattacttaaggcagcttatgtctccatggcatatatgggaagacatataagacagacagtgcgcgttgacagttcagccactcccagttagacgacctctgtcgattcgatcccgccatgtttggaacgctgcgctacctccccgagaagaagaccgcggagttcctcaagcgtgagtcaggggttgtgggtaacaccgctaccaacaaacctcagcactcggcctgcgacaattgcagggtaaaaaaggtacgtggcctcaaatgcttagagactttaatgcatttccagcccatgtttaaaacagctaatcagggtccttgaaacgtagcaaacagatccgctgcagcggccgaagagcgggatgttcgcggtgcaagactctttctctcccgtgcagctatacccatgtccccacgcggaaatgcaagaggaagcaagcgcccagctcttcaaaacccgacgaggagaatgagacctgcccggaacctggcggagcggccggtcgatctcccgcgagggacgcagccgcagctgccgtgcagccgtcccggttgacgatgaaaccgcatggcgtagacgagaattatgccgggctcgacatggcaatgcaccaggtccaaggtgacccagactcggtcctggatccgatgctgaaggaattttccacttggtccagttgcctcagttggtctccagggagagatggtacctttatgccggactccgactacccaatggcggggggtccacacgtcccacccggttcctttattgctgggtatggtatattaacaccgcgcgcttgtttgttctacgaccgtgctccagaaataaaatactgatggccgacagttacactgggccggaaaatactgcacagtagcccccgccgaccgtcgcccatgatctcaccccccctgatctacttccgactccaccgttgacccatattcttgccccaacagtgaccacaatccgatcgaatgaggcgcttccggggactgctatggacgagcaatcttcttgctcatgccttaactcggccgtcttcctcctggacgaattagagtcgccccatcatgaagggagccccggcgagcagggtctcgactccattctttcgatctaccaggaagtgctcttcctgtgcaagcgcatgatcaaatgtaacccctgccgagaaaagtcggagaacatgatggtgctcaccatggtgcttgagcgattagccattctctgcggggaggtgattgatgctttcatcgcacagagggaagcgaacggtcccggggcaccgcccgtgcccgcagccacgatggagaagcagcctttggccctgggagaatacgagatcgagggtggagactacgaggtcatgatgggggtgctggtgacgaggcggctgtcggaattggaaagcttcctcgcctgcatgaagacgatcggctccctcacccgccgcgcgcaccagcaggcaagaatggcgcgcgttgagcaacatatcaaggacttgtttcggaagctcacctctgtctgccctctcgtcacagaattgcgggtcgatccgaagaggccagcggcgcggatgttgggagaagcgtgtaagctacgaaatgtagggctatgcattgtaaatgatagcgggccatgcgtgctctggccagatatttctttagtaggttcactattgctgggatatatatctgaactttaactcgtggttccgcctttttcgattgcagtttcttgttgtttagaagtaataaaaaacaagaacgagtcgtggtgagagagcgaacgtccacgggtttacgggtgcgtgtctctctcgggagttgcctatttaagcgaaaataatgccaaactgggctatctctgccaagcacgatacgccagtaaacttgaaagtgggcaggtatatatctcgaaaaccgtttcccgtcagccagccgtcgaagagctccgccgatactgccctttgcgccagatcaccctgcacaaaatgtcggcgagctgggttgacgaaccaagcagcttgctgggcatcttcgaagtggtgtttgtcctggtaaccctcaccttctgcctccccgttcatagaaaaagaagcggcatcctaatgggtcggaactccagacactggtctatgttagcacgcgaatcctgtataacatttactttcatcccctagcagcttttccgggtcccttgctggctcgcgcgtcaatggtatgtctgctctcttcatagatgtccccatgttccgttttcaccaaatcccaggcatggaggatctaccattccatgggtggtcgttttcaccgagcaattgacgaacaacaccgccgatatggtatgtggccatggcctgtccaccattttcttctttcccacgcgtctaaccgatcaggtcccgttttccgggtatcgccgaatgagctgtcttttgccagcgtcgcatcttggaaagacatctacggtcatcgtgccaccgggaaacctcccttgattaagagcaagttctacgagatctacggcgcaggctttggctccctgtgcatcggaagtgagcgcgacccggaaaagcacacgcgaatgaaaaagtctctctcgcctgcgttttctctccgttctctgggagaccaagaggtcattgttagccaatgcgtcgatcgttttgtatcccggatgggtgagcctgagctaaatgccggggggttgaacatgaccaagtggtacgaaatggtggcattcgatatcctcggagaacttggtatacccccggccttttcactgctcttccaaaaggtcactcgtggagtctaattatctattctttcaacagcctttggcgaatccttccactctatcgaagacggtatgatgtcgacattcacccctcggtgcacccccggcgacccttctaatattcatttttataggaaaaccccacttttggtcctcattgattgaagatcatttgtattttattactgtggcagacaacttccgacatttccccgttgttgctctgatagccaagctgctctcgccgtttctggacagcatccgcaaaaagcatactggatacacaagaaacaaggtggctcagtgagtctttccatccaagcctaagaattgaaatggtggtcatttacatcctggctaggcgcattcgttcatcctccccccgcaaggacttcatggccaacctcattggcaaggtagagtccaacgagatgagccgggaagagctcactgcccacgcgtctaccctagtgtgagcatatcatatccgttgtatgtatccccagtctctaattccggaaaataggatcgctggtggagagacagtagccaccttccttgccgcaacaacattttatctccttcgcgacgacgccgtgtaccagaaattgaaagcagagatccgcggccagttcaacacctacgaggagattacctgcgccacggcgcagaatctgccttacctgcaagctgtcatcagcgagggacttcgtatctaccctccaggctcccaaggcttccctcggatatctcccggggcctcgatcgatgggatctggatccccgccggtgtaggggggttttcccagacaaacagggcacatggcgctgataatctatatgcgctacaggccgaggtctacacaagtgcgtggacagtgacccacgatgaagctaacttccatgacccccacaccttcaaacccgagcgggggatcgacccagactgtgccgatatcaaggaggccagtcagccgttttcccttggccctcgagcctgtctagggcgaaagtaagttatggcagccacctccgcagggccatcgatcgcctccttttacagcgaaggcgctaatcaatgatcgcacagcgtggcttatatggagatcaatctcattctcgcccgactgatttggacgtacgatatggagttggtcaacaagtcaatggattgggagtcggagagttctctacatgttatgtggtcgaagccagagctaaaggttcgtttccgccaggcgaggccatagcgaatcgaccgaccaggtagacttggaggtctccactctgggtaactgtgccgccggagatgactagggaattttcccaggtgcttggttaggtgtcatatttgtattaagcaagaagtcagtggcatatgaagtagacttttcctgttctacttgtgcatgcccgcctctccaaacgttggcatcaataagtttcttgtatttaccatcgtaatatgaaaaacatgcggaaacgcaaagccttgaatgatttccttggtattgcggcttcaaccgatacctctacaccaagagcggtatcctcttgttggttgagatctggaatgggggacttcgcatcgaatgtccgtttcaggggatgcggtctgtaggggccttccatcttttggccagctgtgctggctgcgaagggatacttttccagacgataatgattccccagatcggtaggcctgcggcggtgggcagagtgtaggtgaaagctgccatatcggcattagttcttagcttatcacaaccaaggctttccccaacaagaaagttgttatgaatgctcaaaggggaaagggtagaaggaagctgcatcaactacacgaacgtagcctactaaggataggatgccataagacgattgattctctatcttgataacgatagttgtcacttcttcaatgtacaactcctcgagggatcaggccaggggccagagatcatgccatacagatcacgtggcacgtgacacgaggctcaacatgatatattcgtatcaaaagtctttcactgacttgtgtaaaagtcggacatgttcatcctggacaacaattatcaatcgacaaaggtcgacatgatctttagtgaactgaaggcgcctggcctcatcataatccgggtatagctcacagagagtacagagactcgccggatccttcgtcttggtcttgatctgatcccgtgacaggaggtcggtattttactgggaggaggcgcatgtcccgcccgagatcaccgtcgatattccagtgctcgcccgggccggtattgattcccccgacgatgaattgtgggtcaaatggggatagaatcgcggactcgagtgcggttaggacgtcgtcttcctcgatggctctgcggccggcttttaggagtgaacggcgaagggactcggatgctcctgcttcggcgacgtagccaactgcattaacgacagacaagtcgatggagacagcgggcaggttgcagtggttgacacgccagtgacagagagcgtcttcgtacgcgcctgcgcggaatatgctgcctgactggcgtatccaagcaccccgttgattgaggaaaagaggacgaagaaatcgaggtcgccctgcaaattgaactggttctgaagatttcaaggtaccggcgaccttgctttcaattgtgggcattccggcgcgaggactctgactagcaccattgcaagtgctgtatgtagggctaggtggcccgttatgttgctaacaaacggcccagacaatcgcaaaatgcttcgccatccaagcttaagaaaacggtagcaactggcgtgttcggagcacttgcgacggcatcctcggctacttagggcagtgggcactttccaccggcgggctcgtgctcacctggggttccaactgtcgcatggggcgtgatgcctatacctgcaacacgtggaaccctgggcacaaaagctactcagagtacaagatagcggctcaaaggtaccgaagataggggggccctctcacaccccctggcaaatacgccgctcccaactccccaccatcagagccagaaacccaaccctccttccaatgccccccaaaccaagctccatcgaaattatcaacctggtcccatttcactctttccttccacaccagattcccacaatcatccaggaagacatgtagcacccctccacccggagctgtttgcgcctcggcgtcttcaatgaagagatgagctaccacacaatcagcctggtagaaccggtatcttctagctacttcctctcccctgccctgtgaaatcatttgctgctctccatcaagtatgcgctgcttgtcatcagaatcaaaccattcatcaaagtgcttccgcagctccccctctgcaaatgcaagctgccctgttgttaacgaatttgtcacccgctccgggaagagctcaagaatacgcgctatatccgcattgtcaaatagttctttgtcgtcaaagactagcgagtcagcgctgatagcttgagcatactctacatacttatcccagaatgctgcgcggtcttcatcttctacgtcgtagcagatgcgaacccacatgccctcgtcgcctgtgtactctgcataccggcgaagagagtccgggcgcagtgggcggagaattgtctcaatttccgcctgtgttggctgagcgggcgcgtacgttgccagctcccttttggtgcggtttgagtagggctatgatttctattagaggagctgtattcatgtgagaatactgaatcaaggactaaacttgtctccgaattgccccgagattcagccactggcggacgaggcgtttacgttgctggtcagggagttcgtctggcgcgcctgagtagggtgtgtcccattgttcctggaagtattttattagtatcattcacttgatatgcgcgtcgcgagtacgaaccagaagatatatatcaagtggtaggtgtccccattccggaattggaattggtggttccggcaatccatctgtgtagatatggggaggcattgtgctgatggccgaggggtagcgggctagaagggtattaagacctctcaacgggctcaggagccttccgttaatacgctcaaacggggagaagggaatttgagccaagtaacgtgacctagcccgcggagccagtctttgagagtctaggtagttgttgcaagccaacagaatactgtcagagtaatcagtccttttaaagccggaaaaactgcaagccgaggctactcacaggttcaggtcggtgactcattccgcgctaagccacaaacggctagctaatcccccgaggtcttcctacctgcctaataaggcaagcgtagaaaagggcagcttgccagccgcgggtggctgcccggtttgcctggataagaggaagaaatagacgcagcgccctggaaggctttcagaagtcgtaaaggcagttcccatcagcaatgttaaaactacggtcaatccaatagtatctacatctatagacacctaccaacactatggcgccattttactatatcagcaacgaactgaaggctcatgatagagcctgttccaattccgcattatgcaggtctgccatcacggtgttgacccaaatatctcgaactgcggagggtatcttggcgcgaggcgcgcgatgactggttaatgtaacgagatgttcctctttccgcttttatcctaggcttcgaacctggccttcaaagactgcggtggaggaggctcttcgaaagcgttctttttgacccaccgaaagtaccaaaaaagcgcaacattcagagctgatgctccacgggagtcgcggtgcgaaatgttttgttttccggttgatcaaggcttcaaacaggtgcggtagctgaaaatagtacgattcttctatttcgactttccaaccataaagtcaaaggatgctgctaacaatctactaaaatgatgagtggtgtactctcccaccttgcaacaagcttacactgatgtctccgcattctatcagcttattttgccgtttctgaactatgaccatttcctc

SEQ ID NO: 5435 - DNA, 4817 bp, Emericella nidulans
tgacgtgggtagcgttcgacgcgaaaggattaacggatggttgatacgcttccggatgagggatcggttccggattctcagaagatccgtttccatgctcgcggaatcgctcttcttctggatttgtcagcgccgcggtgctgtctgttgaaccgtagggcgtccgcctgggtagcttggctcggtaccccaggttcgaattgggtaggctcgtcccttcttccaaggctcggctagggatgggaagtattggcggtaggagatggtggcgcagaggatgccgaggagggagccagtgatcacgtcgaaggggtggtgccgtgcatccatgattcgagagacagcgatcaaggtcgcgccgaggcaggggaacatgacgatgaacatcttccaaacttcgcctttgttatccatgatgtggagttttccgccgagccagagcgagaggtagaataggcccgcaaaggaagctgagttggttagtcataattactgttcagattgtctactgatagtatcttacagctgctatgacctattcttaatcagtacatagacatcgcggaactgagtagtgacgaaacatacctgaaggccacgatcggaacccatccttcaacagatgcggatccccagtacatatgcttatatccgacagaccgtacggctttggatccgcgctacccggtctgggctgacaccgatcaatgatatccggtctgggcttgccgcaagcgttcttgagagcttgggtgatcacaaaacataacgcctgagatagaatcaggccgagaaacccacagttgagctcccacagtctatccttccatctgtatggtccggtaaacttcctcttccctcccgctttgatcggtttgttatgcgagaataacccgtcaatgaaaagggtccagatggcgattatgatgagcggtcctcctccggaacaggcgacggcctcgtagatcgatatccgttcatggaccgcgtacgggtattggagggagatgttgtttaatgagaaacgttggtggtatggttcgattcgatcgagtatccaaaagcaaatgacgagcgcgctggtcttattagcttaatcgacatcgttgggttagtccagggacagacataaggatcacatagtcgatgatatatctataataaacaagagtcagtcaggtcgactaagcaaggatgattacgagcactcacgaaatgacgactcgcggtcggagtcggcgcttcgagaatgggagcttagaggggagactgtccatctagcgcggcgccgccgatttgtacgggatcgagattgtcgagcagggttcctgacgataatcgagtcaggaaactgtgcacgtgtagaaagagaagggaattcaaaacattaaataatttaaataacagaaatgattatgaattcaaaggggaggacgacgtctgaaaaataaagcatcttattctcttggctggaactctggggtccaattgcagatccacctgaccctgcctataaataatgatgggcactgctagtaatgggcttcccttaggcggcacgtcgcccagtctgatcttcagcactcagccactgccattgtcattcagcattgctgttctggacagtttcatcgttgctcactctgagcatacctcatcttctaagctgagtttcattcgatcgtctactccataaatatggggaaacacagccaggctaaagaatgattctgcctagaatacttaggcagccatacaatccagacaaggtggctagaacgaaaggccttggccaacttctgattcacggaacagcacatcacagtgtacaatatacaagagtccaaggctcaaaaatattccattaaacaattaagattcatcataatccaacaaagattaaagcagtatacctaattgatctgagaggatatggaaagttatgttacaaattcaaacttggccaggcttttgacgtctatcatcgaatgcctttgtaaccagtctcattgcttgtccattctaacagacagtgatgaacagaccgatcctattctcaaattagttaatggctcaatgaaggatcgtttgggaatactcacggtgagggattataatcttcgaagaattcgagctcagtggttccagcagtcgacatctcgtagccgacggtctggccagccgggcactcggaactacagacggtgtaggagttcccgggggaaacagtgaactggccaagattttgactgatctgaggagcgttgttgtatgtggttgactcggtggcatacgtttcgactgctgagaattgaatcgtgccgtctccactgaaatcgaatgctgaagtctcaagatcctcttgccgagggaagaggaaaacaagggtacaagtctttccagcagccgtggcaggaatgtcaaagttgaagattgtcgagacagtggatgtcacagttccgttgaactgagtgccgtaagcttcatcaggggaggacgagtcaatagggatgatcaaatgggggaactcatagtcgcccgagagatcagcagggcaactcccaccggcaccgccgccagcaggtccagtgggttggggacctccaccgccagcagggacagtggaagtctcgcctccgccagcagggccagtaggcgtcacgcgctcgccaccgggaccaacaggagtctcagtagaaggaggttgaccaggctcggttcctccaggaactccaggggtgtttgactctccgccaggtacgccaggcgtttcagtggtgcaatcggcagtaactgttatatatacagtcgatgttggagggcactgcgcacactcagaaggaactccaccgggaccctgagatccgggagcactgggcgagggcgtagcaactgggacagtcccagtgctctgaccacctccttcaccacctcctccagcgccgcctcctggggcacttggtgagggtgaagtgccaggaccttcaccactcccagcaccacctccagggacactaggcgagggcgaggtaactggaacggtctcagtgctttgactagggcctcctcctgctcctcctccagggacgctgggcgatggcgagggcgaaacaactgggatcgttacggtgctttggctcgggtcttcgctgcatccagcaccacctcctgggacactgggcgaaggtgagacaactggaacagttgctgtgctttggccaggtccacctccagcaccacccccaggaatgctgggtgagggcgtaacgattgggacggtcggggtgctttggccgggaacttcactgcctccagcaccacctcctggggcactaggcgaaggtgagacaactgggacagtcgcagtgctttggccaggaccctgagggccaggtccacctccagctccgcccccaggaacgctgggtgagggcgtaacgattgggacggtcggggtgctttggccgggaacttcactgcctccagtaccacctcctggggcactaggcgaaggtgagacaactgggacagtcgcagtgctttgtccagggccctgtgttccggggccacctcctcctgctcccgttcccaagcaagaatcggccgttagctgaatgctaacgcagcctgtaacatctgcactgttcggtgaggtatagatgttcatttctccattttgaccagttgcacaggcaacgaaatcagtttgcccgttataaccgagcaggccgctcgagtcgactgagaatcctggcgtgggagttccacccaaatcacattgaaattgtgtcgtgggagctataaggattaacgagttagcaagccttccccattgtcatggtttagggtcaattggcatacgagtcaatatacagccacgtccactaccatcagtgatagagccatcagtgttaatacagaactggccctcaggcaagcttcccgagtcaccgcctacacggttctgaccatctccaagctggccaacagggcccgaagcaccgccggatgctgtaaggtggaagcaacagctggtatcgcgggaaacaaatgcttgggcgcttgccgcaaaggctgcaaaagcagcaaagttcctcatattggccatgaccaaatgaagcgggtgaagcgagtgtaagggaagagtcaagttgattcttgcctattcttaagaaggttgggatacgctccggaagaaagaaggcaatttataacttcgggtggatgctccgggtcagttatcggactgcatgtagtcatagcttctgcgaagcatcgaacctaagaaaatgacattcaggttgacccaatgatacgccctccgatgtgagcataaacaggctgtgtgaaggccgagaaacccgggcctggaccttctcaatgctagacgtcattcctgcttgtggagctggattccatcgtcgattgagccccggcatacatctccctgccactaggttatgagcgaggccaatccaagcaatcggtcaacagtgaggtgggccatcagaagatgctggttcgagtataactctgccttgatcagctttcctcagtacatggttctggcgagcctctgcgagcaaattgtatttagatccacgagttcaagtggcactgatgggcttaacgagcccaccgccgatggtcgagtccgctcacgccactgcgaaacccaacggctgagtctaaccttgtcctcaagtccggcaaagattgggtttatgagagacattgccccgcgtctgctgttgttgctacggaaagcgtataggtacacatccaataagcaggtgcagtagcaggtgcagtacaag

SEQ ID NO: 5436 - DNA, 6820 bp, Emericella nidulans
ggcccacacccgagtcgctcagcatcctcctatgggctggacggttccgactcgcgtggatgatgcgtaatactcctgctttggcatcgttcgatgctgtgctgaagggccataaggtaggagcaaggcacagtattacgccagcgataaaaaaattcatcagaacaaaggataggctgaactcgctctcatgatgaaccggcgacacacgcgagacacggagcgcagcttttagagagagatccattgacaagcgaacggctgataaatgctcagcgacagcagttcgaaactctggcttggcttgatgttctagaagaggccggttaatgaagagtacggcactatcgtatgtcaattgcaacatctgagactgaagaaacaagtgcctgatagtacggttctctgatgatggtggattcttttcaatggctgtcgatgcaagagcaggatgttcttcccagtattgttgtttgaatacaggggatactccggatttccaggtatctagagatgcctgggcattgcctatagccgccacgagagaggcaaacgattctagtgacaccggcgtctgtagattgataagtcgaaccttattgagggtcgtccgcattatctcgtagagccgatacttttggttatgaaacatcaggccattcgcgtttggatcttgaagcagatacgacacggttggtggtaggcgggtatcttccaactcagtcatctcgtgcaagtggcagaacgcagcatcgagtgaagccggtcggccgtatatcatagcactataagtatccgctacgataataaaattccaggtccgacgatagacttgagataggaccgggtcaggatgggtaatgccgccaggacagtgcattgagagggcatatgcagtgcggaccgaaaggccaagcatgttccacgcgagtcctggagagccgtgaaaaacatagtaagtccccaggagaagagacacttggacagattccagactacactcatctaatagtttcagcacgtgtaaccggacctcagcaatcaggctatctcgcagactcgtggcttgtaaagagaaggaagccagtaaagaatgccctggccatctggaatcgtgtgccacacattggagtcccactgctgcggcagttaaggccgctatcactcgaccgcgagatgattcactccacgaggactgacggagcagaggagtcactgattgcataaactcgatttcatggaagataaagatgaaccagtgcatatggtcaaaatacgcctgtaaagcagcatccataaccgcaggcgggggcattgacatcttctccagcgtccactcaggtcgagggttgggctggggactggcacggccaggaatgcccgagatgtcactagagtagagggtagcgcgctgtccaaagatatttaccgcgaagccaaccgcagaactgctggcgccataattctggccttcatagggacgatccaccgctgcctcgacgtgctggtttgacgatgttgcagctgccggaggccgcacagctcgcttcttccggcggataggagtattcataatatcccttgattgacaagatacacctgcccgaacgcacatcgtgcatggacgggcctcatcacacttcaataacattaacctgtagctttcccaagggtaatgctgacggacctttagtttttgccgccggcaccgttggcaggcacgggagaccctgggaaaatgaggcgactgaggctgccgcaggccttctgccctggtttccaccatctctgccaaaataacaataccagcaccgcacaatactttcgaattctagctgacgccgtcgaaaactataagtaggacaacaaaatgtggattcaaatgggttaccataacctgaggttcaaggagacggagaagctgtcacgtgagcaactcgagttttgacaggcgagtctaggtgttcaggcaggactaagctatagccgtagctgctctacacctacaggctacagaacttgatatacaagaccaactagaatagttagaggatggaggagcaagcgctgtggacctcgagtaccagaggattgccgtacctccgtatcatgtactacacaatgaaaagaaaacaaataagaataaagaatataagataataagacaatagtaaaaaagagaaaactgaaaatatttgaaagagaataaataaaaaatacaaaagtcaacgaaaagtcaagtggtgactacttggagcaacgcctccaccggaatctataattagtgggtaccatagatgacttccggtggaagtttacagaccagccaagtcttccaaatcttcggacaatgtgccccatctactacccttggttcaaccgacgcaagcacaaaaaaagtcctggcccattcggtcctgctagagttgcaccagtagtgcatggtgaaggatcatcccgccacgttccctgccgtgttcacccgattcaagcacgagctagacttcccttcatgcttacaccgtaatcatgagatggcgatcgcggtcaagagtgttcgccgtttgcacctggacctgagggtccggttgagcttgaagaaggccatttgcacactattgagtagtggtgccactctggcatccaaaattcttgttaattcttgttttggttggtaggaactacctgtcgtgtttcggtatcatgcgaggtcactgttgctgagaccactagaagaaggtttggcaactaattggcaacccagggtgttgagacttaagttgttcgaaactctaaggtggagtcactgtggtggtagagtccattgtgatgccgtacttgaagaccctatatgatgaacggggtatggaaagcgttatggaaccattcttggatttatacgtctttgtgggtaagctctcgccattctccccgcatccccgcaatattggttaaaattatccatagagcctaaggggttaataggattctgttctccgaatccataaaatgttgggacttcacccaggtgatgcaaatttgcttttgatgtagagctggaagccagacgcgcctttggcgtgaaaatcttcgtatttcttttctgctacaggagcagaatctatctcattgccgtacactttcaccttagcttctcctagctccagtccgttgaagatgctcgtagtgttgaatattcgagctgaaatagcattgcagttctgtaagctaggagctgttctgtcccagctcagaaggtgtcgaaatgcaagcatgcatttttattcttgatcatgaagaaccatgccaggattcccaagcttgctggatatctgctatctccgcgagcattcctaaaggcagccgatcttcttgtagagccactgtaccttcccgagaggtggaagaacgctcgttatgacttagaccgcgatatgtttggctcgtatcttgatgttgtctctttacaacatccaaccccttggattccatgctttcggactgtgggactgccagtaaatcttgcaaaaactggcgttcttgtggtgtcattctgagggagtccaaaaatgggccatattggccggcaatgtcaaacgccgtaggcttatcatgttcgatgggcttggtgattcgggactagactgattggggctcttcgttgttcggcgcggccataattcggggtctcttggtgatattatgggcgagaatagtatcaatgtaaattgtgtgtgtagacagttatagtgagatgagatcaatgagcatgcaaaaagaagggttttgtcgttgggaaattatcagttttcaacgtctttgccagcaaagtttataccataagcatagaagtcttggatcaattactttttcgggaatggcacaaagattacgaaagctaggtacaatggaaggaacagaatgaggggtaaacatcaatcataccacatttgcttgccatgtggaacttccgtgtttgatctgctggtgatcaattccgagcattcattccaccggaactgaaggagacagcggttcgacgccaccagcccccgacctacccaccgcaattggccttccccagacctgcattctgacaatctgggtcgtcagttgtcgaatcaggttatgatgactcttctgattgatccagcagctagcctgtggttagacaaactacaagtaagagatcgactgagagagtgcttattccactcctggctcagtgagccagctcgatttaagccctgaagatgagaacctattatataaagcccatgagagataatcctttcagaaactaagttcacacagacttgtctctctagacctgtctttactgagacagatctgcaaaggtccacttgccttgcaaaaaatcaaccactctctgccggtacattctagtataaacacaacaattgtccagcagcgcaagatgaagaaggattgttgcattcccaaaactagcccggacgatcatcttacctccttccctcggccgctatggggccagcacctggcctagtattttatgagactgaacgtcaagggcgctgtctatcacgtcgaactacatcacatgcgaacaattagcgaatataagactgaaacctaacgagccgctcctgcagcggtcagtttatggatggtgaagaaccggccaagggggacatgtcttcttgtaggttggcgatgagtgggagttgagcgatggagtctttgatcagaggcttggctgaagaggataggtttaatattatctactttaaaatattcctttggttaccaaccgctgtagtgaatccatcgcccagaaaaggtcagtgaagagctcccctgacacttagattccgcccctgcattgctcaatatcagcacgtacaaaatctagaaacttctctgcttgatcctgaggtacccctactcttgaatggcgagcatcaagagcaagggagaccacatgaacatcgtgctccttaaaataatcaaccacccagttcccgccatccttcttagatccccatgtccctgttttcgcgaacctcaatgcccgacacgcattcagtataccatcagaagtcaatgacggttgccggcgatgccaatctagagattcgattagtgaatcgataatccactccaccttcggcgcagcgaacacttctccagctggcggtccacaaagggccgtgccctgcacacagcccattgccaaatcgatcaaaaaccagaatctaggctcggtggatggatcgagattggtataatcatccatatctcttcctgtgttgaaattcatctcaaactgcaagttgtttgtctgcagggctgcattggctctagtaaatagcacaaactcaagtttgcgcgctgggcagggaatggaggcatggcttatcttgcgggagagttgtttgtaatctgatatcggctcatggatgactgcatagacgtcgacgtcgctggtgtcaggttcgtatgcgtcgtaaccggcagaaccgaaaaggtagactgcgagcaaattgtctttcagctcttgctgcaaggtatcaagtaggcgcgttagatatggggctaaatgagccttagacatttctggccggttaagaacgttgtcgtggtgatttgattattgcgcgattctatttctctatcctgttgacctctgaggcgttctaattcgtaatggtggggcagttgaccttcgttggaacattgacgtcgctgaaagagtagattcgtgaagggtgagccagaggagcgatacaagggcgtcgcacagataacgcatgagtcagcatactatcaacttcttcactgaataagatgccgtcgtatcccatgtcaagcacattggccagggcaaggataaggcaacaagaatgattcaaccaactcaaaacaaacctttaaggttccattgcagcgaaaaatgcccacaccagtataatagtcagcttagctctccaacgagagttagcccttttggctgagtaggaaggtcaacaaattcaaagctatatacatcggataaacctgcgctcaggacaaccacagctaccagttacaatgtcgcgaggtagcagcttcagaagatgtcccgaggcatcgcggtcacaagagggccttgtcctccaggtaggcccaccaaatggtggttcttttaacactgacacttcggactaaaagctcttctccgttacagacccttttgtaatcggtcttatatcgtggcgcgttatcttgagagatcttgaggagcttatcataacgcgcaagctatttagcaccaaaccccctgccattttagacaatgccctggcttctggcgagtacagccgcgggatctacgcattaaccaatgagattttaagaggttaggtcaatatatcaatacttattgttgataactattgtaagagtacacgatgataaactcttctaataaaaatacgaatgttgaatacttgtcacgagaatgtctcccacttggtatttaagctctggaacgcacaaatcttccgccttctagtcttatatgcctataagtttggctaccagagtagaggagaacagcgccagaggtcgagaattcaatagtcattattctacatggatcactaactccctactctcgcacatcttatagcctagaataagtattcccgcgatttattcgggtccaaccagctcgtgagctcggacttcccaaacccttggatcaaggtgtatagcaatgagagtccgcttgatcagttttggagttggaatagagaggagaatgagaatctggggctttcccggataaagactaagt

SEQ ID NO: 5437 - DNA, 2660 bp, Emericella nidulans
cttattgatcaggtccactgggagtagatgttcaactctgtagatctccattccgtaccgggtatcgggtttgtctgaaccataacgagtcatcgcatcctggtacgatagccttcggaacggacccgaaggagcctcggtatccatcagggttgaccaaagtcggcgaataataccttcaacaacccgcatgacgtcctcaccagttgcgaaagacatctccagatcaagctaaaaccgacggcattagtcacaagaccacaattgacgagataatccctatttacctgggtgaactctggttgccggtctgccctaagatcctcgtcccggaagcagcgagcaaactgataatatcttgggatcccgcttgccataaggatctgcttatattgctgtgggctctgcgggagcgcatatgccagaccatgcttccgagtcggaactaggaattctcgagctccttcaggcgtgacttaaataacagaggggtctcaatctcaacaaaaggtggtcggccttgctccaattcttctcgacagacattgcgtacttgcgcccggaactctagcgcttcgcgtagctcgctgcttgtccggagctgcagatgcctatgcttaggaggatggaccatatccggcgccatccagatatcgcttggaaagtcgttcagaagttggatatcctcgaggacaatctcccatggatcccgcttctccatctcggcattttttgcttttttagcctgaactttgcccttcaccgtcacaggactgttcggcctcagtgacctgagctgctcaaaggacgcattctgggcagtcgaaacaagttgtatgttatatttcatggttgggtcttgtagccggacgaaggagagctttttggatatatcacttcgaactccaagatagccatgtagagtgacatcctgacctggcgaagcttgggtaagaaaggtctgaaagtcgtatgtagcaggaggaaattcgactacgtagctcatcaattagctgtccagttcctaactttgctgagcttcatacacgatggagcagctgctgaacataagacgcacctgccttcttgtatgtttcgaggaaatcaggctgcgctggagagctcccagcctgctcgtgcaggtaggaagcaccatggaaagctctatgggaagagttaatgcgaacatacgatcccgcaactggcgctcttgtgctgcatatgcacttgtataagccgaaataactcgagcggaggcgagcgctagactgcgccatacgcaccagcatcgtttcagcagctctcgaaggaattgaaggatacctacggcttttgcagatatactccggtactcacagggcgagatagagaaacaagcggcagaaaagttccgccccccaaaaaggactagtccttctctcctccacaatataaacggacgaaaatctgtcaagctttgttttccttcatccttccaagttttatacaagtgagtgctacgtttggtctttcccccatcgctcgtattctaacatactcgcagatgatgaaagcctagtgtgttatatttgatccaatctctcgtcttggagcttagcagctctcccttcggggcttaagggctgctcggtaccggattgagggagagtgataaatgcgttcggcacacaaccttgttacttcgacggacgcgatgaaggcatctctgattctataatacttggtggtgtacactttaccgacgcaccgaggcccttgagatgttctgctaccactagcatggtaggcgtcatttgcatgatagggttcctccagtcggttatcctggttttactgacaaccattacataaacggatacaaatatattcaaattgttcttaattcgccctgcgccttggcccctgtagagccttatacgctgtagacctacaaatgcgagtaacaagagttgactcaggtcggtgcagcacaagctgatatttgcaaatacatcattgagattaatgttcgatggttattaaagcggttctgggcttgccttcgtgagtaacctgtccagcaactagaccagttccgcatcaaagattttccgccggagagcggcgactagcggcttatcatagatattccggggacaaaaaagttccctctgggcttgaacctgttaaaaggaattatacgcccagcttgctcttcacttgcctcctgttaggcccggtccgatgcggccacgcccgttctcactgccttgtacggcacaccttcgctcgccggcagtcagtcgccgatttccacccccagtatgcggcgctcgtcagtacacgcggaccgcggagattttgaacacgaacacattacgccggccttccccagccgtatattcatccagaaatagatcagggcagcaaagatggattacgcaagcgtacctacagcggattgaggaggggaaaaaagaatgggcacaattcgcacaagaaatcaaggagggaaagagaaagagcttcgtggagcacttggaggagagagggctcatacacgatgttgtcgggtgcgtcgcgactctgccccccccccctgcctcaaattgaaaacccttcaataaacgttgatatggacatctgcagggatcgagacctgctgcgccgtgtttttcaaa

SEQ ID NO: 5438 - DNA, 5892 bp, Emericella nidulans
  unsure (1)..(5892): unsure at all n locations
ccaagatggcaattcatacaatatccaagcccggataacatttataccgcgtatcgctactctcccaccccactccctgatgcacggttaggagattcgttggatcgatctcctccttgatggctaacagccgggcataattctccttcccccagaatgagtctataggatccgtctcgaaggtgtcggcttcatttagatacgcccctgcatgcggcgtaaaatgccgcagcggattcatcctatcgtgaaccgcctggaaaatatcccgcactgcattaggatggccaattgtgctgtctgcgaatggtaaaatatggacggaatgccagagccccgtgcgccaggcaattgttacggaagaagcgcctggtcttccgggtcggtctgactcagggaggttttgagagtagatcgtcggcgcagtgacgcatataaagagaggcgccactggtgaggtcggactgtggtagtcgctctgggaatctgtgaggattttggtgagaatggatgtgagtttattctggttggttgtgccttggaaggaccgccgcggtatgattcgggaggatacagccatcgggccgcctccgctcaggccggacgatgattcatcgccaatgagagcttgtatgacatggtaatatgtgtcgaagagggtcacactgcccgtcgcgagtgtaccgagactgcttgcaaggtctgtgacaggcttcattgaagcctcagcagcggataggttgagcagtgacgtagacatgaagaaggtcgagacgccgtagcccagtgggccgagttggatgtatcctccccaaccttcagaagcccatttgtcggcattggcgacggcgacggagataaactgcgatgcagtggcgaaactgatattcggaaaagtggccagcgcgaggattgtaggcttttcggggtggacgagcatgctcatttccgtaaccactccaaatgtgccgcctccgccgcctcggagggcgtaaaagatgtcctggtttagacaccgattggccgtgacataagtaccattgggaagaacggccctcagctgtagagcgttatccacgcccagtcctttggcagtcagtccgctgcttcagaaccaggagtattcagggccaggcaatggggccttaccgagctcatttgaaagcatactgtgcccgccgccagtgatccagccgccggctgcaccaacggtgtttgaagcgcctcccactacgcgatagttatgttgatgggcgaattcgtagatccccgagaactgctgcccagcgccaaaggtgatagcgtctcccacggcttcagtgcaagcttctgggacgaagtcctgccccagcttgagtggcggttgaatatggtgcgtcctgagatgttcagtacactatctcacaaagctgcaatagtatggaaaagcaaagtaccataagcctaaagagcctgcaccagagctgcggcctgtgtagtcatgaccagtgttcttgatcaccaaatgcagattgttcttctcagagaaagcaagcgtcgcctggatatcctccacgctgcgagcatctacgaatttcgacgatgacgctgcccttgatagcatacttcggtagaagactcggggcctgtcaattccacgtcaaacgtgcaacctttaccagtggcctggcatgcgccccagttagactatacattcattagctgggcgttacacgacctggagcagaatgggaagtcagggtcaacaaacttgtcggtatccaccaaaatggtcagaagtaaagcgcccattggttctgccgttttgcagaacagtacattccttaacatctgacccctgggcctgcccatcgtattggaaataacaaggagccaggaacggttcgccattgtacagatgcccgttaaccgactcgttaaacgccgcccatgctgcctggctcacggaagacaatgcagcagtaggtcggtgcgctaggacatttgcagcgctgaataatgctgcgagaagtaaacataacatttctcatggttggaaccaaggaacaatccagtgcagacagtgcgtgcgtcagtcaaatcccagtaatcaatatatagcgattttcagcccggagctaacaagtcttcctaagccacatctaggacatgcaactcttcggggctaatttccttttgggaacgtctgctagattaattcccatcgccagtccaatattataggcaggcttcagaaacacctcatacccgactcggtagttgtacctatccctgtcgaattctaggtcgattgtgtggctgtacatataatgggaagagctttggcattggttaggattcccttcgcaataataagctccctcggactagcttgctcatgcaggctcgtttgaggccaaacattgaaaactctggataaaatccaaggctgaatggcaaacaaggatagaaacgccaatgacctagggcggaaggctcgtattgcctcgtccaatcaatgtcacttgattctttgaccccaccctttgcaccatgcgaggagtatcttgaaaatgtcaggcggcagtacaaggtcccatagcacgctagcaggaagttaaggcaagcgattggatgctgaagcgggccagatgtgccaaaacaggcgctgtcaattcttagatcggagcacggtcccgttgcgaattggacacacgatgagaaataagtccgtatgatgcgggatagtttcgtgtatcatacagccataataccctttccttctggcccaggctatacaatcccatgcatcagccactccagcagaaaactcagctctttgataccacctccttcctggccccatatttttaaacgctcgattactacccggacatacgaggcccagttaacgggtagactgacatattcagcggaagggatctcatcggtctttgccctgaaggcagctatgaggcataatgcgtgattgaagcgcactctgcatgcaccccatgatcccgggtgtcggaaaaagggcacttcgtgctgaatgcggtatacggcgagaagcagtgactcagttgctttggtgccatacaatgctgcaagctccctgtctaacgaggtgtgaatacagaggtataagtatgcgcggcagagaagctcgcggacttcaacgtagcgttctcggacgagcttcacgagctcgggttctttcggtggtgggcgggattcaagaggcatattaaagcggagggcgggaggtagacatatcacccattgatgcagctgatcttcgagctggcaaagtgtaccagacaactgtttgatagcgggaatactgagacttggcgagaggatccgaacagtatttcgcacgcgattgagcagtctccgcatggatatctctgcgagatagtagtagtatggagtcgagtctaaggccggagcggacgggctgtgagcattgttatcaggactaccactatatggtgagtcgtagacagaaaagctcggcagtgcaaatggaaagtctgaaagcgagagatcggatggtggtagctcgcagagctcatatcgaacctcactatggattacccagatcagtgatttgccgggccagtgtagcgcggaaggcttaccattcggatttgaggcacgtccagtagagccgttgttccaggccttctcgcgttagctataccatgattcacagttcgattagggccaggaatccatactctcctcttgcgcagacctttccccatttccactccggtgtttcatgttatatgtctgccacagcatcgatgccgtgcgaaacattttccaacccggaatcggctcgatgttatactgataccagaatctaggtgcttgtcagcataagcttacgaccatctcgcaacaacttacccgaacaagcagagacattggactcccagaagagtgttatcaagataggcagcggatattcgttttctggccatggccaggtaaccgagggattctttcatccggtgctcaggcactgctaccgtcacgtaggtcaccgtctgagaagctccatagctaggatccgggcatgtgacctctcttgtttcatcctctgggtaggtgccccaaatagctgccagtgcaaggacaagtagcacgagacatgaagaagcagaccagtcaatacctgtctctagcacgcgcgctatatatgtctccaactgctctggatcgataatcgggttcttggctagaatcttggtcataaaaatttcccgtagctctagtattcttcgcggttcaaagctgggaatgactgtaagtttccacggtcagtgttccatagttcactccacagaaaaagcaggaataggggaccaaccggtgggaaagcgatcgggcttttcctcaaatgcagcaggaggaaatgttgagactggtctatcctgggggaaaatgggccagctcaagatcatatctgaaccagtgattggagttctcagcgtatcattacgtgaaatcagctccgtatcttgcggctcgactgaaggctgaatgaagttggaaaccgactgcggttgctgaactggaacaggcagattatttgagggactggcggccccgagtgtctctgctagtaagtgttcctgacgttcgactgattcaaggatcttggagccccattcctgaagtctaacgagcagttaattttgaacatagcagaatccatagcagactgatgccgcagaagaaagagcagaaacgaaataaagaaagagaagaagaaacaaaggtaggctgacattgacagtggatcagattcaggatatatgcaggcaaccccccggcggaggcatttaccacagcagggacgactgctgtcacaacgcgttttggacaagcggcgagcttcacaggctgtcaagactctagtgtgctttcgcgacttggaagggcccgagggagtctccatctgcaagaattgcgatgtgtggggagaacgatagtattaacgagggagatcactgcggggagtacggggaggcctcgcgggctagacaacagactcttcagccctgggtagtggcgacgctaaaaatcaggccgttagattatgcacgcagggtatcttgagcatccataaatatcatcaaatgatggtcgctgggagggccgttggttctgaagttccacccaagacttccgtcttctcagcctcggctaagtacacagcatcgcctcaaacacacagcctaaaatcaattttcctccaataacacaatcaattctacgcttgtctctagtctaagctaatctaagctactcagctcctcagctaaaggccactccagtatcgcgtctggttgacttcaaactgtccacgggcaacaatatcctcgctcgaggtcccaatcagtacctgggtatcgccaacgttcgttctntnnccatccnctgatctcaatccaaaaactggttgcatacttgtcaagcctaattatcactgttttttcttctcccggacgcaggaacaccttctcgaatccctgcagttccttctgcgggcgcggtgtcgggctattgggtgctgccacatatagctgcagcacttgcgcaccagcagccccgccaatgttcttgatctttaccgttgcattcgaagggttctctggtgtgaatgttcctggtgagaccaaggcttctggggataccgcaaaagtggtataggataaaccatggctacgtctcaatcagcaataactcatccatggtatgttcaggaaccatacccaaatggaaataagacttcacgaccggtcttctcataaaaccgataacagcatatatgtcctcgccgtaaaacattcatacgtacacgcggggtatatctagcaaacgcgagtcgccttccca

SEQ ID NO: 5439 - DNA, 2675 bp, Emericella nidulans
gattcgatgggcagattctcgagaaccggtgtacaaaaaacctaaaaactgaataaaaaagtgcaaagaatgtagtaatgtactgaatgcagactcgagaatattacagcatctccgtctatgtatgtatgctgattgattcagatgttgcccagtctgaaactgctggccgctggtcattctcgtctctcgcgtctttacagcatctcgctaatgtctccagtggctataccttgcttgtcacgcgtgcttggatgtctatacccccggtctgggcgcggggaggtttatgcggttctgattgggagcctccacagcagtccaagaaaaccccgggcgagtggcgcccactaaaatgtcttgtgagctttcaaagggggctaatacgggatactcccaacccaatggacacggctggatgttacgttgcactgcggcctgttttgggagcgaaacttaacatcgctggtatgggggaggttgccctgctatgtggttcgggtgcgcagcatggcctggtcttccccagctgagctcgacaagggtgcatgtacggggaaatataaagctccattaaccgcctccttggtgtttctcttcttcctgatgcttttcttcattgattagtgtgctgttggcgccagcaccgcctttgaagatggctttcaagaagtcctacaatgtttacttcctttgcgggttcatgacccttggtatgaaaccgtgattctactgtggggatgatactgactggccaggtggtggtctgttcggtttcgacatctcgtcgatgagtggtaagctgaatgctctgcctgcagcggcaaacatctcaccatcgcaggtgtcttgggtaccgcggcctacaacaactactttcaggtcggcggcggcaattacaaacaggtactttggtgttctcaattcaattgcagatctatacgctaacgttttagggtggaatcacttgtgctatgccatttggatcgctcgtcggtgccctagcctccagtttccttgccgacaaatactcgcgtgtcactgcaattcagttctcgtctactttgtggattattggatcagtgtacgtatagtatatctactctttgacctgatctgactttttagctttcaatgtgccgccaacggtatccccttgctggtcgtcggtcgtgtcattgcaggcctctgcgttggcatcgcctcagctatggttccggtctacatcgccgaagtgagcccaaagcatatccgagggcgaatgatatcgctacagcaatgggcaatcacctggggtatcctgatccagtacttcattcaatacggcgctagcaacgtcgacggcgggcctgacaatgaaacccagagcacagcggccttccgaattccatggggtatccagattgtccccggtgtaatttacttcgttggtttgtttctataccctaaatcgccccgctggctggcgagcaaggaccgctgggacgagtgcatgcatgtcctcgcccgcctccacgggaacggagacatgaaccacccccttgttctggcccagtacaaggaaattcaggacgcgctcgcccttgaacgtgagcaggctagcaccagctatcaggagctcatcaagccacgcatcgcaaagcgtgttttcctgggcatgagtctgcagatgtggtcgcaattgtcgggaatgaacgtcatgatggtaagaatgttcttcgccataagagcacagtcaaattaacaaacgcagtactacatcgtctacatcatgcagtccacaggagcgggctcccctcttctaacagcttccattcaatacatccttaacacggcccttactctcccagcgattctctggctcgaccgcttcggccgccgccctgcgatcctcattggcttcaccatgcaagcaatcttcctttacattgagggtggcctgcaagccggctatggtcgctcgactcgaccgtccgacgacctaaacgccatctcctggaccgtggcggaccacccgggtgtgggcaaggctatcatcgccatgtcgtacctctttgtctgctccttcgcaacgaccattggtccaacttcctggacctacccggctgaaatctacccggccaaggtccgtgccaaggctgtctcactggctacggcgtccaactggacctggaactgtctccttgcgctctttgttccgccacttctgtggaatatcaactggaagatgtacatgattgtacgtttacccacccaccaaccactgcatccttataagcaagatactaacggagttttgtgtacagttcgcagccttcaacactgtcgccgccttgaacatgttcctgaccgcccctgaaacaaaaggatacacgcttgaggagatggacgaggtctttgagagcggcatcgcgccctggaagaaaaggaagatcagctcccgtcttgagcagatcgagagggagattgccgagggtaacctcaaggttacggaccggactggtcccgtcgatcctgtgcaggagaacgttggtgaaccggagaaggcggtgtaatcccttgtccatttggtatggttactgagcttaatgcgtgagtatgtaatcaggtaggcggcgtacaacagggctgtagtacccaggtagggtcttcccaatccggtatagcttttgttc

SEQ ID NO: 5440 - DNA, 8976 bp, Emericella nidulans
  unsure (1)..(8976): unsure at all n locations
agtattcttaattacaagacggatgttgttctgctgagcgaacttaatggcagcaacgacatcagcgcttgaccgacgtcgacagcgtactgacatagttgcccagctcgcacgacgaatcctcatcaaagggatcgcagctgcgattggtgaagaactgctgcatgatcgatgaagaagagacatagctagactcaggtcagcctttttcgaccacctgatccaaagaaatggggaaacgtactgagtctgcggcagattccagtcttcctgcaactgcgcgcacgcttccgcatcataggtgggctcgtggcaaaccgatccgatcggcacagtggcgatcaaccgtccgccgactgtgctgttgagcgcattccacttggcagccgacggccagcaggcgtctccagggagacagtggcaggatgtgttgctggagcttgcggccggagccgcggtcgcggtggcaccgaagagcagggcagcaatccagacggccttcattgtaatggcttcgcttgatgcgctggtcgctgtctttggtcggatgactggaagcgattccaggcaaggatgaggttgatgtcttatactcgtcgttctccaaggtatggcgccagcgctgaagactgacacggccacgtgtcggagttgttccccgaagcgttaggccccggtactattgaggcaccgtcgcacatcgaatctgctgctagagcagatcggggcatgccccggtctgctccaggccagtcccgggctggccggcgtgccctatcggacccggcctggccccattcctcggctcgcgtcgggccagcagccagaccagccttggttagcaaagtcgcattccagagcttaataaatgcctcgccaggggccaagtatttcacattcatcctctaagcgagggggactccaactgcctgggctcttggccgctgcgtgtcttccaatctaaaagcagggggtggctcgtggctccatatctcagactggctcgtctcaagcaccagacggccggctcggaagacccggatcgctgcgctgctgctcactctggcctagcacgttgaccgtttgacggttgatctgatcatcgcaagccaatgccggatgccgcaccgtgagcgacgatcgatctggatcggcggccgaggatgccttgaacagtctacagagtccattgccaatttttaaacagtctccatcgctgctagaatcacagactcctttgctcgagctccaggcccgccgcttgaagcggtgcctgccttgattctatcgtgtaattgcgaatccttcgtgtgccctaagtggcgtattggctgagccatggaactctgtactccaagcccccaccgactagcagctttgcttcgatctgttaggccaacccacgatcgcgtccaaatgccgtttagatttcggcacattatcgtcacagtgtgaaggaaaaattgaggagggtcgccatgggcttggtatgccgagcccagtccacggtttcatagtgtccaggtgtgcaagttcattgccctggatgcaagccttcgcgaaggacctcgcttgactggataaactcaattcttaaactcaattcttagacagttcttagacagtccttgataattcgtggacagttcttggaccagatccccgcggttgcttgaaataataaatacgccgccggtacccttgcagcaccctgcagcactctgcagcactctgcagcgccatgaacccctgttcgctgtgcctgcagtagtctgagcagtccagcagtctgagcaaagtctcagaagtctagtctcatagtctgagtagtctgaggcttaggtaaaatggctttcgacggcaagaatgattcgggcttcgccctggctcgcgggatgtgggcggccaacgccatcgccgctgtgatattgattttgcgagtatttgcaaagatcaagctgcgccagttccgttttgacgacgtcctgatggtcgtagcttgggtatgcgcttccactctccttctccagatcccattgctgacaccctgccaggccatgacccttgccgcgaccgtcatgctccaaaaatcggtcgagcacggtttcggtacgaatctcgagctgctggttggcacgtcagacctcaaggttgtcctcaaatccatcgcgatcgagatcccgcttgtcacaatcagcacgggctttgcccgttcggcgttcgcgctgtacattatcgccatcttgggcagtaagcgcaagtaccagatcccgctctggacagtcatgctgctccagctcgccggcaatatcgtgtcgggcgtcctgccgttgagtatctgcgaagatgtccggatcctgtgggatgccacgattaagacgcactgtggtgacagtgcgtccgtcatcaagttcgcctatttctcgtctggtaagtcttgtgaagcaaaatatcaaattcccacgacccttgcgacagaaaatcaactaattaaaataaacagccgtcaacacagccagtgacctcttccttgccgtcttcccgacagtgatcttttggaacctcaacctgcgactgcgcatcaaaatcggcttgatcgtgctgatgtccctgggcatcctggccatgatcgcgtcgattatcaagactaccaaatacggcgatatccccggcatcaccaaccttggagcgaccggcggcatcgagctcatccgctggggcttcgccgagaacctgattattattatcacatcgtccgttccgtgtatccgtcctctgctgatctcctccgtgcggaagatctccagcgccgcaaaatcacggtcttatgagctcagcggtccattctccggcaacaaaagtaaaggaagggggtataccggtcgtgacggggagacgggtgagcgtgatgtcgagggcgatcaggatctgcccgatgaggcggatagcattgaacggattctccgcgatgcggaggatcgcgagcgcaacagggagatgaggaggggcatcaccaagcaggttgaagtgagggttctgtcgcaacatagcccgagtctacactcgtcgcaagggagtgggagtgtgagcccgtacctggagagacatcaatgagacggtatggctcctacataggatagattaatgcagccatcatgccactaagtttcgtactatggactatgtgaagcgctaactgtagggctggatgagtgtgtcgttcactgctaatccacctcacctccaacaagcattgctccttgatattactctactgacgccatgccatagccatcgcagtccaactgtaagaagcgcgatgacatgactcagtactgtccgctatgcacactctattctactgtacatcgctccatgctccacggttcggtaagtatacccacgctatccttagcctgcagctaaccatcaccattgacaccagaccataacccccactcattctaaccaaagactagcatgccatccaagcctagacccgtctgctcgtttgattgccggttgcaggtcaacaatggcctcagtaactcaaccttgcccacgaactttcgcctggcaacaggcttgcttgttgtaagagcatacccagctacagtatcaccaacttcgcctacgtgcactaaatcttttgttatttttatcgtgaaagtattcctccccagccccggtttcatatgtggatgtataagaaaggcgaggggaaaggatccaaaagtttcttctagaaaaaaaaattttccgcgtttatggaatggctggacgccaacagactcaagatctgaaatccggatccaatgaacgcggcctgtcaaaaatcagtcaacggtggggtcgaaggtaccgtcgaggagctaacacaggagagtttctggaactgtgagactcaaggacgtgcgttccactatggggccgatccgattatcactcgagagttctacgtccgcttagtgagcggcactggaaaggagactataccgatactgcgaatggatgagcattggaaagtttatatttgatggagactaaaaactttccatatcgttcgttatcagccccatttgtacgcctaactcctgtcgcgtcaatagttggcaaccttagcccagccctggccaagtattctcgtaccccgtcgcaaatcccacggaccagttctcgtcgagaaaaggccactgcatcatctctgcctctagatcgtagacacccggcgcaccctgctcggcatccaggactgagtttcccctgtttctgaccgccgtgggggcaccgtgctcgacgggcgaggtgcctcctcgggaagtggaggtcgaatgatccggccgggagatacggatatcgccgtactcgtcaaatgttccagccagagtcagatggtcactagattgcgactccaggccctggtgtgagcgcgcgctctcgtagaaccggtttgcctcttgcagggtgcgccaccagctggtccctacatcccagaaccgacacagccgttctaggtattcgaggttcgacttcttctcctgctctgcgcgctcgagtccgccggggtagcgtgtcggagacaccgtaccgtacatgttgatatgcgcggcaacgaaaacgctgaaccccgcataaggggtaatgacgggcgttgcgcagctctctagggacgagaggatcgctccaatgtgctgtgcagtcgcaaagagacggtcgatcgtgtcgccatcagaatccagttggcctgagctgtcaggggttctggggctggcgaggaatcggtcgcggtcgaggaagaggatgctacgctcgttagctggcactcctcaccaccgggagcacagggatactacctcatgaagtataccaggttaatgtacgcaaacagctctccgtacccaagcgcaacatgagcgggtgcactggtctccggataccggaccgtagtatcctgtaaagccctccattcatccagctcctcctttaatgacgcccacattgacgccgacgaccgcactgccccacgagcacggtcacgccggctctcgttcgcaaaacgcaggatccgcacgaagatatcaaacccgcgtgtcacgattgttaacccatgctcgattcccaaccggactccccccgcaacagcgccgtttatatccgccggcgtcagtctctgagcagcttggccgaaattgaaatctgagtcacgcatcggcaggggtaccgagatctggcgaaaagagagggcaaaatgctgtcgcgcgccagagctcagctcgcagtcctgcgcgaaacaacaccagtacgtccggacgagctgttcgtaagcgattcgggtatctgcatgcgtgtgaaagtcttctggcaagtgttccatatgatcgtcggccgtcttcagcagcgattggatcatatacgtggccattccgctgtacatccacgcccgatacggccggccagtgccccattcatacaacgagatcataacgagcgactgcgcgagcgggagagagggcgactcgaaggaacgatgagccagctgggtgcgggcatattccgcgtatgtctctgacggcctcagagctggatcgctcatgaagcgagcacagagcgagagaagagccgccaggaagacgggctcaacagtcgcggcatcgcgggcaaggtcagcaatcagagatgggtagtgcaagaagttgacaacggggaatttcctgcggtagaggtcgcaggcggcaataagcgttgttgatcgaagagaggagaagggtgtttctgctcgcgaagacgataaatttgaagaattcaatgaattcgatgggttcgatgagtctgaacgatgcgaaggatctggtagaattgatgaatttgatggaatcgatggaattgatgaaattggtgttggtcgtgttcgttgagctcgcggggtccgtcgaggggaaagcgaagagagtgagagcgaggagcgagacanggctcagtcaggtgacacggatgccggctcaaacgctgacaccgacgacaaggcgggcttccgtcgtgcacgcacttgaccttggcctgtctacaggcatcgcaggagacagaaacacgcattgaatttatctgatattctgcaagatagggattatgctcggcttagggcgggaatagcgggatgtcgggaaaactgatagggattgattctaattacaggcgatccactcgcacagtcggtccacttcattctcggccgtggccacgatgtcactatgcgaactactgtcgcaccaggccgccgttcccacgcatagaaccggatgcgttcctgcaattgtgccagtttgtcatcatctactaccacaaacacctggttagtctccgtctcggcggccagctcccagcccctctggagaaactggtcagctatcttcctgaccattgcattcgcatgctgagccagctcgaagaacaatccgtcacggaacagctcgctgaactgggcttcccatgactcgtgatttggaaagtaaggccccgcgctgcttcatgtgaacctcaaagccctctgccagccctcgccgtaccacaatggcatctcccagcaaggctcccatcttggtccctccaatccagaagatatccgtgtaatcgaccagatcccggagggtgacattgttgccgcccgccgtcaaggctactcctagccgtgctccatctacgagaagcagtagatctcgccgtcgacaggtatccgccagtcttttcagctcttcttgtgagtagatggtccccagttccgttgcgttggaaatatacaccaatctcggtttggccatatgcggaaagaacgtgttccttgcgagtacagtctctaagttctctggcgtcatcttcccccgtaccccaggcaccatgatgatcttatgtcccgttgtctcaatggctccagcctccttgtcgatgatatggcccgtttgcacggccagaaccgcctcgtacgggcgcaggcagctcgcgatagagatcaggttggccgctgttccactgggcacaaaatggatggcgacatcctcctcagtggcttgcatttgtgtcagaagcaattgacgtgcttcgcgcgtgtagtggtcggtgccgtagccggtctgttgggtggtattggtgcggatcagtgcttccagcaggcgcgggtgggcgccctcgctgtaatcgtctaggaagctatatggctcagccgttttggcaatcattgtggactatggataatgcaataaacaacaatgtacaaatgctctgttggtccttgcggttgcagactctgggtgtttatagcgtcattcccgagcgggaatggccgctcgggaaagagcgtgcgagtcatcgcggacacggctagaatctattacgtatcggatggatgttttaatcgaatctagaatcgaaaaggaaatgggatccattattaaacaagaaacttccgcgggaggtgtcatttgaatacaattgagagatatctataccgtttgtagcattctacccataccggaatgctccgtctaaccctctctaaccttccctactccatctccatcatcggcccggtgtcctccttctttcggtgacccagcgcccgaccgggatgcaagacggtcaggcagatgcacgcaatagagaccatcgctccctccaggatcatgaatgtgacctcgtcgttggccagctcgctatcatacccgccgttgagttcgatgactcggaatattgaccgtgtatagatagtgattgccgcgacgataagtcctgctcgtgtcagttgaactctctactaccgaagaggatcgtgaaggagtgccaggagcgtaccggccaggaagaccttccaccacttatcgcggcggatctcagcatactgatctttcacatcgtcctcgccgatggggacttgtccctcagaacgacggcgctgccgccacgcaaattcgactgcaagggcaatgaacagcgtcaaggcagccacctggaacgccaggccggcgatcatgatattgacgcccgtctccctcccgtcggcatcgtccgctgtggaggtcatggcaccgccgatgctctgcaacacaagagcaactatatcgcaagagatgaagacgatggcataggttctgggtcgcaggcgcgagatgttctctccgcgatagacgatcacgatgcggccgagaagaaagtacagggcggcgcagaagaagaccggtccgatactgaggcagatgaggttcctgtaagctcagtgttagcttgaccctctgtcttttcttctttatatatatctttcgaaaggaagggaaaatacatgaggaagaagtcgaaattgaagggatcatcgtggaagaggatgcgggccacatagcccagcacttcgaggaccaggcctgcgaccatcgaccctgaaaatccccacgtacggtagaccgggaccagaatagcctgggcaatcaataagaccccaaagagggccaggtagacactgttgccagcgatggtgggctgataatggatgtatgcatcctcaatcgggcatgtctcgagcgtacagtctgcggggttcatggcgaaattctttttattttttttcgctctcttcttcttgcctcttcttctcgtaatgtattctctctttaccttgagctcaataatgttctcatcttcagttggtcaaagactatatacatcagccgccaaggctgactgtccgtgtccgtgtccgatcgtgtccgaatccgccggcaacgagtaagccacactccaaacgccctgtctcataaatatcaatttccccaggtcccttgtccgtgtccgtgtccggactctgttctcatcctgtagctcaaatattccaccatgtccgcctgctcggcgcgcgtcaaaacatgccagacctgcgccacggccaagatccgctcgttacgctctccagattcgcctatctgcgaccggtaggac

SEQ ID NO: 5441 - DNA, 3588 bp, Emericella nidulans
ccgatacataggcagcagagcattcggggctgcttcctactcaaccggtgtaagccaatgtgcttaaggattcatcgcgagctgacaatagtaggcagatgctatgagggagaggcggtagtctttgcccggtatatcgacgagccgtgttcgcttcctgtggagcagaacgaatccccccacagacaatttccccattcaattagacaatctacaggccatttgtagaaaggtgctggaatatccgagcataaatgatgtctctgagagtccgtcattcagaccgcaggcaacagcatacctcagatcaatactggcaaacatccccaccgagctgatgagctaatgtaagtaaagtttttatttctctctgggtatttcctcttttctccatgtttggagtactaatatatctcaatggggatgttgacagctagaaatgcacgccacacgctgcaaagatcattattcacaccatggctttaagaccggacctggtattttcccggctgagtcaaacaagcgtttcgaatgtatttatgcctacttgcaggcagccaagtcatggctggagatcatcttcactcttgcccagtcgaatgcgtgggcttttcctcatcaatgtaccctaagacaatgctgctctttatcgggttgtatcgtctcgcacacgtgctcatccggaatgggatttagcgctcttatgtgagaccctgaagtcccataaatactagaagaggagagcaagaggtttgcttaagtctaggcgctaagggcctggatcctaatgtctcggaggataatgattacttcagcatgatggcattgaggtctcaattgatgagggtgtcgtgtgatgccgtgacctgttcaatgtcatccttcacccctgcatcgctgaatgggctagagaatcttcacaaggatttctaagtatatgggcatgggcctggtagacacaagtttctcctgtcgtgcccgctaatcagcgtactatgagaggaaaagaaaagataagattgagtattatcaggagctgctgtctactgctgtacctgacaatagaacacaacaacaaaaacaccggctcgaattagagtagtgaccggaccagggaaagaccttctaccaatcagtctctgctacacagtcaagtgagaggctgtgtcattcctggccagaatttttttcttgagaatgccggggatattacagcatgactcgacatattagtcaagtgtttgtggcgtcgcctatacgacagtcgctctggccctcatgcagtgggaacacggcctgtgattcaggtgagacttcacctccctcgaagcgcgttggaaattgatcgtattcagctggctgtaacaggcatggcgtctctcaatgaaggacagcaattggaatgatatatcaagcggtggggagcgcttcagaaatccacgaacttacaagttcagcttgcaaccaaactgccaactcccaactcccaacctaagcactcgcaatgctgttccacagcgttcccaaactagccctgtttatcccgcttctaggaacctgcctagcagagctcctcaccccgttcccagacaccgcgagcgatctcgccatcaagttccaacccgttctcgacttcgacacagacagctgctaccagaccgcagtcatcggcaaagactacctggtcaactctgatatcgacccaaaccttgctccaccccgtcctcccggtccagggcccattattcgagccgccaccgatgacaaccaagttgtcttcgctgtcaacgctagcaacagcgacagcgagattgggatccgctcgggcggtccctacgcaccctctgggtgccgcgacaagatccgactagaccgcagccagacgtacgtccatgagcgctgcaatcacggctggtgcgcgtatttgtacgggtactactttctttgaagtcgacagtgggttttcaaacgcacacaagcacgactgggagctcgtcaacgtgtggacgctccacgaccaagtgtttttcgtctcgtggtctgcgcacggcgactacacaacgcactactggtcgacgatccggttcaaaggctcgcacccgaagatcgtgtaccacctcggttcgtcgggtacgcactcgctgcgcaagaccgaggccaaggacgatgagattgaaaacgacaccgggcggtggtttcgggcgccgcttgtttcgctagagaagatgccctgcaaatttaaccaggagctgctgaataataattggggcagcgcgcatagtgatttaagtaggtttggggagaagctggataagtggatgccgtgcgatgcaaggaataacgaacattttgacccctgggagcccaaggttccttcgtggctgtgagagagtgaattggggatggatgatgggtattagtttgtatcttgcacgccgccagattgagctatgggcttttcacccctctttcttattattcaagaaaattcataataaatcacctgtggataaaagaagctggcctcaaagagaactcgtgcagtacaatgggatattagtagttcaataatcaacttgcgctaataattcatctgactttatctataggtgttaatccccgggaagtgagctgcggaaacaaaatatattgaaggagtgactagaatgaaagtaaaggcaacgcaattagcaaaacactatttatataacacctatctccagtaggtaatgagtcccaaaagatagagattcgcaaagacttcgcatatgctgagttgaaaataattgcaactctcgcacagccggtcgaggcagcatgaccccagaagttaagagcttgccaggctcagacaggatgattatttttacaaaccaagccttgtggcaccattcaggcttatgatcctgctgctgttgagtatgttttgcaagaacttttgagagttatggttcccatccttgatgaattcatcgttccaggccatccagtaggcccaagtgacattctccttagcctgaagttccggatctggtatagagccaacctcagccagtgcaagaactcgttcgcccctagtaacgttctgcaaggcctggaatttgcccttgacgacatcatggtcgcccgcttccccatagtggtcgatagtagcgatatcacacttgttgttcccggggtaccagctcggatctgcagtattacagacccagacgaggttgtggatatcgtgaacacgagtaatgcggtcgtatataaggtcccagagttgcttgaaaggagccgggccatgagctccccaccagaaccaacccccttcaggctcgtgaagcgggcggaagaggactggaacgtttgcgtctgcaaggcgtttgagctgggcagcaattgcatcgatgtcccgaattaggagtccataatctgtcccattcccgctatggctaagggcgttttctatattgaaaccagggtgcttttgataaaagcctttataccatggctggttctcaatgtcgagaagacacgttggcgcgtaccaatgccaaacaagagcattgatgcccccttgtttgtcgaaattatggaatc

SEQ ID NO: 5442 - DNA, 6838 bp, Emericella nidulans
taatcaacagtataagcacaatcaacatgctgttatcacgtgcgcctctgcggctattgaagcccattggcgtttcaatacgaagcctggcaacgcatgcgaaaagcaagaacaaaaagctccccctcgccggcttgaaagtgctcgatctaagtcgggttctggcaggagtacgctcgcgctcacacaagtcgtgaacccaagctgacgttgtatagccatactgtacccaaatactaggcgatcttgggtatatcatcttgcacaattttcaggagatagtcgaactaaaatgttgactgagacagcgcagacatcattaaaattgaacaccctgtacgcggggatgatacacgcgcctggggccctccttatgcaccatacattgacggccgagaagggcctggcgagagtgcttactacctttccgtatggctccctactttatctctaccgaccctagcaagcagattctaacagtcaaatgtaggtaaaccgcaacaaacgctccttagccctctccttcgctcatccccaaggccaaaatatcctgcacagactagtgagagaagcagacatcctcgtcgaaaactacattcccaacagcctcgcaaaatacaagctcgactacccgaccctgtcgaccataaacccttctttgatctacacctccatcacagggtatggtcagacagggccctacagcaacaggcctggtttcgacgtaatggttgaagcggagtttgggctggcacatctgacagggagtaaaaatggcccgccggtgaaggttggtgttgcggttaccgatctcacgacgggtctttatgcggtgcagagtatccttgcagcactctggcagagggcgcagagtaaagagaacggagaggctggaaaaggagaaggacagcacttggatgtttgtctcagtgattgccaggttgcgacgctggcgaatatggggcaggggcctcttatctcaggacagaaggatagtggaagatggggaaccgcgcatcgtatggatacaactcacctacctcctctcatctctcttccactaactgacatgtcagcatccgtcgttccctaccaatccttcgccacagcggacggggacatcttcgttggcggggcgaacgacaagctctttggaatcctttgcgcgcggctcaacaagccagaatgggcttgtgacgcgcgctttgtcacgaactcggaccgcgtcgctaataggtctgtccttgaagagatgattgagcacgaaacgagaaagttatctacgaaggaatggcaggaaagattccagggctcaggactgccttttgccgttgttaacgatgtgcttgggacaatggggcatgaacatggtacgtttacccgcttactatcctatatcggtttctcaagctcctcgtaaatgcttcgtgatgttctaacagcgttgccaatgcagtacaagcgcggggtatggtccagacaatagcgcatccggcatgcgggctaatcaaggtgatttcgccgccggtgaagtactcaaatgcggagccgagcattcgacgggcgccgccattgctgggggagcatacggatgaagttctaatggagattgggcttagtgagttggagattgcaggattgagaaaagagaagattgtcgcttgatcatcaaggtagattggttctattctggtgctgctggcttaggaactgtatacattggcggtagaccttgtacatacgagacatgaaaagttgaaaccctcctgtgcaatatcagcactaatacaagtgtcagtgcgatgttactagctgttaatagtactttcttgaaatatagaggcgccgaacttgataacaagcgactaatctcacatcatccaagatactaagatagaatcgccttcgcggcctgtccaaacgatgtagaatcagtaataagcacactagctgtttctacggataagattcgagaaacaaaagcgaactcaccttctcagcaaccgcatagactgagctctgaatatgcgtcgccggcaacattggtaacacactggcatccacaactcttagacctttcactccatgtaccttgaagtccacatcaacaacgccaccaagttcaaatttacccacggcacaagttcctgatggatggaagagcgagtctactgcgccgcggacataagcttccagatcttcatccgaggtgatgctgccaccgggcacgagctcgacggggttaaatgccgccagagaaagggttgtggttaacgagcgcgcgtacttgatcgcctcgattaggatccgcacgtcgacaggattacgcagatacgcagggtccgcgagaggttgcgcgaaagggtcggatgacgctagacgcacgctgccccgtgaaaagggatgctggaggccgagacaaacgtgccgtccgcccagatgattacgagctgcgcttcatccgtagcggcgagtccgcttgtgaggagtttatgctggacggtgtagccgtccacaattgagggcggagtgtctttgtccaggtaggcttgcgggttctgatcagcagcaatgccctggaggacatcagcttgagaggtgaagtttacagttggaaagaaggcaaggaagtcgccagttgcgtcggcgtaagggcctgtcttatgggtgcgatacaaggcccacgattcagcggcgaatgtgctgtttgtcgtaagattcgtggcggttagggggaaatcgactgtcattgttagtgctgtagtcgaatcacgggcttgtcacctacatgaaaacactacggggacgtgaagatggtcctggaggttgcggccgacacctgggacatcggctacggtggagatgttatgcctgttgagggttgctctgtcaccgattcctgacaattgcagcagctgaggagtgtgaattgcccctgctgctaggagtacttccttgcgagcgttaacaatagttcgggcccctgatcggtgcgctgcaaactgatggaatcattcgcattagttcattctttactgttcatatactgtgaacagtggttgtgaggatgggtaggtacatacctccactccagtgatttgcaccctgcgcgaagtccttttgctgatcattcttgtcactctctggccggtaagaagatgaacattgggtctcttcgacaccgcatcccagtaggccctgcgggcgtcactccgagtcacagaaatcgcatcctgactatggggcacgaaaaatccaccgagggcgtcgccactcgcaccatcacggggaacatggaccccaaggctcgtaatcgcgctgatgaattgttttgtagaaggccaaatccacggagcgtagctggactggacgttgccagtcgtgccgtggactgctgggtcatatgtggcattccactcatcaatcacgtcctcgcttggaggcgtgaagttctcactctaggttgatcagataagttcgattgctctagggcgcgcatatgcatacctttttgaagaatggaaagaggtccctccaaccccaaccaggattccccagtgcctcccagcggtcatagtcagccttggatccgcgatcaaagaccatgcggttcaacagactcgagcctccgactgcctttccttgggggatagaaacagtacgatttcccaggtccgggtttaccgcgtatgtcaagttccagtcatactttgtgccgattgcgttccccgcaaggccaggaacaaggataaagtcttcgtcttcgtcgctaaatcaattagtatctcttgtactgaggcgcgaggtagaacaagcaaaaaaaaagaagacacgtacaatccgcctgcttcaatgatgagaacacttagttttttgttctctgacaggcgattcgctaccgtaagtcctgagactcctgcgccgacaatcacatagtcgtaggtggccagcaacctggactccgtggccagggtctgaccaggtgggatgcggccgagccatatagccaggccggcgattccggtggcccatgtgagatgcatggcgatcgtgtggtttaaaagtggtcctctttcctctggaggctctaggggttatttatgcaggggatcagctgggcgaggttgctgacaagggtattgcagatggcacaagagctttgactggatagcttcggatatattgccaatttagccctaaccaggagtgacaaggtcaactccaccaatgaatagcataggaaaaggaagctagcaaccagtctagcttggacacgggtttgggctcaatggccccaaatgagcacccaaaaaccgcaggctcgggatttcaacaatctagacaacatatcgcctcctggctcaagggggtgatagtccctcagccatggcgtatagcaatgactactgcgattatagtggttgagccgaaggaaccagggagtattagatgatgctcaataactgtcaggattcctgggttgatagcgtattccgtccttcgtatcagattcaaggagcctgtcggtaggattccctgaatactctgctcaatagaaatggtcatatggggaaaggtcgcttatccgagtcaatagcgcaacacctcagaacccctttcgacagaccgtcaaagatagagcccaacatcattctttcaactgtaggccttcctcgatgccaaccgttaagacgaatttgaggtggggaaagttccgtgccgtatctgagcaacgcgagcctctcaattggttccgtttctgtgctggaagacgctaataacgaggtagtggaagctgatcgacctgtatacgtattatcatagcttccattcgctgccctggtatcaaatgtctggtcgagcatttggcagcactgttgtactcctattgtaaaccgcaaatccagccatttgtgtctgatctttcgactcgattcattgcggcgtcgagtcattattgaggccggacagaccttcatttaatggaggctatggtgatcttcttccgcttgactttggctcgatcgatgtgtttcgcctgagtggtgatgatggagtcaggtcacctacgggaccttttgtttagtatctcgaacataacgagcattgacattctaacaagacacttaccgggataaagagcacgcactagctctcatagagtgttaatcaccgggttcgagtcgccgaaagacggtgaggtggtgttgatctcaagagtatacaaggaggtggatgaagcaaattgcaggttcaatccagcctcgtagtgaccagccatgagccagcgcaagctagcatttgttttatatcctgattctttcgtagtgtcaagaaagacgacaaacgtttactccagacagcgattttttagtctatatgtaatcctcgaaatcggcttcactcttaaacacacgttggttgttttccagcccactttcaagacttagtacgagtattttatttagctaactgcaataaatgagggtgggcgtgaatctatctctaatattccatatatagaatactggtttcaatatgacataatgaagtaggcctaaatttggaaagattttgcactatctcgacatgaacaacatgctgtactatgagcaaaatgctcaacaatgcgtggttggatccacctttagagacggcagatcaacaggagtgagacctatggtcatcctgccctactcggccttgactgaagctggaacctgggatgtgcctcgtttctggcctactccgtagtattggaaactagtggagctgggtgtgcgctgtatggccctatatagtatccgaaaaacaccgccaaactaccaaggcgactaccagattagtcttgaacagtcagtcactttgccattgcatatcctgggttgtacgcgaagccgatgcattggcacagggcgggtgagttgcactaggattaagaggggaagtggcaggcagcattgatgccatcaaacaggtgtattccatttggtaacatccgacccttcaccaatgccagccgtatggtaaaagaacgcatcattgagcgagaaataggaccgcgaatcccattcggcagcatgtgtcttctgcgcgacagacccgagaatatcgatacccttttgtaaagcatacttgaggtctgaggtttactgttaaactaaggatgctcaaaagcggacattttcttagaagaccccgtaaagagcacgtaaattttaacagatcccttcgagaatagcctagattaacgtgggatccgttaattgtctgtgagtttggtatgttgtataccctgaagctgtgatgtcagtcttctccgttcctgatgacgactagatcttctagatcatttagaactggttgcagaggtagggtttgatttcctcgaggttatcgagaaggggccgaataggtgtatatccgcatgcatatatatcaccacgcgcattgactggcgtctgatacagtatacgccagtttctttaggggcaattaactctaataatccttggaagcaaatattaccaaacagggcatgagggacctaaactctaaacaaacagcgacagatggcaaagtcggtgaccatagacttaagtgaactagtggtatgcttgcgcactggctggaaggagacaagtccgacttcaaaggtcaatcctactgaccacgaccccttggcccagcggaccggtcacaaagaggtttgcttgctttttcccattgttctcatccgggtcaattgctaccagaacagctgtgctggcggttcggagaatatgcccgtcatcttgaaaaccaccttttgtgtccatttgatgcggtccatgtctat

SEQ ID NO: 5443 - DNA, 4475 bp, Emericella nidulans
aacgaaaacatgagcttgcatgccattcccatccgatgaaaacaatagagcttcacaatcagctctcaaaacgcccaaacacttctaatcccaactcccttttctaacgcctcgtaattatataatgctagcgtgttaatgactcctcggtgacaccgagtcgagtgtcttgggtttgaggttcgaccccaaccctgccgcctgtttggcgcccattttgcgagtcaatttcgcgtagtgtaagccgcatgcattgcacagagtccgcgcgccatcggggccgcggcccattctggcgtttcggcacggttgcaactatggcatcgaccaggaggggcagctttctgttggaattgttagtaccagtaagcgtaaacagtagtccgggtttagaacatacaccacgtcgtttcttcgagtcggggccgaacccgccgctgctcttgaattcctcctggtacattgccatacggtggtcgtcatcgtgggctcccccaaatttgaaggcttttcgctgtgccacttgctcggccatggcatgttcctggctgaaaaccacggctcttatgcgcatcagagcgtcgtggttccgtcgttggatgttgagcatctcttccacctcatggagcgagggcagagctgatccgactacagcaccggagcgagactggtgtgctctgtttgcataatgccgtgagaagtctagcgcccgagtgttcaagtcgaccatctatcagagttagcgattgccgagactttggttcattcggagtcaatacctcagtcagagacgattcaatgtaaaaaacatcgagatggcgcttcgcagaatccccctggtgcccgaaggagcctgtaaccccacccttcatttcgtaaggccgtgagtcgtacgatgcggccggatacactggtgctcctggtgggggctgtgactggaacggaaagggctgtgaaaatccgctgtatccatttggcgacgcaacactgcccgctgacggaggagcattgtagtcgtaacctgtccctgtttgcgagccagacacagaggtcataacagtgcttgcactttgcgtcggcgatttgcccgagctaattgactgaagtgaagcgttcctggaatctgttgtattcagtgacgctaaacttgaacgtgatggttccgcctgtaattgtggctggtgagatgatgatgactccctgaggaaggagcttccattggagaacgggttaggaggacctgacggcccctccgcactcgagcgtccaaagttcgggaggtgatgcggaggcggcgcactgtttggctgttgaggagctgctgatgttggagcaggtggatatggtagtggattatcattccctaacgcctcgtgtatagatgggagcgactgtcgtggtgccttttctttttcatcctccgcgcgccggggctccggcggcgaagcatacccaggcccaacgttggcgggagtcgtcgagtatgaataaggaagagggttattcgggtacatcgtcgtcggactaacgagaggagcaggagatgtggtgggacctctggagcctataaaaccaatatcggggagatgatcccttgatcaaagagtcagcggattcatatcgtgagaaaaaaccttcgcaacgagagaaatgcaattccaacatacctatgcctatgtccagcctctagtgatcccatagcgcaggcaatcggaaggttccaagcgacgaacgacgctcagcttcgtttacacaggttcaagtatcacaaaaaccaggtgttgagctacaaatctccaagaggatttcgaaagttgtcgtagcagaagagtaaccctgaaacaatgcaagagtgacgaatagccgacccactgactgacagcacgaatgccaatcaaattaagataaagtcagaaaattagagaagtaaacggtgccactggttccgacacaatatgtctggggtggtgggtatatcggacgaaatgcgcaacctttgtcggacacagggaatcttcggtccttctctgggtcggccaagagagcgctgggtcagcgcagtgattggcgaacactaacagaaaaagtggcgtccagagactaggcaacccgcagacgctgcgatctggtttgtaggaaccggagttgttgaaagccgttaccttggtcggcagcgtcgaaaagaaatagtacgggaggcaccgcagcgtgcagagcagatcagatcggggcggcgctgtctgggagtcgaaccaccatctggccaagccgagacaaatatcagcaatctgacttcccacctcggatcacgcggcggttgatttgacagtgcgagatttgcggccggaagaaacacggcgaaggcgcaagggataaaggtgaatgcgtcgcgtggaaggggtggcgttcctggtcggacccggaagctgagctctttgagggtggcaggtgaagtaagaatgtattgtgtcaaatatgtgaagacacaaatccccttttgtcagaggatatgagcgggattaatgcaaaggggtagtatacagcgtccagagtggtgaaggttcgaggaggggcgggtgaggatcaaaaattagggagcaatgtcgagatgtcgggtcagagtataggacggtgtgtaattgtccgctttctccctatcgaagggtagggtagggggagggaaagagacgggtaggaaagtgagagagggagtaaggtggagggagagagagggagggaaaaagagaagagagagaggtaaatgaagaagtgggaggaagccaagatggcggcgataataagagaagtgtcaacagctatggagtagtagactacggagtcctgactggtattattataaagagaagagctgatcctcaaaagaaaaaaaaaaacatttattcaagaatggattactcgaaattaaaatcgaattaagaaataataatgacgaaaaaacaaaaacgaaaaatagctaaaaacaacaggctcagggcgattctaccagaaccgccactggtaggcccgcacacacgcgcgcaagagatctggagagtcggagactgagcgggccaggaggcaggagtcgcaaaacagatgagttcagacgaaaagcaaaaatgagaagggaaagaaaaaaataaaaatcaaaatggaaaaaggaaaggaagagacaggcagagagcggacgatcgatcagcttaggttacggcgaattattacagaagctttacaggctgcgaactgcggatcgtcgagagtgtggagagccttcaaataattgtggtgggccgcgcagctagggcgctgtccctgagtcttgcgtatctgagccgtacgacaatacgaatagagtattttgattaccgaggtagttggacaccataggggatcaactcaggactcaagtaggctatggatcggatccattagccgctatagtagcggtgtcaagactctactgtaaatatcctggggtactccttccagaaaccggaatatgcagatagtgataatctcggcgtggtagtgctggatcgtccagtgtcttactagtacacgctaatcgcgtcttcatctcagatccgacccgatgagaacaagatctcaaatgtcagctggtcctatggctgggacgcctaggattggagccctggttctgaacaaatcaatcaactgatacactctactactgctgcagactacctagtaccgggtgtacgggatgtacgggtattctcaaagacaaggctggaacggggcgcgtataataacgacgacgatgttaggcggcatctcaaggtcttcgatcgtacgctacacgatgggaagtagaccaacggactaggatcgcactctgtaatcaagaaaagacgaagaaaaataaggtagactaggctaactcccagtcaggaaaaaatcgatggacttggcggcaacttggatggaggatgaaggattagaggaaggattatggaagatgaagaagccatcgtccatcgaccttaccgtccggtcataaacccaaaataacggcatcagtttcagccatacttctcccatctatcttcctcatctggagaacttgtatggacgaagctggctgggctcgcaactggatcgcccgctgcagaatggaggtcgtcccctcttcagccgttgcaaccacgactagcagcgatccgaccactatctgctgcacagtgcgaccactaaagaccgcagcagccacagatcttacagccttttcattcttgttattgagtacggagatagtctcctttgtgctttcatggaacgatgcgaatttctgaatctggatcccccgctttccttctcgagatctcgggcacacccgctcgctggcacatgccactctgcctgccagcccacgctcatcacttgtggtctcccactgtcaccaaattcgtaaagcactactgccactgcggtgcagggcgtttcatttgacccat

SEQ ID NO: 5444 - DNA, 3964 bp, Emericella nidulans
ccgctgcttggtcttctcttctcggcggagtatacgatcatctaccttggatatgggctggcgttttggcaggggatccatatgttcggcaggggggagattgggactgctggggatatctttacgtactaccagccctttccctttgagcgatgagtgaagatactgacatgactcaacagggttttgctctctgtcgtcattgcgtcaatcaacctgactttactggcgccgtattcaattgaatttagcagggctgcttcagcggctgcgcaactgttccgactcatagatcgagagtctgaaatcaacccatacgggaaggaaggcctcgagccggaacgggtattaggcgacgtcgagctcgagaatgttacgttctcgtatcccacgaggccggggattaccgtcctcgataacttcagtctcaaggtcccagcgggaaaggtgactgccctggtagggcaatctggatcggggaagagcacgatcgtgggattgctcgagcggtggtataacccgacctctggggcgatcagactcgacgggaacctgatcagtgagctcaatgttggctggctgcggaggaatgtgcggctcgtacagcaggagccggtgctcttccagggaagcgtgttcgataacatcaggtacggcctcgtcgggacgccgtgggagaatgcctctcgggaagagcagatggaacgggtgcaggaggccgcgaagttggcatatgcgcacgaattcatctctgagctgaccgacggatacgatacgctgatcggcgaacggggtggtctgctttctggaggccagaagcagcgggttgcgattgcccgcagcgtcgtttctcaaccgaaggtccttctgctggatgaagcaaccagtgctcttgatccgcatgcagagacgattgttcagaaggctctggacaaagcagctgaggggcgcacgacgattgtcattgctcacaaacttgctacgatccgcaaggcggacaatatcgttgtcatgagcaagggtcacattgtcgagcaaggcacacacgagtcactgatagccaaggacggcgtctatgccggtctggtcaaaatccagaacctggcagtgaatgcttcagcacatgacaatgtaaatgaggagggtgaaggcgaagatgtcgctctcctggaggtcaccgaaacagcagtaacccgctacccaacctccatccgcggtcgaatgaactccataaaggaccgcgacgattatgagaaccacaagcacatggatatgctggccgccttagcttatctcgtccgcgaatgtccagaactgaaatgggcctatctcgtcgtgctactggggtgtcttggtggttgcgccatgtaccccggccaagctatcttgatgtctcgcgttgtcgaggtcttcacgctctcgggagacgctatgctagacaaaggagacttctatgccagtatgctgatcgttctcgcgtccgggtgtctgatctgttacttagctgtcggatatgcaaccaacactatagcccagcatcttagtcattggtttcgacgcctcattgtgcacgacatgctgcgacaggatatccagttctttgtccgtcaagagaaccctactggtgtgctggtaaactgttccgattcgaatccgcatgcgattcgcggactgatgggctgcaacatcgccctggtagtgattgctgtccagcaggtggtaacctgtggcatcctggccagtgcattctcctggaaactagggctggtcgttgtctttggcggtattccactccttgtcggtctggattcggtaccaatccgcgtcgactcccgcctcgatcgccagacatcgaagaaatatggcaccagctcgtccattgcctctgaagctgtaaacgctatccggaccgtttcgtcccttgcaatcgaagagacggtgctacgtcgatacacggaggaactagaccacgctgtctcgtcttcggtgaaacccatggctgccacgatgatttgtttcgggctgacgcagtgcattgagtactggtttcaggcgctgggattctggtatgggtgtcgtcttgtgtcgctgggggagactagcatgtatagtttctttgtcgcattcctcagtgtgttctttgcgggtcaggcgtcagcgcagctgttccagtggtcgaccagtattacaaagggaatcaatgcgacgaactacatcgcttggttgcaccagctccaaccaacagtgcgcgagacgccggagaaccacgataaaggccctggatctggggcgccgattgctatggacaatgtgcgcttctcgtaccctctacggccagacgcccctatcctgaaaggggtgaatctgaaggtaacaatcatcgcccgaatatgatcaatcaaagatactaatcgatacgaacagataaacaaaggccaattcatcgctttcgtcggctcctccggctgcggcaaatccaccatgattgccatgctcgagcgcttctacgatccaacaacagggagcatcacaatcgacgcttccaccctcaccgacataaaccccatatcctaccgaaatattgtggcactggtgcagcaagagccaacccttttccaagggacaatacgggacaacatctcgcttggcgtcttcaacccgaatacgcagcctttcttttctgataaggatgcagtgaagtccgtgtctgatgagcagattgagtcggccctccgcgcagctaatgcctgggactttgtctcctcattgccgcaggggatctacacgcccgctggctcaggcgggtcccaactctctggggggcagcggcaacgcattgccattgcccgcgcgctcatccgagatccaaagatcttactccttgacgaggctacgagtgccctggatacagagagtgagaagatcgtgcagaaggctctcgagggggcggccagggacggggaccggcttacggttgctgttgcgcatcgattaagcacgattaaggatgctaatgttatctgtgtattctttggaggaaagattgcggagatgggaacgcatcaagagttaatagttaggggggggctgtatagacggatgtgtgaggcgcaggccttggactaagaatgcctcctttcatggcgctgggaatgtcagtcagggatagggatatactcaatttcttctatttttgtgtaatcagaatataatgaatatagaagaccactctgctccgaggcatcggaacacttaatatcaaatagatacctagaccacttttccatgaacaggcccgtgaagctctatggaggtagtgcacgcttataaatagacaattgttgctcagaaattcccactgactgactgggtcaggctcttgaaagaaaccaatgaaagtcttcaatacacgtatcgtttgacatatttgtgatatagaggtatggagctgacagctaatcatatagggcggcgaaatgtgtatgcagccctcccgtccacgcagccataagccaaaaaaaggcctttgtttaatttgtttgatcatatcgacagataacaggtaccaaattatggataattgcaggtgagtgcttgattaggtgatgatgtagcacaaatgtattcaccttcactagtcaagggcctgaaatgtcaatcatacacctgcagattattgctagtcatctatcaagctctcctattcaggaagtgggagctagagctccaacaccattagatatacatcgacagctctaagttatgtcttttgagggcgcctgtttacgatagattccacactgtattatcttggtttaagccccgatgcaccgaagactgcgggacaatggaaacttaggaacggcatcgtacagctaccggaactaacaggaatcactttgtagatctgaggatatttcctgttgcttcctgtgattacagtttaagcatcgctacagaagag

SEQ ID NO: 5445 - DNA, 3931 bp, Emericella nidulans
cgcggctgaagctgtcagtacgtccgcttcttgtcgttggcttggaaggggaattcggtcttctttccgccgcagctgccttgagcgcttccatctcggctttgtcgtactcaaaggcagaactgcgctttgctcgtatttgctcaactttgacatctcgttccctccgagctttctcagcagctcggccctcggccatccgctcactgaaactcttaggacgccggtcctcgaacgaatgagactggggcgccaacgtgtctcgtaaatgagatattggaccatcacgactgccgagtcggctagtgggcccgtgtttcaacacctcttgaactgggcgggcgtctcagagatacgtcactacccttgagccccttgtcaatacccagcctataccttcccggagatgtgggctccagctgcggtctagagcgccttgttggtgacagcggtacctggatatcaccggagccatcctgattctttgtctcttgcaggaacttgctttttggcgcctgattttgagtaaacgatgagaagctgactgaggatgccggcctagacagcgcgtccgcaccctgctgtcgttctgcatggggtgttcctgcctttccacggtttttctgtagctgtttcagcttaagccgtgcctgaatggcagctaatttcaactgcaatgtttcttcatcttcttccgtatcgtcaccttcatcttcgcccagcccatcactcaacaattgcgtcgcttttgtccgggaattcggggtcgtagctgaatttttcaacggtgatgccaggagggttcgattgcgccgcatctcttcatatctttgtcttccgctaggagagctgagaagagcttcccgcggtgattttggcggccacgaagtctcgaccactgatgatgatcccttgttagtcaattttgtaagtcctgctgtaggccgcgactcactggtccatccaacgttcagtgtctgcaaaaaaatatactggtcagccgactgattatgttgctactcttgtcctccttcgagtcggtgctctaatggcgtcgtccccatatccaggtcgcagtcatgcggggaaaggaaggtgtaaagagtcgcgtcaacgaaggtgccactgctggcccgacagggcaactactctagatccctcacagctagcccaggtgaaaatagacgcacagaggcctagtctctctcgattgtcgtcgcattccaaaaaaagtagttgggcagatgtagcaatcaataaagtggttaatattgcaaggcgccggaggcttggcggtgatctgcgggcgacgcgcgcgtgtcacggtttgaaacgatggagccataggacgcgtcttcctcgaactcacaaaaccctctatctcgaatccaaatttcgtagcagagaacgccgaaccctattttagtgtttgttgaatataatacgtttcagtatgcggacacggtctgcccctcccccgaagcaatcggcatccgagaaacaagcccagcctgagccgtcaaaagcgaccatgaagcccagcaaagccttcatcctccctacttctgccagctcagacgccagattcgttaccctaccaaatccgcgaacgggagatctgacgcgctacttcttctgccctaagctcggagtgtacgagtttacggttgtcgcatcacaatccccacggagtattctatacactagcaagagtgttagcggaaagccacaaggatcaatatcaaagacagcagagcttctggttgctacaccgattgacattctattctttgcaattcccctgctatgctcggtgtcgtcgtctaacgaggggaagaggctgttccagccattggacgatatcatcgactcccacgacgacttgcccgagcatctgcgatatatcttgtacaatgacaccttcagaagcacacttctccgtcgggttgaggccgtatgcgactctgttgaagcgggcgacgagagagtgttccgagttagcgaaaccaaactcctacaggaattactcgccaaagcagagcggatggctgtgcaaggcctgccaaaaagtttagaggaacggtttgtcaagcaggcgcttgctgtacctctggtatctgttaccaggactgatgttgccacctcttccgcgccggcaaaagaggaccacaatggaattgagtctcaagaaagcaacgacacgcaatctacatcggcaactacttcaaacagctcagtctcgcgcacatcaactccagctgagtcagccccaacaccggccactgaagaactcccagagcaacaagcctgcccggactcgatagttcgacttcaaagactctcagtagctttggctttcctgaaaacctcttacatttctgcggctgtgtgcgcgaaaatcgacgagctcctctctgcaccagcgtcacccattgacttcaaaccgctgcatgattatctcaaacacctagctgatctgcgcgctgaagcactggcttctcgatctctaggggatttcagtcgcaaacgcaacgtggaggatgacgatgtcgttgagtcgcgcgctgaaaagaaacgtcgcacggaagaggaagaaaaaaagaagaaagctagcgagtcaaggggtgtcagggaactgaaaaaggttaacacgagtggaatgaagaagatgagtgacttctttgggaaggctgctcctaagaagaagtcatagccttccttgggtaaggatttgggatacgagaaactagaagtgctttggacagacaccgcggctgttcgaatagcaccctcgtcgaatgaaccaaggcgcgtcttcgctatcttaagaatagaccccaggagtctaatcgagcacaacagcaggtgccgaccaaggtggcaatgacacgagaggtgactggtcatcgatggtgcaaactcggccatgcgctgagataaagcacctagttcggcaaagactgcctctatacgaacttgtcatatacacaacttgtgtactcattaccccggccgctaaatgagtgcgggacaccgaaggcggtacagttagcatcaataacgagtcggatgaggattgcgttgatcatgaatttattgaaactggatagcacgtcaaagaagataccctcaatatatcattttccgctcgccgcgatattcaaacatcaacctgagaaattgcagctcccgtaatcctgtacacaagttagcactgctgtcattctcgtttagagttctttggatgcatacaagaaagacccgttagacggcttagagatgaccattgcctccttcagcttctcctcgctaatatctgggaaatacttcagatagtactcctccgtcagcgcctttgttacagcctcaacttttgactgcggcagcatgtgaacagtgcaccctccccacccggcaccagtcagccgactgccccatgttcctgccttgcgtgcgatgttgcagatctcgtcaacttggggtgcggagcactcgtagacgtcgcgacacgaatcttgagactcattgagcagttgaccaaggtagtgaatgcgcttgtcatccaaggttgatgcgttcgcgaggcaagccttgaagtcaaggacgcgtcgggcttccttgaagcaatgcagggctcgctggcggaggaggaatgcgctccgcttggacggggaaggaggagaggtacgtggtttcaagctcgggtacggagatggacagaagctgagcgatctcctcgcgcgtgtagccctgctcctgagtgagaatatcgagagtggcctggatgacagagtcgatttggtactcgagcgggtccccaagacggccttcttttcgcataagttcgttgtggaaggtgcgaaggctgtatccaagggaactgttgtccttgggaagggtgagaccgttcgctttggcgagaacgaccgag

SEQ ID NO: 5446 - DNA, 2044 bp, Emericella nidulans
cttatttacctcctggaactgctgaatcacgtccaagaacccctgcgccccctactacattttttacattttcctctgcgtcttcgtcattgacttcgccacctgatttcatcccccacgagtcttcgacgttactgtcgccagcgccgagagcttcgcttgacccagagtttgtatgtagttgccctgattttcgcctaggagcagggcgacgcgcggctgcgatagatggctcattatcatcgatgatagattcggacacaggagctggtggaggacggcccagacattgactatgatgtggtgcaatgtggtttgtggctcggaaccctgatgctgatggctgatgttgctggtcgaggaggagcgagggggcaggagattgagtgtcaccgacgccgagagctcccaatcgagtggcacccaacattgattgctggccgagagctgcagaagccgtgttaacgcgagcctggatcgggtcctgtcggttcccgatgttgctagcgccgacaaatggtggggatcccaaggacgggaacgttggcggaggatggaacgcgcgcttgtttgcattggtagcacgaggatttccgccgtaattatccaagaaaccgtagtatgaagcgagcatcttgccatcttttgtagagaaatagtccacacgagggtcctgccgcgcgtcgcgctggttgatatgcccttgcgggataacatttgtgccctttttgaaatcgaacacagcgaaagagcaaagatagcccatgccgtcgacgtgcacagtgaactcccggaagaagtcgataacacgttcgctgcatttgggcagactgaaccacaggatgaagggcgtaaaaatcatgctcagtatctcttccatgaagatgatgatcttcatctgatacaatacagcaaattctctccgaacgtcatcgctgtgcaatttccctttccagtggcttgggaaatagtgagtgaactggatgacttcgagtagagcatactccggatcgaatacaagcgtttcctctggcaccattccccgagcaaacgcccagacagagccgaagacaccaagataaaagagagtcgtccgatcgtgcgttagctcgaatccaagaaacagctctggatctaggatagacgctagagctaaaacagaggccagcgctcctgaaataaacgctacaaagccagcaacttggacggtcttgtcttttggaaactggtccacgtagcgggtcgcatacgggtacgacaagttgattcgcttctcaaaaagatgccatagctcgttgaactcacgaaacttccattcggcgagtggcgtgtactggcgtgaggaaagctgtgacggggagttcttgaactcgttgaaatatcggaagaaataatgcatcatgaaatagacgacgatgaaaggcgctatgaagatattcaagatgccataaaacctgaagcgtcgtcgcaagccatcactcagggcttttcggtgggtatccttcaagaacaatggtcgtacctggccttgttcattaaaaacataatccataatgcatagattaatattccattccaggatacgggaaaataattgtctgttccgcagaaacggtattggaagcgttagatctagaatatccttgttgataagagcgatcagatagttttctttgcgcatcaaacggtttgcaatgtcgtgagcatccattcgttgtttggattggctgcccaataaccgccgattaaatgctgatacagcgcccgcagtagcggggttggcgtctctcagcgtcataagacgactgacgacttcttgccaggagattgtctgaatctccgcgtcggataccccgagcaagtagtggtagaaatcgtgcatgttcttgagcctcctgatatccaatattaattggaagatctttccaatccagaaaaggcagacaaccaaagcaagaaagtagaagatgcggacatgcggctggtacactttgaaatcagtatttggtctagtgatttgctggtgcgaacgagacgatagcga

SEQ ID NO: 5447 - DNA, 5508 bp, Emericella nidulans
aaattttaagtcaattaatctttcattattatatcaaccactccatatcctgagttatctcccaggattggctgcgaccaagtcttgccaccgacgcgatctctcgcctctaagataatgtacgataaccctgctcgttgaagctcggacgcagcactgcacatccagtttccccatatttgcagtccccgtcaaggaccttggcaccgcagaagccgggcgcacggcgacagcatctacctcgaatagccaagctggcgcagccagccgcgcaacaggaacgagtgtaatggctggacggtggcctgccagaaaccgtttgagatggcgagtatgcacccgggatgctgagttgtagttgacgatgtagagggtaagcttgagaatatctttgaccgaggctcctgaaaggataaggatcttgcgaaggttcagaagtgccaggtggacttgtgactcgtagtctgcgggtacggtctcatcttttgtcatttcagcttgcccagccacatggatgacttggctgtttgctgaggtgattgtggccggcgcatagtaggccgctgtggtggtggccaggtcgactgtctctacgcgggtcataatggcgtaaatactgcatttagtggacacgggaatagtttaatacgcacaaaagctatgtcacgatcggagaacggcagtcttatatcgtcgattcagagagcccgtcgttgccacgtagtgcttgaaagagtgactgttatcggcaatgcaatgggaccgcacgtcgcagccatccatactcgctcttggagaagctagtattctccaattaggaaaaccaaagccgaattcgaagtctggccattaactctggaacccttctaagctggctgccgggagcgccttctccgacggaacacgcccacaccgtatgtgccattaaattccgtatccgcttctatctggaactttatccaggatagaatccttatctccaatctctgcaataagctccgcttatggcacgcatgtccgctttatcagagccgacgcctgtgttagatgttgcctgtctttgtgcttattttttcccagttcctctacagctctagatattggcgtgatatcaaaggccttgaatttaaccgttctgctcctggcgaggcattataagcgataacccttcctggcgaaactctctaatcaactaggagggactcaaaaaggtattagtaggagctctaaccaaagcatctaataacgctgaaaagacgcatctattctttaatatgctaaacttgttaatccgggggccacagcgggattctaggcctagataatcacccacaggttctggggcagattgtctacgcactagactgcccaattggttaaacagtatattggccttatagagatggagacgtctaggaggttctgtatgtaaataatctaaccttcctccccagctcttttcttaaaaccttaagtaggttacagtaatttccttagcagtctcatacggctcattgaattaactctgctctactgcagtttcctaagccagtctgaacaatatacacgtcaattacttctttattattgtgtgactaaaggaccagggtaggttacataatagcagcttcttacaagaaccatatttcttattgaagaaactcgttacttttttaaagagaaattttttccttgtaattaaatcaattaacagaatcccaactctagtcttagattatgaaaatatttgaagcatttgacagctggccctaaccctgacccccgtctaccacccaatggcgaattcaactcctccagaaacatgctcgacaacaaacaatgagtctcttctgattcatacccaccgatctatgctcatcgtacaactaagaatactggctgcctggttgtttgacgaaggccttatgtcagaactgtcaaatatctgcaatatgtccgccgatgacgaggctggaacactttacccgtgctccgttgctccgttgtcaaactcgcctatatcgatttgaatttctaagcttaccatgccattaatcctgcacattgttcacgtcggaatctactgcaccagcccttatctctaccgtagtcttctacaatcagggattgtcagaaagatggacacaaatgccgcagacaaatcacctttacctgtaatgccgttgggccaatcgaaatctgcaccgcagccttccagtgggtatcagccagtcacctgtcctgctgcaactacaggcatagtatggacgtctaagagaccacatccctctaccgcctatccaagtgctgcctcacggcagtcagcatcgtaaccgaggcgggctgtcgtaattgcgtgcacaagacggcatgaagtctgtggtagactagcagtacctcgagggcgactgctgtggaatgctcgagcgtgcctaagacaccatcttattgtcttctgttgtgattctcagaagggaaatggcagaaggcagctgtatcaactacacaaacttagtctactaaggatcggatgccgtatggcgattttctatctcgatgatgatagatctcttctttaatctctctcaatgcaatacacagaggggtcagatcaggggctagtgattaggcctcatatattacgtggcgtaagccagccaggaggctcatagtgtacaccaggtgtacacgatgaacgtcacataacattcccatatcatcatcttccatatgcgcccagtatcggacgatcatgaattgagtagagaggccataatacaacgtgaaaaaataatgtacaaagctaaattcaaacagaaccccagacccccgctctacacaccataccggaactccttgaccttcttcgcatagtatagcgacgccaagagaccagcagtagcaaggccgattggaacaggggccttcgccttggtcttgattgtccttgatgctccagcgcccagcagaaccacgctgttggccagggcgagctcagcgccgtagtccttgttttgcttcaggaggtagccttgcttggttagctcgaagtccacaaagatatcacacaaagatatcattccaggttctagttaccagagaaagcataggaaacacccagaccaagaccagcgatcagggagggccttgagcgtgtcttcaggtatccggcaacgccgccggcggagacttcgcaaacggttagtgagggtagatggataatataatagtcaaattcttacggagagcagagagagtgatggacgggtgttcggccatggcttcagtgctgagcagatcggagctattgagtaaggaatgaaagctgttgtgatgcttgcgacaggtggtgagataaacaggatgattattaattcatcaccgggccggcagttcagccgatgttcattggctagagctttcaatgcactaggacaagtttggaatagtcaatcccgtttgctgccgccaaatcttcaggctttgtggatgggagacaattgtcattattggatggccgacgtggcacctaagttatgagtatctagcttattcaatatgactaaacagaggcacaatcagctaccatcagtatagccatagcttcggaaaggcgagactatcaggttgctttcaccgcttgactaccaaactgcatgtataagcttccttatctcacaatggatataaatcaaactggaggatatttggcgccagccatgtcagaggatgtgagtaacataatcaacaggtacattaccttttctgcctagcattatttacccctgtcctaaccccatatcttatacttcctgaccatcccaaaactataaaagaccatattgtgtcgagtaaagaggcgtagtaaaaaaaacgcaaattattccatgtttgtacactcacataagcaaggacacaccctaccatgtccaggcagcatccatctgttcaactcaacatttcaattcatcctataccttttggattggttctgattccccttgggttcagctcgctctgacattttgtcttccacccacgctttctgattcctgctctaagccgcgttatcctcaatttcttatcagtaatcacctactggacctgtccaacgcccttgaaaccctatcaccagtcccctacacattactattgtagacatggccgtaagcaagccactcgactatgtcgtgcgaggcctgcagctggtatttgccacatcgttaggggcacggacagctacggtacacaatgctaacccacctcctccgtcggtcccctgagagtcctaaccccgtcgcctagctattaacacgtttcgtggccacgatgaccatgtcaacgaccccatctttggcggcgacgccaccctacacgtcggcgtccctgctgcgtggggcttcttgatgttttgtgcggcctggacgatcctggtcgtcgtcttccacttcgtcgagtccggcttggaaagccgcccgataattggctacgttggtatcgtcgccgaggccgtgactgtcctcgcgtggcttgccgggttacattcacgtggctgtaaatgttttgacgaccgatgcctgctcatcgggactcaattcgtgcgcggagctcaaggctgcgacggcctttggtgcttttgaatggctgctgttcatgcttaccgcaaccccggctgttttgtccttcttcaacaaccagaaacgagttacatcctcgtgatatcagaaccactgatgcgccacggagatgggggcgggggtggaccggtgtcgtcgtctgttgagaaaacttgtttgtagttggtactgcattagtcgcgcgttatcaaactgctacaggactagcaatggagccttaggttgatgcttctgctctggaccacgataaatgtcattttcggttggccccgccgtcgccagaacagagtcatagtctttactttctgggtcacccgccaaacaccaacaggtacctgctccaacagtcattatagatatttccaggttattctaggaagactgtttgctccgggtctggcagatcagttttattggggtggttctggtcaaaaagacggattataccgtagctgaagactgacgtgcgattggtgtgcccataataatctaacaaagctcaggggctggcggtgcattagggcagtatgccccgacaggcttcggttttcacatgatgcttgtacataaaaccgaacttagacgaaacttccatgaacatgtggactagagcttggataccattttctatgagccaacatcattatatactctgtataatctagtctccttgaatctgctccaaccccgggtctgtcggcaagacaatctgacttggcatattatatatttttgacggcctaggtcattgtcctatatgactatacccttataatgctgcataatctagcacttacaaaaaggctgggaaaatagcgggggcactgaccaggggaaccagctcacaaataaatcagccgacccttaaagg

SEQ ID NO: 5448 - DNA, 4529 bp, Emericella nidulans
ccaagtttgggaaagggtccaacgggcgcgccaaaaaaagtctaaccgccaatctgtattgggcccgcaaccagcccatctagaacttcaaagaaaaggtgggcaggcgttgcattgggaatgcgaaaaaagaccggggcggggccaccgaaaaaaacgggtgaatgctctctcagccaatcgttcgcacggcgggggcccttgcacccacacccttgcaaagccattcagccattttgccaaaaatgctggtcttccgcataacgtgggggtcggagcatctccgtagtgggcaaagaaggtttgattgtggaatccgccaccgctacaagtggcattccgaggactggtgctcagtgtgataaggtgtaacttgtaagcggtctgcaggatccccgccttttcctcaatcatcgcctgcccccaggcctcattgggtcgttgaggtcgatggagagatggaccatgattacctgctttggaagcagtccagacgtccgtacgctccggctgaccagacatggctaatgcgttgcaccccgaccggaacggtaagtcttgcgcctattcatcaccatcgcagagtgtccgagtgccccaatttagccgtactcacgcttgatgtgacctacaatggctggatcggttacagccagttcaacgacagtgctatgagaacgcgtgggccgatacgtgggaggctatcaatggacatacggctatatgcccgtagtatcaacatctatgatgttggactgccgcaaatgctaggaacaactgagctaccaggggcagcgcttgcacagaaactttgcacttgtgatcagcaaccaaccattgtgctagacaaacaagggataggttttttgagctccctcgcagcgcatggccaccccacgcaattccaaaataatctagctgacgcaaaaacagtacttcctctggtatttgatcttcctccccttctacctccccacctcatctctcctccgaaacccgcggctcgggatagcagtcgctgcactgtggattcttggccaggtacgcttgctccgagtcttcctgctactgacttcgcaacatcataaatgtgcattaggtcctctggctaaccttacaacgaatgctcaggccctctggctgcaacaaggctacctgctcgaatttctgggcatatcgagcttcttgcccggattgttccttgcgagcttgggtttttttgcggtgaatgcttggattttaggcgttattgtggccgatgttgggggtctgaatctggagtcgggcaatgagaagcggagggtgaaatagggtattgactgctcgctgctggggccgttaaacgtgggcttatggagaagaggggaattcattacgtcatatgtacgggtccggattgggggtgaagtcaaaagggcttcggcagggcaacacttatgtctacgtaaatagatagatgtatataatttaaatagatggaagaaatgacctcagtttaaagaacttcagccttttactaacttacattgacctgtgaattagctgaacaagcagatgatctggtatctgatatcaaatctccattcgtatgtatcatgtcatagcctgatgctgagtgaggatattctcacagaaatgggatgggaggagaaagatggggaaaacaaacaaacgtaatatggtatcttatagccctacacaaaagaaggcgatccttgcaatgacaaccgtgaaagacatgaaataatgcgttaacgctcagactgctttatctttgctcttcctgcatagtctcagtgtttcggcacatcagcaataattctatacgtggatgcatgaatgctcaacggtcttgtgcgcgggtatattgcgcccacgatctgattgttgttcccatattgcggggagatgccgtcagtgagtttgacgaattgcgcctctggacgagcctcatggagggcctcgaggatgggttcgttccagagacccgtggccttggtgccaatgagctggaagtacgggttgagtggagggcaagcggagtcaaggtcaatgaagcggatgcgcatgtactctaacttctggtgaatttggaggccgttaatggatgctacgacgagttcctcgaaggcgcgtatgaagtttaggtttgtgatgccggagaagtcgtcaaggaaggggagggccgggtagagttttctgtcacggcagcatgttttcacgactaagtcgagggatttgagctttgacttctggctcttatcgggccggatcgccatggagttcttcgtggactcgaagagacatgcgcaaactttgccggtaaatgtaagagattcaaggcgtggggctacttctccgaggagacgacagagatgtggtggattgacaccatcaccgagccagcggttctgtgagttgtctttgctgtagaagccttcgaggcttatatttacgtgaagcagtgacgaaggtaggcgacggaaaatgctggcgatggtctcatagccttcaatctttggcttggcatacgagcaatgccactcgcggacttttggtagtgcctgagataaagtgatccagtgttggtggtcccgcataatgttccaggctccccgcataacgaaggtctggatatctgggagtattggaagccgttgaaggcctgtacgtcctgtcggatctgttttgaaatggcgtaccattgggggttttttgcaatgacctccttccaaagtaagcatacgagccccccggaatacagtctgcacatggagaaacatctcttctaacgtagcattgtggcttgcgtagtaatatttgtagtcagccacggggttggaatgcggatcgtcccatgccattgtagcttgaagagctgccatatccgtcaatcctgcattttcatcattcaatcttcgtggaagctgacgggaggcgttctttatcgctcgttggccccaaacaggtatccatatctccacatgacgaacgtaggtcgccagatgaggatgcgcacgaaaccagcgtgcactctcctccagctcatctgcggtacctttaagtttgactatgacaacggagttaagcacgggaaacagacggcaaggataaggctactcactgtgtctgtaaatccgatcttgcacaagaattctccacacaggcgagatcagagccaggttcgaaagagctttccgcctcggatgcctcaacgatttgtgccaactctgcgcagatgatttcccactagccccagtaatggtcgctgtgcgctcaccgaacaaaaagtcgaggatggtctcgtgaatttcaactggaaggtgttcgaaacgaactttcgactcgcatactgacagtggctcggctgactgcacatcctccatctcggtatccactggcgactggggcgatcccggggagtccggacccacgggaacggtgagggatccctcatggctcgagattccagcgcttgtacttcgatttgattttgagcatgagacggtattcgaaatcgaagtagctctcgcgaaagcattcactgaaacgggtcgagggggcgggattgtagagattatgaaaggagaagaagacggaagtaaatcggcggtcatgatttgcgggaaagttatggtgacctaaacacgccaggcaaaggctatatcgtcaatcgttaaagatggagggaaatggctatggggaaacccaagttagcaagccggaaacgagcgagaagacgaggagaaagaagccgtaaaaacaaatgcagaagaagaaaagaatcgagaacatgacgctaaacgtactgaaggcggagctggactgtcgtacaaagcagtggaggtgaaagaagcacaagggacgcagatatatctgacgaggaatgaccacaagaataagcaagtcgaattacgctctgccagcgtgctccatggcgccaggtggggatgatgctgcgttggaagcgtctggtgttggttgacggaggtgaagaccaggaattaggcagtcaggcagcgtcgggacagcaagtggtgatgcgatcgtgcaggtggcgataagaatcaatgataacagagagatcgggatggggtttattcaatgcagcagtcgttggtgggctatagaggagaaagagggggagagagcattggaaacgagattcgaagatttgggaaagccatgaattcggtcagatgatttcacgccgtgatgccatcgtccaagcccagagtgaagtgtatttatagcagcccccttgttcgagattcattccgacgccttcaatttggtatcactttaataatggaattgctcccatttgaaactagctgtcagaacccgtcgcctgcagccatacattggaggatcgaatattcgggatcgttgaaagaattcctgccagccgatctcaatctctgacgaacttccaatcaggagtactttgtatacatttataaccttctcaccatacatctagcgactgtctaccgcttggcgcactattcgaccgacaagcagacgcc

SEQ ID NO: 5449 - DNA, 5905 bp, Emericella nidulans
ctggaaggctggagccaggagcgccttcatgcatggaactccgcgacgcttgcgaccaagctcaacggcagtgttgtgaacgaccgctcgttggtcagcgggtggatctaccgggtgtgtgtgcgcgtggtgtgggtgttcccgtgtctcgcccggtggcgcaccagacgtgcgttccgagatgagttgatctacaacgcccgggcgtgcccggatgggttctttgtggcacaaaagggcggagggcgcagggtcgcgcatgtctgggcgcgtgggagagacaccgcgcgggctctgtgggacacagtgtttctgcgtaacctgcctcgtctagggcttattgtctttgtcaggagcgtggtggatgctgagactgcggtgggagaggtcgacgaggcgatctaccaggctggggtctcaccggagctactcaccaccatggatgtgacgtactattgcttggcctcaaagggtatagttgcaaaggtactggaaaagctcggcctggtggaccagacgtactatccttgcagagaggaggagctgaaggaagaaggaatcagcccaatcaggggctactgtgaaactgcagtgcaggatcgctatccctcgtcgaccaaatacgttctgatgcggccagatttcttcgttcactctctggcggccaatggaagggagttacgggcgaatctgcaggctgcgaatgagtacttttctgatctgtaacagtcttcgcgtgtcatactgctcttcaatgttatataaacacttgcatcccatccagcgactgtgctatatactagatatttacataaagctgtgcaatactctgctagatttaaggaattcataaagaaatttccagcacatataaaatttattttttgttttttatgtctaatacatgagactcgcttaatcaccttttctacagcgcacagtctgagataacatgagatgaatcaatactatttctcaaagatcaaccgcaacggcttgacccccacggtaaagtgatccttcgtctcggtcaacagcgccttgccatcctctccatgcgcaaacttcaccctggagaaatggtggatgaagtaggtaacgaggttccgcatctccgtcagagccagcgcccgaccaatacacccatttgtacctaatacttgttaaagattgtcattatcccagtgaagttaactcaccaatattccaggtcaggaaagcgtcccggttcttgatcaactctggccgcgagtaccaccgctcggggataaactcctccgcatgagtgtagtttgcctcgtcatgctgcaaagcatacaccgggatcacaatggttgtgcctccagggatatacgttccgttgatggtgataccctctgcggcgtcgtccgcgggaatccagaggggatcgctggatggagacgcagggtttcctggatgaccccgttgagatgttgcgccttcgagacgtctttgggatccaaccgcggctggccgtttagcaggggctcgagctctgcgcgcagcttgtctacatgcgacgggttttgggccaggtggtagaagaggaacgtcagcgtggcggcggtggtgtcggagccgccaacgatggtcagtctggtgtcgccgcggagccactggtagtcaatgttctttttctcagactggttgtatgcctcgacgaggtgggagaggatctgctatgttagtctggtaattttctctcctgaacaacggcttacatcgcgtctgtccgacttcttctgagtccgctccttgacctgcgagcccacgaactcaagccatgctcttgcaccacgtcctgcccaaggaagattatggaggatcggcgccatccatggaacaggacttgtagggccgacatgggccatgcttgtctgagaaaggtcggaattcaccggttcggcttcgagggcatcaatggaactgggggcgagccctaagtcaccataacgtaaatgctttacatgccgtaatagagttctgttaggaagaattgaatcgacataccaaaatacttgaaccactctgatgcgtcaaacggcttcccgctcagccgcgtcatctgtcggacgaactcctcgcagtgcactgccactcgctcctcgtactcgcgcagcgctgacggtgtgaacgccttggtgaagaccttcctgcgcgcatcgtgcacccgcttgtcacgaacggtgtgcagatttaccaagggcaaagagcggtcgtaccatgggcccttcacgcacgttgcgcggtcgctcaaaacaagggggattgccgctggatcgttgactgagaggtttgccggtcctagtagtcgtcaggtctacagagcaggaaaaacacactatgggacagggggtgtccttaccagtgcgaattatcggtccatacttctcatgcatcttcttcattacaaggtaattatccgacttgcgaatgatgtacatatggtaaagattcgacgcgcgcgcccagaacgggcctttgaagcgccgtagcggatggaagaagacacgatagatgccgatgctggaatacagccccaggaagtaagatgttgagataagggctgtcaggataagactcaggagaggctgccagtctgtcaagcgcagagtggcaatggcaactgcggcggtgcccgcaagagcccgtgtgatccagcgatgggcatattgatggtgctcgccgcggatgaagtagaccagatggctaaggattccggcaattcctgcaccagctgaggcgtagtagtatatcttgaagtcgtccattgatggtaagtgtataggatgtaagaaggtagcgggaatcgagaagtggtatggacggctgatcagaatatcaatcatccatccaggtctacatatgagatccacgtccaaaggcccgtcctaagatctaaggtcttgccctgtgcagcttagggccggcagcagagttccgagcaatgtagtatggcagatcggtaatatgtagccgagcgccactaggtgtctggtcatctggagatgaacgccgggaccatagacgcagtcctaggagctcggtcaagtcaccgaatataaaatttactaaatcttaatagaatctgaatagagaatctgttcggacgattgaaaaacgggtgtgtatattcgaactgacgatcagtgcattacaagggcaacatatggcaacattcctcccccccccccccccttctcccacacccaaggttggggataatcaaattgtaaactacctagtcacaaacaatttgtctgcagagcttctttagcatcccacacaacactactgcttgttttgagtaagttcgaaccgtctagctcaagcaacctccacatgagtggcattaggcttactctcccccttaacagtggagaccgcgcgtgcatttgcctccattctctccacacacacatacttggcgaatgctcgcgtgggcacattgttccggaacatctcatcgatctcctccagcgtgcggccccttacctccggcagatagtaccacaggaacgcggtggtgatgataccgctgccaaaccagatgtagccatacttggggccccagttgagctcacccgggttgatgaagtacggggttgtaaaggcgctcagccacgcaaacacaaagctgaccgcggtcgacaggcccattgtgtagcctcgaaggttctgggaaggcatctcgccggcaacaaggtagacgtaaggttcgaggccgaaattaaatccgaagacgtagatcgagacgatcacgactagggcaatgcctgcaccgtctgcggaaacgttgggcgcggagtagacggctgccatgacgagcatagggagggtgcatattacgcatcctgcgaggatgattcgccggcgtccgacatgagtgacgatggcccaggtggtgaacagacccgcgagaccgacgcagttggtcacgataatccacttgaatggatctccgacatttgcctgttggagaacctgttagacccagtgatggtatgaacgggaggggatgacgcaccacctggaaaaagtatgtcccatacgataggatgaacatggcaccgacagcggcattggctgtgcccaccgcaactgcaatgatggtcctgcgaagattatgaccgcggaataattcgaagaagagaagccatttgttctgatgaatctcttggtctctctcgcgtgccgctgctgccttcatctcctcgaactcctgctgcaccgcaacttcgtcgtaggcaccttgtcggaaaaactgaagactacgaagcgcggcctctggctttccgtgctgaaggagccagcggggagactcggggaggagcggcagcgtgaggatgaggatagcaggggcaggatagcagacgtaaagagggatacggtatgcctctcgactcatcatgccgttggtttggtgattgatcacctacgtttatattagcaactttctttcctaatcttcaaaccaaggatagggcgaatggaggagactcaccatcccaatcgtcgtcccaatggtgatccagcaagtgaccatgctcaggcaaaggccccgaaagcgaggaggggtgcactcctgcaggtagagcacggtaaagttcagcagaaggccgtttcctatcccgattaagagtctggaaaagtagagagctccgagaacggtcgtttctgacatgatcacgacgcagatgatcacaatcagtgagcccagcatcaatccataccgacggccaatgcgagcgccgacaaaacccgtcaggagggagccgatgacgctgccgagaatcatgaacgaggtgatgatttgttggggaccggcctaatcggtgagacgacagtgttaacaaaagagagatgtgtatcaggcaatgggagaaaagagaaaatgctgagggaaagaaatggagcgctgtacatgaatatcccactcgccagactcagtctgatatccaaacacctgcaagaacccaggcattgcttggaagcccgcaatggcgcccttgtcgaagccatactcgaacaaggcgatgcccatgtacagggtgatggcgaacacacgccagttggccttcaggctggtgtcacggcggccctcggtcaccgtctgcacctcctcgccctggatggtgttagacatctcagctatgggcccggcacaatgcaaatacgttgcaggtacaggggtcttgaaaaaatacgcaatatgagaaaaagtgtgagtgcaaagtgagacaccgagaatgtctgggtttcccaacccacacgcggttgctgcaacccttttatagctgtgggtcttggacactgagctacgacagagactaagagaatagcattcgtgaagtgctctaatctagagtagtaaaaccctgagtggagccttttccccgctcttccccagatccaggctgaaaactcgatcatctcgcaccgaggacggagtcatcgctccgctcagcagggattccgggaagacgacacgaaccgatacggacagtacagaaataagtaaggtcccgaactagagatcagatcaaggacacgcctgacggtggctgtcatcgagttaatgaactttcatcctcggagacaatgttccttggccggctagatggatccgttccacgcttactccaacagcttgtcgaggccaagcagccgattgattcagccgaagacgacgataaagtgaatcaaatggcagcatttgcggtacccgtttgccagtaaccccttccaattgactacgagcggacatacccggtattgctgccagcaactcagtatggcggtatactccccttagacccttttctcttgccctaaccgacaaggaaaatgaaatggccaatgaggtgctctcacatgggtggga

SEQ ID NO: 5450 - DNA, 3617 bp, Emericella nidulans
aattaaaataaaaactaaaaccctaaatccagccaggcagggggcctgtgaacagacggcttcgcaaaagataaaggtgaatggaaaacctagataccaaactgagccgttgaataacgtcaaaaagaagtaaggaaggcacttggagtcgaaaacttccaaaataagaatttccgacgatcaaggagggtttagggggtttaaggtcgaaaagcagaactaagttagagtaaaaaaattgtggaatttaccagacactcttaggcccagtcactcccgcagtatcaggctctttagtgtaagccattctacctcttcggaacagtggatcctgaacggcccattcctatctcaagcccatcaatgctggatcacaatctgcccattagactttcatccatacgttgaaaccatacatcagatggcccaggaagccaaagccagttataccaagctgaaagcgaacaattaaaaaaaggcaatttttgaaggaatttcactggcataagtgttcccacaaccaccatttgcttactctgaagactgacattcaactccacagcctcaagaaatcccatcacaaacaacgacccccttttctccctcgggcgtcgtgagattaatgcccttcagcttgatatcctcacagatcgcattgggtgaacaaatgagttcagcaacgacgttcccttcggccccagacgacgttccgtacacattctcaaagacgatgttcgtgacgttgacttgtgacgggtagctcgcgcactcgtccgccggaatgttgaagtagcactggtctaggacgatggggtaatcagtgttttcaacatggatgttcttgtatgtgatgttattgatgcggccgtagccgacgtcctcgccggcccatgctttgagacgggcgccgttctatcaaccgtcagactcgatccgcatgacaggcttctcagcatgatatcggaaagagacgtacctcgccattaagaagtgtgacgttttcaatatacgcgtgctcaataatgtctagaacacccgggtattgccctatacttcccatggagacgccgtgagtgttattgcaccacagattctgcacaaagatgttggtagtgttaggtttcggcgagaagcagtcgtctccaatatcgacacgggtattagtcacggacagtccattgacgttaagtgagtcgaatccatctgtgttttttggttcggcctgtcatggttaattgaaggtttcagctgtgagactagttccgaacaacataccgacgcatttgtggaataggcattgatgaaaacgttatcgaacgagatatctttgctatttacgaggaaatttgtccagcacggcgagttgagctccgtgatgccttcaaccgagagacgggttgcgttctctgctacgaagaggataggccggtagtatgtgttgtcagggtccttcaacctgttagttggtcatcggtttcgaaatagaaaaagaagactgaagaataccaagatctcctgcccggcaaactcgttataccaccgctgcccgtttccattcagcgttccccttccaaagatgcggacatcgtgccctccccatcgccagaatgagatcgatttctggaaatcgtagtaaaagttattctcttgccagtacggcacgtcgtcagtgaactgggccgcgtccagtcagcaatgcgattggaagcttcgcacagaatggagagataccttcaactcgccgtccaactgcacctcaacattatctaaaaaagatagatcaagcttccttccaatgacatacttctgccccttctttagaagcaatctaccgccatggttcgcgcgacgaattccccagaggaaatcagccgacacgtcatccgtatcattatgcgaagagcggatcgtcaccgtccgcctatcatgatattttggatgatgggcgccgatccttttgagcccggctgcatcgttgacagagtatacttgggcgcctggtggctggctggtagaagaatcgaaagcaaggctgctggcggtagtcgcgcagagcgcgacaagtggtagaaagtgcaatctcatggtgatcagcgttggcgcattcgcgtcgagttcttgtagctctcaaaggctgggggtaggcttttgagtgtgctttataaggatagattaatgagctcgtgccatgcataattgtcacagcaatttctccgcctgtagcgggccatagtcggaccaggtggagattctagtcctcaattgacggagagaacgactgattgtacagataatgtcggaaaacgaaacgcggcatttgctgcatctgaacttggaattggagatcctaccccggatttggcccaagactaacgccccaggagagctcctggccgtaattattccggagagagattgaatcccaccaatcaaataaaacgatagtatacatggtatcaatatctgattgattaatcaaatgtttaatgatgtatgattatctcagcattatttatccttggtatatggacgttaagtacgtcgccgaaacggcttcatcaccgaccgaatgtaaacaagcagatataccatcaagtaattgctcaccacaaacgctacgaaaatgccaaagtacggccaaatcttggacgaatcaaggccaattgtggagaggtactagtataagtattagcgacgtgctggatatcgcaaaacctgaaaggaaagaatctcacatcatctccataactatactcgcagtatccgcactcccctgaaccatcgggattggatagatatccaacacccttttcggccagccaggatcccgcatattcgctgcaggttatattaggagggctttggaaaacggtcaattcgttctcatcacaaatgactggcacgccacggagaacggatgtcaggacacctccaatccaatatgtaaaaggggtaacgtagtacatcgtgtatgcccagaatgcaggcatgtatttatgaggctgcaagatcccgttcattgtctcacacatgatgatgaagaagggcatcaaggttgctgccaccaccgagtcggcactgcatttccaagttagcatggagttacacgagcgagtccactggactcgagcataagacgtggcaatggccgagaatgatccatgatggtaacttacctcaaggcggcaatccactggccccaggacgttgcgaacaaaaagaacaagaaaaacatgaggaagctgtatcccgcagcgaatcccaaaggaagacccacggagaaatagtacaggacgaagaagacgaccgcactgataatggcgtacgggatttcagaaatgatttgggctgtacaaaaagcaacccatccgtatgctccgctgggcccttcacgagccttccacagatcacgattcatgataaatctagcgctgattgcgttgatgaactcaggcaccaacatcagtaccaaaaagcacgaaaatgcttttgactgcagatccgtggtgctattgccaatctgtaggtacgtaagacagttgatgagagcgtgcaggaacgaagcgtagagccgagaatatgggtattcggggcttctccagaattgacgcgacgtc

SEQ ID NO: 5451 - DNA, 4733 bp, Emericella nidulans
ggagccatcactttctcatcatttctcgcttaccgacctctacgtcgtatatcctatattacaaggaggaatagttggtggtaatcataaaactctcattatggctgaccgcttcccgtcgttggatgacttctctgcgggttagtttacccgcatcacttagatagtgtccctgaggctaacaatgcattataggacagacccaagctatcgaaaccagcggcacagatgagaatgactttttagcccgtgagcgagctctcctcggcgatgatgccgaccaatttgcgactgcccaagacgtcacttccacagatgtgaacaatgacgaactactgggaggcccggaagaggcacaggccggcgctgggcctgagatttcgggctttgaatcctcgttcccggccattgacacacagaatgaggtatgcggatggcttgacgtcaaaactcatcgggtttatatgctgatattctacagcaagttgctcccggcggcaccattaccggaactggtgcgccctttccgccaaccggttactcaagctaccaggctcctgaggaggaggccgaacccgtcaggtacgggccgttgtgcctccaacccttatacaaatgttatatgtcaattgctaactttacgtttgctttcagggaatggcgcgagaggcgggatgcagacatcgcacgtcgggcggagctctcgaacgagaagaaggaagctactataaaaaaggctcaggaagatatcgacgacttttacgtatcttataacaacaaggcggataaacttcgggcccagactgcggccgaagctgagcaattcctcgccaatcgcgaagatacatcgtccgggggaacaagctgggagcgcatcgcgaaactcgtggatgtatctggaaagggcaccagaggcggtgcaagcggatcaggcaaagagcgctttcgcgagttgctgctgagtctcaagaaggacgagagagcgcctggcgctagcggggtttgatttacttttctgctgattccctaatattctggcctttatcttctcctgatgtacgtaattaggcacttgactttttagcttgcattccaccgtctacacgttcggtatgtagttattgcgacggcacttggcccacaaaggagcgttggagttggtcggatataggacggtagtcgtgattaactgggttcccggacatggaagcctgcttatactcttgcggctcgtctttgaaaatagacaatattacttcccagttatgtgcctgatgctagagaaatagaacaaaaacagcgcgtagttcatatgctgcgtcattcggtcaatcacttggcactcccaatcaatccagctcagttacagtccctccaggttcaccaactttctccaattgcctcccctttttaccctcagcttcgatctcctcgagcttcttcctgccctcttccgtcgtggcatcgacgataccttcctccagactaagcatgccgctctctccgagcttctccacgacatcttcggcctcttcaacactcatcttcccgagaactttgttaacctcatctaatgattcagactccagcgctgtttgcagttctttagagaaagactcaaaaatctttcgcgcttcgatttcgacgggttcgttgctctcgctccgagggatgttaatggtaatcttcgtgttcggatcgacagcgtgaagttgtatctgctccaccccggcaggatcgttggacgcagagctatccttggctagttcagcggcacgagtcttgatcttattataggtttcgttgacatcgtttcggaaaagggtacctgcctggtgctcccttgtcgtgatactataccagggatcaatcagtaaccaccctgcaagcttatacctccctgcaaacatgggactaggatacttaccgcttgaagaaaagcgaaatcccatcaggaccgagagagcggcagtattgcaataaaagtccttggtgtacacactgacgagcataggtttctttgccctccatctggctattgaacgcttcaaccagtaacccgtctgtttccttctccgcaacgatttccggatggtctgatatgaattgatgcagagctctgtagtcattgcggtcaatcttcgcaaatttcttcgctagcgcacttgcttgtatactatccgggtcgtcgacagcctcattgtcattggactcctgatttgaaggttctgttgccgccttcggattcagaagctcgactgaagtagctctctctgacgctggcaccttatccttagccttagccttagatacgtgggaggtatcaaagcctgtatgaatagattcacttgtgattttgctgccctcctctttctcaagctcagcgagctttgtgagaagttccttttgcaattcctgcaccttgtccttatgtccttgcacacccttgacatatgcttcaaatacgttgtcgtgtttcgattcttcaacctcggctttgacctggtccaccagggagctcatcatctgggagtacttcggttgctccctttcttgggtatggacgccctccggaggtgaggggggctgatcgtcttccggattactcgctaattccataagtgttgagaagataacttcctcgggattggatgaggaaccctctttctccttgaaagatgtaagaagtttctcaatgcgcgaaagtaagccatcgttaatgatgcgttcatacttcagggtcttaatgttgagacgtcgttgttctcgttgctgatggatctgcgcctgtttggctcgaatgaaagatcgcttgtcgacatttgggtgtacctcgatatccgagtcgtctgaaagctcgagagcgtcccacttgctatagtcgagcaccattttgagaactatagaaggaggggtggaaagtggggtaaaaacaaacgagattgaagatcagtatcttataggaaatagagctcggggcgataaaaactaggaaccgttgttgtcagtgtcccttcagctttatcaacgccgcgagaacgtaccagatatgccaacaagcagctcgacatcgaaaaggctcgattgttctcgatcggattccatagaggctcatgatgggcggtaaagtgcggcagaactcgggcctctccgaactctccgatcccgttccgtcactcggcacttggcttgatgcgtttcccatttgatcaagcccataatctttcttaaaacttcttcaattgttgcgtgacggtgttcgttgtgtgtggattgtcatgagctttccacgaactatctttgctgctcaatgagatatggcatctaacttgcccgccatcacatcatattaacctagttgttcgcagcgcttcctcaagtccgggatgcgcgggttgaggttacaagcttcttgggctacaggagctcacccaaggccattagctgcgtccaaccgaatcattgtgacgggcttatgctttgactccagtccagccatgcaccgtggtaatcacggcttttctatccggtcgttctcggggttcgggacctcagtctacagtagcagaatacctcacattgagcggaatcgtacgcccacgtctatattatactcgacaaattctcggtgctcaatcccttcatcaaaggtcttccaacgaatccggcagttctcctctacgcaatggtgtctagaagccaaaccacccgctcagccgacaaagactctgcgcgcagagaacaataacaagcaagacgaagatatcgacgaaggatttgagttgtcagaaaaggcagcgcaagcagcacaaataaatctccgtgcaaagctaaacaaggacggcgccagtggaaaaaagtcaggcttctcggaagtatggaggcttctgctcatcgcccggcctgaagcaaagaaacttagcttggcctttgtttgcttgatgatatcttcggcaataacaatgtctcttcccttttctattggcaaaattatcgacgcgtctacgaagacatccgaagatggtcagtttttgttcggactcagccctaccatgttctacggtgctttggccagcattctcgcgtttggtgccgctgcaaactacggtcgtatcataattctacgaatagtgggagaacgtattgtcgccaggacccgctccaagctttttcgccagactttcgtacaggatgccgagttctttgacgcgaatcgcgttggtgatttgatctctcggcttagctctgacaccataattgttggaaagagtataactcagaacctctcagatggactgcgggccggcgttagtggcgctgtgggctttggtatgatggcttatgttagtctcaagctatctagtatcctggcattgctgcttcctccaatcggcctgggagcgatcttttatggaagggcaatcaggaatctcagtcgcaagatccagaggaacctagggaccctgaccaagattgcggaagagcggttgggaaatgtaaaaaccagtcaatcatttgccggcgaaatcctcgaggtcaaccgatacaatacccaagtgcggaaaatctttgaactcggaaagaaggaatcgctgataagtgcaacattcttcagctctgtaagtccactgctatcaaatctgcatacttcgcgcaaataaaaaaaaaaaaaaggctgacagtttcttagaccggacttatgggaaacttgacaattctggcactgctgtatg

SEQ ID NO: 5452 - DNA, 2631 bp, Emericella nidulans
aagaagagtttacctttccgctgccagtcaattcatcagccaggagagtgagacccacttggtggtccatgtttcccgtgcaatttccgggttgcattgtttcggaatcagaaataatatagagcagtgcgctttatgtcatgattcaccaggcagttctcggtaaatcttcaaattctagcaaacataactcaaaataatgaaaagtctccgaagtgcatcaattaccctatttttagagaaatccatgaactcggaaaagagtaaacatgctaccctaatatataaaggatatataaaggatatataaaggatatatgggggtcaaatttgcggcgttatttcgcgcgttatatatatacgtaaagaaaatatgtccgtcaatacccccttcaacttcctcttcggcaccgcggtacaaagctgcgggtatttgggtagatcagaatacaaccattgaacaccagatgaagaatcgcaagattcaaaagcactgaaagatcatgtgcttgccacctaattcggggagaaaaggcattgttgaatatgtcttcatagccgtaatggacttcacaaacataaatatccttcccttgcaccttaagtagatatcaatgcccgttttaaagtgcggatgaaccagcctgcatcttcccagccaccgtgatccccagctctttctaaatgggggatatcggagttagtatctgagacttggcttcttgtctcatcatcatcatccttgtcagataactcgcggggctcgtggttattttcgtggcctgcatgtagttctgctgcttgtggctctgttactgcatcggtgctagtagagagcggccagtcgtcgacgccgaacagcgtccattctaccaagcggtcaatccagtttcctaagccgaatccacgctcgcgagtcaggcgttggagctcacgctcgtccatatcctcttcgcgctcttctgagtcccaggagtcatatgacgtcgcggagtcgtaatcgccatcgacatgctgctgaattgtgtctcgcatctcagcacggacgtgttcatcaatgaagtctggaagaagagatgtggtggaccgcgcatcttcgctcgggacatgagaaggcgttcgaggcgctgaggcgatgtgaatactacttcgcttcgaagtaggtgaaggcgtcgacatctcaagccccgtcatggagaggtcaggcctgctgttccgtagacggcttgcgcgtgatcgcgagtgcgcagctgcaggtgtggaacggccggacttcgaccgccgagagatgcccgtccgcagggcgtggaagatagcatcgacttcatacattcccgcctcagatactagactggtcgagctctcacgcttcgctagccagctctggcccttctcctcacgagcggtcgatgccagtgcagcacccgcgcgaagcatccactcgggatctctcacttcggataattggtgacgatgcgcagtgaagtgtctcgttctcctgctagcgtcaaagctggtgctgacatttccgctagcgctgtctctagactgatgatgcagtggttcgttcacattctgctcttgaagattggagtcgctaaaatgaataggagttgagctcttgcttcgggtgtggtggcgggcgcgtgagccactccgggaaggcgcacgagagaggacgccgggtgtccctgggaccgaatagctagacaagtaggaagttctagtggggttgtcaatagcctcatttcgcggggtgaaataatcctgtgggtctttgtccgactcattgtcgtcgtcgtcaatggggtaatggggagttaaaggcgcgagtgagatgcggtttaaggatggataagagcggcggggccgagcttgtgatgccgaggactgttcagctttgttagcgaatcagcaggattgtggatgtagtaaagtcgacctacagccattgcgaaacctcagaagaatgtgctggatcgaggtcaagagtctggaatgaggagagtcgagggttggggtagcgtagcccctggtcggttcgtatgacgattgaatgcctgaaccccgctccaacatgccaactacagcctgaaatgcccatattgctgactttgccggcgtcttagtgcgtagttgtaccgcaagcatgacttcccgacctacgctggaagctgctggccagacccttttgagcctttatctaatccattatgttctctcgttatcgtatccagactaattattgatcaaattttttttccacatctttcttattattttctattcccatcttttatctcctcttcttttttcttaatatttatttctcttttaataatcccggtttgctttcactgcgctctttttatctggcccctacccaccaatattttaatcctgtaacaatgctttctataatgaaatcttacttctcttttctctctattattcttcttattccacattgttctatatttctttcttttttatatctaaagtcacttctcctttttcatcttctctgttttaaattgatacttcccagcttcttccaactgttaccccttttagaattcttgatgaccttcattcttttaattcctcctaaaaaaagtaaattcctttttt

SEQ ID NO: 5453 - DNA, 9993 bp, Emericella nidulans
  unsure (1)..(9993): unsure at all n locations
cccagacgcaaacatgcaaggaaatatcaccgcgttgtacgatatcgggtgcgtcctcggttcgatagtctcgtatttcgttggagaacgactgggacgacggaccatgttgatagctggtggaggaatcatggtcattgggacagtgattctggcaagctcggacacagtggcacagttgatcgtcggttcgtacagtccataagcttcaaagtctcccgggaccctaggcttgcccctttcgacggatgtctaataagttgaactcgtaggacgcattgtgaccggcgtcgggaacggcatgaactcgtcaacggctccagtgtaccagtctgaatgcgcaccggctgcataccgtggagccctcctgactctacaaggaacggtgacaatcctcggggtcgtgatcgcatactggtacgggctcagggctcaggaatgggctatatttcactgaagctgacagctcacaggatggattacggaccaagcttcacggaatcctcgttacaatggcgcttcccacttgcattccaggccgtcttcgccattttccttgttctgcaagttatcggtctccctgagacgccgcgctggctggtccagcacgaccgccacgaagatgcccgcgaagtagtcgccgctatcaccgaccgggacgtgaacgacccacaagtggtccggacagtcctcgatatccaggtcggcctggaagaagagcaaaagggcgggccgtttaaattcaaagagctcttcgcgtggggggaggagcaaaatcttcggcggctgctcgtcattatcagcgttgagctggggcagcagttcactggctcgaatatgatcaattactacggccctgtcatgttccagacgacaatgaacatggggcggaacctctccatgatcctcggcggtgcgatccaatgtacatacctcgtcggctcggcgatcccagtcctgctaatggaccggttcggccgacgaacgttgctgatagtgtgctctgttggactctgcttctgttttgtcatggtgtctattctgctttcgctggggagcacgaatgccgcatatggcgccaccgcgtttatcttcatcttccaaatcttttatggcattgggtggctacccgtcccctggttctatccgagtgagatatcaacgacccgcacaaggacacggatgcaggctattgcatcggcttggaactggatggccgtctttgcggtcgtgaaaatcacgccgcttgcgttccgtatgtgcttcaaccctctccttccagaataaccagagctgacggaatagaaaacattggctggcgtacattcgtcatctttgccgtgctcaacgcggcgtttatccccatggtatacttcttctatccggaaacgaaaggcttggaattggaggatatcccgctgctcttcagcaagggcgggttcacgggcggggtgttttcgtccaaaggtgggcggaccgtcacgcctgggcagcatgcaatgcagacgaacgttgaccgcaaggttgagcggatgggaattgagctggagcaggttgaaactgttgcttgagcggctacagtaatacataggtatactgtgtgactaggtggcatccgtgaatgggacagtatataagcaagcttgcgcgctctagccgattcagagcatttgagtccaataaaagcacctccagaagccaatacagcaccctttcagaaaagccgtactatgacatcaaatcgaaacaaaggcctctcctcctaaccgccctccaccggttcgtagccctaaataacttcgtacaccccacaacaacccagttctagcgtcttaagaacgtctctgtaacctcccacccgtcagcaccccacggatcttcccagataatgctccccgtttcgcgattctcggcccttcggtccgccgacagaatagcgtcccatacccgcacataatccgatacagcaggacatcatcatagccacgtccctcaccgaccccagcttcggcgaggataagattaccacgcatctgtgggaacaccggcaggtcaagccgggggtgatgcgggaccgttaactggactgcggtcggttgcagagacgcgggtaaaagggcaatgcctgtccgacgtaacgagggctttactggcccagcggtcccaaactgcgacagcgcctcgtcatgtatctcggctgcagagtagcccagcacttcgatgttggtatgtagcgcgcgcaaagagttgacgcgtgtcaagccaagaagcaggtctgttcggagcgagtcggcggcgtattccgcgtagaaaagggactccagatggcggaggatgtactttgatttttcggcctgtgggccgagaatagataatctgtcgaggacggggaagaaggtctggatttgtttgtgagttcgaccttgatcttggccctgtaaggtgtgcttgaccacagcgccctggctcgctgagtttacggcgaagcctgcggctgatgcctctttagtgcgtattgcagcatttgtgaggtttctgttctaacttgtgaagccttctttcgacgtcctatggtggttagcttgaccttgaagaggaggaggaggagnnaagggagtactgtgagctcgctgattcaggcgattctgcagcgctcgcctcttctttggatctactgcgccctttcactcatctagaatttcaacctcatagcatgctagtgtattggaggaggcagctgacgacatggccgtctgtggggagatataggagaattctccgagtagttgggcattgcacgaggatgctttagatgctgacactcgcagctgtggagatggggtgaataagcgcttgttattctcttagagaagatctttcgccatgaactaagcccgatatgaggatagacctatggtcgcggcgattgcacggcgttaagattatgtaagatactgatgtgaatcagtcacagtagccttcaggtgaaagtatgtgtttaccagtagagagtcgattggtgagggttagggttttgcccaattgcattgcgtagtgaccacatagttccgttgaatgtccctgtctcgacggctcttttatctactgtagagcttctgggagcgtaaagaaaaaaaagaatgaataagatagattatacgcagtgcgcaacatccatcgacctggataattcacgggaaaagtcacgatccaaccacatggtcgattttttttttagactttgtcgacacctgggcttgggtagcataatatgatggcgtccaggaatcaaactagtcatggaagatgaatcagactggctcatgggaaaccacagatgcggagcaccgaggcccctgacatgggtacctgaattcatcaggtcttcatgtgcttgtcgagacgatattagcaagcacgggtgacatttcccctgccgcgctcattaaatatgcagcaccagaatgcccgtgtcagaatacccgagtcagctatatgaggggtaggcagcagaactgctgtactcctgattcatctgagatctgtggacctacagatagaatcagcgtgtcattgaatagataataaatgcggttcccgggatcgacgtcctggatacattcccgtactcacggagcactcatgtgctgcttacaacgatggcgcaactttggggatggatctctgtatactgcttgcttattctgtcgtttacggtgcgttcacttggacaggagcaatcagcgttctgtgaacacagttctctcgcgcgagaatgctggggccagtataacatctcaactgattaccacgccatcacgcctgatacgggcgtcaccagagaggtattctatcactaaccgtccaaccaccaatcaatcgaaaagacatatatggttgctcagatgagctaagtcaagaactgcagtactggctcgtcgcggagaatacaacccttgcaccagacgggtacgagcgacaagtccttgtcttcaatgggactctgccgggtcccttgattgaagccaactggggcgatgagctcgttattcacgttacgaatgggctcgagcataatgggttagttttgacctagactgtcgctccgcgcctgatgctgagactttgtagaacagcgattcactggcacggtatctggcaacgcggaacgaatcaatatgacggtacccttcctcccacccttatcttcctacctgagcaggctaatagaaaaataaaaataatacaggtgtcccaggcgtgacccaatgccccatctctccaggccaaacatacacctaccggttccgcgcaacgcagtacgggacaacctggtatcacagccacttcagtctccaactcgcagagggtctctttggacccctcgttatccatggcccagcgagtgcagactatgacgttgaccttggttccgtgtttataagcgactggtaccataagtctgcattcatactctgggaggaatcaacccgctatgggggggttcccgtcagagccaacgccgttccgccaacgggactctttaatgggagtaatgttttcggcggaggcgggaggcgctctgagatgattgtcgagaaggggaagaagtatcgccttcgactaatcgacagttctgtagacgggtggatgaagttctctatcgacgggcataaactgaccgtcatatcggcggacctcgtccctatcgaaccgtacgagaccgatgcggtaatcctcacctcgggacaacggtacgatgtggtcttcgaggcgaaccagaaaatagggaactactggactcgcgtgatttaccaaacagcctgtaacgggctggatatcaaggatcctgatatacgtggtatactccggtacgcaggcgctgaaatctccgaccctacaagctcgcagtggtcgtccatccgcaattcctgcggcgatgagccctatgataagctcgttccgtatgtgaaacggacagtgggaaaggctgccggccaggagaaccttaacgtgggttggtactatgacctgccagagctgtactttcactggacgctcaatacaaaagccctgacgatcgactggggaactccgacgaataaactcatctataataaaaaatctgtctttccagcggaatacaatatctacgaggtgccaaataggggtcgagtatgttccctatctgcatctccagcgcgtggtgctgaactagctagtggacgtactgggtcattcaaaatgttggactcgtcaacgcctatcaccctttccatctacatggtcatgactttttcatccttgagcaggggcgggggctttatacacctctcgtcaagctgaaccgtgataacccgccccgaagggatacggccacgatggcagggaacgggtttcttgtcattgcattcgaaagcgataacccggggtaggttctcatccacttcaaagaacaccgaagactaatgtcacagatcctggttgatgcactgccatattgcctggcacgcaagccaaagcctcgccctccagtttgtcgagcgtgagtcggagattgggcccttgattgagccggttattggcgagattgagagtgactgtaaaaaatgggagaagtaccatgcggaatccgtctaccatcaggatgattctggtatctaaacgtggatagtaataagtatgtacagaatgtgattttaacgactagtaagcggattggagtatgtaatcttaaagagaacgtgcttatgagaatatgatcagatcattgacttgaagagccagtttgcagcaagtcctccagccatttgtaggctacatccaggctttgagggtatcccatatgggggagaccgggatagaacctgaaacatcagtatatagactagttaggataccgggtgatctgctgaccttccctctttaggactgccatggttgaacagcaggaggcagtcctcgatcggaactacgccatcgtcgataccctagaaacttcaatgagctggcatgccgagaattgggaaaatgctcacgttcaacaacaatagccgagtgcatggccggtcaagaaccccagtctcgagaagggagaacttttgctgagcgttcttgcagaagtcggcagggtcatcgtagccgtatttcttcgcccaggcgcgtataattctggttcgagtgagcaaatatcacctaatgagctaaaagcagccggactcacggaaacggatactcgtggtcctcaactctgttaagccactcttcacttaggaagtaatgtgcgcctggaccgtgggcaatacaacccgcaagacggtttctgtgcgtatgcgcggctcgtatagcgtagaaaccacctgcgctcagtccccaaagtgcgatcctcgacatgtcgatgtcagtccgttgtctcatatacaggaacacgctgtccaacaagcgatccgtagcagaggggtcactcggatcagctggggagtctgccgttccgggaatctcgcagatcacaactgcccacccacggctgacgatttcatgaatgcgcttggtattatccggccgatagccatctaggcctgtcataatgagaacgcaggggacgggcttcgaactgtcctctggaacgcaaaggtagattgggatatgtgtcccgtcctttcccttacgatgggtgtgcccgatgaccgtttcctgcagctgcggtttccacaacgatgctgccctgaggtatgcaatcttctgccgctcgaatgccgttctcttgaggcccgttgtcgcgggacctacgtacgggaaccgcgcgatcctgtatacgactgctgcgcggaggagtaggcccgatgcggtagccccatcacccttgcgcagcgctgcggccgctcgctgttcgagcagctcggcaaaaggtaggaatatttcggtatacgcgtcggagtacgcatcgttgatgttttcctacagcgttagactggcaggtagcaaagggacggataggtacatacagcaatgagcttcttgaaaatcggctcaaaatcctccaactttccatcatggaaaggatagactgatatctcgcactgctcaaattaggatggtcttccgttttgtttgtccggcgagcataccgctgccttccatttcgtctcccagagggcctcgattgatcctttgtgtggatagactgtgtcgaacttctctcccagaatccagcccatagtgacccctctctgccaatcaaaattaagcactggcttgcagcaactcactgacaactgttctgatggctttgcagggatcttgtgcaaggtggaaggggatgttccgcagatgatgatcatatattgaatcattcttcacaaatcagggcacccggcattccaaccagggaactcaatgcacgatgttgcattgcaatgcattcttcaggaactggatcattccagtctggggcaacgtcgctgtatagggatatgtgggtacaaagcagtacgaccagcaatgggctagccaatgtggcggacctgcgaggtatggttggagggtcgctccttggtccggtcacgcacctcaggacagaaaaacagatataatgaccattatttttttttttacggaccaaccatattacggcaagaatcagaagccaagcgtatagaatttgaaataagtcaatgtatgccttggggaatcaacttcaacactcaagacccaagccgcaatccccatccgcaacaagatggcccaatagaacctcgaggccaaaaatagccaaacaccttgctgaacggtctctaaatatgtggttatgagtataccacgtcgctagctagcacaactccaatcggaaaattgccagttcatcacaaacaaccccacttgaccgctacttgcctcgactactttacacccaagtccgcagtgaagcgatccaaaaccagctcctccagaatcagattgtatccccatgcagatttacaatgatattcttctttcctatccttttcgccctagccggcacctgcatcaccctcctattctcgaaccgtatccgccaatacagagccttggtctccaaaaccagacaacccgaccgcgaccgagttgttgtaaaggggcatacctactcggaagcagttagtggggaccaaaaaacagaagtcgaattccgatccgagggcctgagtacgatatctcagattgagaatgtgcgtcaggtctgcatcattggtgcgggaaaagagggtgtcataacgggcatcattctcgcatcgcacaatccagaggtcgagttctgtgtcgctgataccgatgaagaattgatcagactatggaaatccgatacgctgcccttctctgagccagggctggaaaatatgttctttgatgacggggctctccacgcgactaggtctgaggacgagaaggaggacgggaagcacgctaatatagatcatggtcaggatcaagaccaacagaggttgacgggaaaggagacagcagctcatgtagagcgccgcaagaaactatctaatctaaccttctcggccgatattcatgctgcgctcgtcccggcgcagctggtcttcctgtgtctggagatggatcccagtgctggcgcatctgtctgtaccttcccctatcttacggctcaagtcttttcctctgttgctgacgagaagttaggacgagtcttcgtcacactcctacctagattccgccctctacacgattgccctcgcctcgagagggcataaaattatcgtgcaacgaagtacagcgccctacggtgctacagcgtatatcaagaatcgagtctgtcgccctctccctatcaatcctgcccccaatgcttcggttaggtgactgaccagaaatactctagttacaagcaatatcttcgccaaggctacccacactgttctggcaaaccccgttctggccgtcccattcccaggctctctaatagcgtcaatgattaccccatcgagcgtgataattggccacatcttctcctctacggcctcgacaccagcgataactgctctgaagaggttgtacgcctcatttgtgcctgaagaccgcattgtgaccatggacgcgtactcggctgaactaggaaccattagcgccaaggcagtaattgtgcagcagatgatggcgttgaactctgtgcacatgatatgtggcaaggtagaggcgagtccgggaaatgtgggatggatactgggagggctggacatcgcagccgtcaggacaggagtgtggatgaggagggaggtgcggtgcttagtcaatcttgctaaggggctggggatggaggaggtgaaggcgtactgggagggggtgctgaagctggaggggatgaagtaccggagagatgttaggaacttcttggaaactctaaaccagggtgaagaccggaagaaggctgctttgatcttgacggatgcaatgggagatcaggagacggcgctggttctgctggacgagttaaaaagagccgaggtgacgattagggcatgggtcgactgtgcgacaaaggagcagagccacaatgttcttcaaaccgttagaggtagggtcgaaggccttgaggtagcgaattcactagaaagtgcgtgcgcaggatccaatgtcgtcatcctccatggttccctggggattcgtgatgaggcgatgcaggcgatacggnacaatatggaaaggccgaacgactactgaatctaggagatcggatggacgaaatgaagatgcggcacgtggggttcaggcttgtataaacttttatcaaggcatttggcaactagtgtggccatgtatagattacttactaatgttagtataatattagtgtaatgtttcagctctatcgttatggcatccgcgctgggcaaagcgcagaacatcgagtcatcggcaaacgttgcgtctatacagattggaaggtataagttcgtccctgcgacatgatatgcttaaaccatgaagaca

SEQ ID NO: 5454 - DNA, 5529 bp, Emericella nidulans
ccgacctcgcgctgcgcggatatcttcgacgccggggagcgcgatcgccttcaaggctcggacggctctgaaactgcacaatgtcctaccccagtcttccgccagtgacgcctcagaggcccctgcctggcgccttcttccagacacctgcccctggcaatgcgctgaacccgccgcaatccaattcagcccaacagacggcgcaacccccaagtgatgctggtcagcccgtgcttcccaggcttcctccgtcaataaaaccggcacctcagaatctgaacactgaagagcgtgcagcgcggaccatcaatgacacgcttacacaggaggctcggtaccccgacctggacagctatttgtctcgtaagtagacgtgacgagctgtttctacaccctagactgacaacccgagtacagagggcttttcatccgactatgacattcccgtgtcgtcaacatgggcaccgttccagaaagtcaggatgtacaatatccccgaccagatattcgaccaatacaacctagcgcaggtgtctaccagcatgggacttctggcggacgtgaaccacgcgtgggttgccatcgataacgcattgtacctttgggattacacgcataccaatcctcaactagtgggtttcgaggaccaaccgaatagtattaatgcggtcaaattggcgaagccgcgtccaggagtgtttcttcccagcattacccatttgcttgtcatatcaacaactgcagaggttcttctactgggcatgaagtgtgagccaacgcccggaggtagctatcaagtgacgctataccaaacaggaatgtctacgtctgtccgtggattagacattcacattattgcctcgtcggacgcgaccggccgtattttcttcgccggttcctctgataacgatgtttatgagcttacgtatcagcaagaggagaagtggttccagggtcgatgctccaagatcaaccatacgagctcgcgcatctcacagttagcaccatctctaagcttcacgcagaggccgtcagagcaagtcgtgcaaatggtgatggatgactccaggcgactgctctatacactatcctcggcgtccacaattagagtattccatttgcgggctgacgggtccgttgctctggccataacgaaaccagccctcgatatctacgccaatattggccacataattgcctctaaccaggcgttgaactcgaaagtgaggattgtttcaattagcccaattccggcggcagaagcgtcaagataccacctgatggccactaccgccacaggttatcgtatttacctgagtgctaccggttcctacagctggtcacctgcacccaacggcgccaatgccccgacaagcatgcaggctcattatgtgaagacgccgcctttcgacagctcggcccccgcataccaaggacagtcgcgctttcaaccctcgctagcagccaccagggttccaattcacactctcgatcccacctcatcttccgtgcgttaccctccaggttactttttctgtttcacctgccaggacagtacacaaaagtcagatacgctatttatatcggccccggactccggacgtgttgctcggtcccaagagaatgtcatcccggggaaagcggccgaaaccggcatatggctgtcgttgggcagcaggatggaggacattggacttagctcaccgaccacaccggcttcagcaacccccagtgggttcggtaacgagcttgctgtgcaattcgagaatccttctgcagaaattgctatcctaacaaatactggtattcatgtgtttcgcaggaggcgccttgttgatatattcgctgccttggtgcgtaacgggggcagtggaggcgaagagggactcgagggcgagatcaagaactttattcgcacttacgggcgcagcgaaacacttgcgactgcccttgctgttgcatgtggacagggtgtggaggtctctacagattctcggttgtcaaagatcaacgatccggatgtcctcgagttcgctcgtaaggttttcatcgattatggtggccggccaacgctgaacgaaaatgctgttgctgataattcaactcctgctattgatactgtcgttccgtcacccagacatgcgggcattgctctctacatctcaagactattacggtcggtgtggaagaaggaagtagcagttgttggcggtgggcccggtggagcgcaaacaatctcaccttccttcccacgtgctaaattgttggccatccagcacgatctgtccgctttacaagagttcttcaagacgaacaagagctttattgaaggactaagtggcccagaggctcttgcgcgcgtgtcgacgaagcaggaagaacttgagctccaggcagagcatcgggcacttcactcgcttgtccaattggtatctcacaccatagagggcatctcgtttgtgacagttttgttcgatgagaaggtggaagagatcgtcgcattattaccagaggagtcgaaacaaagattcctgaagctaacatacgaggagcttttcagcaccaccaagggtcacgatatcgcaaaagagctcgtgaagggtattgtgaacagaaacatagctaagggagccaatgtcgagacggtagcggatgctctgcgtcggcgatgtggtagcttctgcagttctgaagatgtggtcatcttcaaagcgcaggagttgcttaaacgggctacagaagccggcttcaactcggaactgggccgcaacctgttgaatgaaagtttgcacctgtttcagcaagtatcggaaaatctgcccatggattatttggtgcctgcggtagaaagttacatttccaaccaattcttcgctggtgcaattcaacttgctttgaatgtcgctggccgatcagacaaagcgaatttggggttgggatggatgatggacggccagccttcatcggtaagagaggaatggcccttaccatatcgcattggccgctaaccagtactttgcttaggaccctcggaaagagtattacctattccgaaagcagtgttacgacctcatattcaaggttgttcttgcagtcgacaaccttgcggcccaggaccctggcgtcgttgacggacaattaacaacgatcgctaaacgcaagaacgaggcctatggaatcatcgcagtctccgaagaccaagttttcctgacaagcttatacgattggtacctggaaccggggtggagtgaccgactactgcgatccgagtctccttacgttgtcgagtacctcaggcggaagtcaaccgatgacatttcgcacgcggatctcctttggcggtactacacccaatccgagcgcttttttgaggccgcgcaggttcaattagagctcgcccaaagttcctttgtcctccctctcagtcggagaatagagtacctcggccaagcacgggctaacgcgtcgaccttcacgcaagacgtgggacgacaggcccgacaacgcttgctgcaacaagtttccaacctcatcgacgtggcaaacgtccaagatgaccttttgcagaggcttaaggacgacacacgtctcgaccctgatgcaaaagccagggctgtggaagaagtggatggccccatcatggaggtttctactgtatgtaatcctacgttcacccccacgcttgtttcaaatctttcaccgaccccacgtgtgcatgactgacaaaatcagatgttcaatcaatacgccgacgtcgcgagctactacgacatttgcctgcaaatcttctacatagccgactaccgtaaccccgcccgatgtccgcgccacatggcagcacctccttcaaaccctgcacgacgaggccggtgcccggggctccgccggtccacagccctacgagggctgtcatcgacaagctccgctccctaggcgcgcgcctggcatgtccgacgccgtcttcccaattcccatcttactccccagcttaagcgctacgctcttgaacaccagcgcaatgtcggcccgcccacatgggtcatcgacactttcttcgacctcggtgtcccgcacgaaacgatttacagcgtcctcgaatcaatgtactatatcgatgaggcgccgttccacggtagtaatcgaaagatcatcgccagggatttgctttataccatcgagcattggttccatgataccgttcgccttggcggtgttgtcttcggcagtgaccttattgcggagcggatagaagagatgttaacgcttttacaacagagtgggattagtgcggagcagatggctgttgcgcatgagctgcgcgctaggataaacaacattttgaggtagttagtctgcaactttgggggtttgggcgagataggtcaggttatacaatagttaggttacgtgtgtaaaggccattcgttcgtacgatttctcgattcttactcgtattgtttggttagcagatccttagcacacttgttgatgcgatgaaatcgctgctggttgctgcgatcaacctatccgtatactcattctccaattgtgaaatagcattgctgctgcatattcaccggatattcgccttctcctaccggcgcttgccatgtacgtgtcctccaatattgaccagtggactaagctggtagacgtccctaagccgatttacttccttttccttccgttctcggactatatgtcaaccatgaaaactggccgcgtcgtatgttgtatgtcactcagatcaaactcatatcgaaagcacaccaaatatgcagattttaagaatgcgcgacaatactgatcacattatttctttattaaggattactagcaccgtcactacaaaatattgctgaataagtcaggaaatatgtagtttgcaatgcctcaagcgaaaggctaaataaaaagagaaaaatagcgaatagaaagaaaaaatttaaagtaaatcataaaggtctatgtgttggcatgaatatggacatcacaaacacgaggattttggggtagcagaaaactaagaacaaaaaaaccaaacggggaagaaggcaaagggaaacaatgtctaggaccaaaaaaaaccggaaagataaatcgattcgcagactaattagaaagcaggtaaattcatgaaaaccgtctatgacaaaccggaccgaggtatcaacgaaagcgcgataagcaaaagaaaagggcaaatggcacatgcgggaccagcggcatgcatgcgaattaagcaatccgaccgagggcgcgaaagagtgggcgtaattaatatcgatagagttatgatgagttagcccttgatgtgtggtgttattattccgggaaaactcccggcaaaatagagaaagtcggcagcggtgggagaaagataagaagacgctcgaattgatcattcgaattcgtcgtaaacgggaatcggcttttcgcccagtgcgcacaggcggaagatagtgcctagatttgcgccataatcatcggcgaggatgataacaatagccccatctagaggaatgaatg

SEQ ID NO: 5455 - DNA, 6849 bp, Emericella nidulans
  unsure (1)..(6849): unsure at all n locations
ccagcgccgccaaatccatcaccaacgtaggtgctgcggaaaaaggtggatagcctgggtatgatatattgcctgtaaatcggggtcaagaccggtaagcggcttaccccttgggtcggtgaggaggattgtgtctaggtacttgaaggccaggttaggcttggagggggtttgcgctgaggcgcgaggcacaagtgtaagagatagctcgaacttgtgaatgcgcgggttgaagttcagcgttccgttcgtgttccttacgtatgtcaatgggaccattgcgcttcaatagtttaggtgatgctcaccagccacggtcaggaagaagatagaagatgcctgagtatgatgagctacttttcttgtgccacgagcccttttcaagcaccgcagagctcccgaggccagctaaggtgtcaccgtacttgtcccgaacgttggattcgacgaatccatatccgtcgagaccgatgtaggtgtaagttatgcctccacacgtagtcgtattgacagcggttaagttatatcgagcactgcatccgggagcagcaaccgctgatgctgctgtcagaggcagggttttgaggaggaaagaccacttcatgatggttcggcgagcggacaaatcgaacgtgacatcaactagaaaatcgaggcccggacatcctggtgaatctgaaaagaataatagtctgactcttgggggctccagaggaatggctgaccaatgcagtcagctttgttgcagcgttctagaaaacaatcatcaaaaatgagggcaatcaacgtggtcgaaacaaggccgttgatttgttggtcagctggagttgttcctgcagcagatccaatgatggcgtgcttcgacagtggtcgcggccgtggatggatctagtcgccgagatatagcgacttggcagaatactactaggacatattttaacccgatttgatggagataagatgccattccttcactgcgttgaactacgttgcattcttaattggcagctctgtctcccacgagcgatcgcacgagtcagtagtttaccggcaccctgtgcctacttccaagtggtctccagcttagagtatttctcctgagcatgatatcccagatctatgaagatcgcgtgctcacctggtaaggattagcagactcgaatcaagacataacacccgcaaaagacacgggattgtctcaccacctagcgactcaaccctctcctcattttcctcctccatctttgacagttcttcctcaggctgctcttcttccggtctcttgtcgccttcctcagctgtcgcggctttcccgaggtctccagctgccgaaccaaccatcagaaactgggcgttcggatagtcaagtaactcgggtctggccggtatccagcgaagctctccgaattcctctagaatgctatagtagtggtcaagtcagcacggactgtgcccaatatggtaaaaaggccactaacctctctggatattctggctccttcggaagacgggcagacgggggactagggaactttgggtttttggactgcacaagccagctaccgcgttcactgagtccaaaatcctcttgaatttctccaagcctctccggcagtgtgatatggtagacaatgtgcgttgctcgcttggtcgaggtcatggcataaacaccctccgcatatggttttgcctctggaatctcacgcgtaccacgagtagaagtctcataagtatcgccagcaatagaatcttcttgcagctgtttcactgtaagctgccgctgtctcgacaaatcccatcagcctgtcctttcctgatcatggaaatctctagttcggcaacatcatcaatggcccctttgggtcggaatccagtgccctccgttcactgtccattgatgctcccattggcgtcggacgtagtataaagaaaagccgcgctacatcgtggacacaaaacgcctcttcgacattcactctaccgcggtagaagaagtaaataatgcccttctcgaggatgttcgatggaacaatctcttctcgtttctcagtcgtcttcaaaccggcatccatttcgtctgaagaatccttcagtttgttgtccggaacctcacgacgcccttcaggttcctcctgggtttctgctcgagctttgtcttgaggtttctctaaattatcctgcggtgattcttctgccttagcttcaggctttcgatccttcgcccctggcccatccgcccgcttttcatctgactgaacagccggttctggaatagttagcatggagagatgggatcttgtttgcaatgcaactcactcgcttcagcttctactttctcaggtgtttgaggttcttccttctcgaccctctcggattgttcctcagtacttttcttctccctctttggctcaggggatttattagtggaacctttgcgctttgtgctaaggggccctcttctcttgatatccggagcagctgccatggcctccttcgccttttgggcagcgtgacggctagaagttcgcgttgccattagtggatatgtacagatcgggaatatatgacaccagtgtcagtaggaagcggtttgtttgttttcagaccgaggagaggaaatagatgaagatcgatcctagggctcagtcaagagacgcggacgctgtgacgtcattatcaccataggcctaaacccatcacgtgtaatgaagccatccaaggggctagattctaaaatctaccgcgctgagtaacaggccgtttatttagaaacggccgatttatatcacacaatctcgcattaatctatgtccatatcctccggggtaggaaatccattcgtcatgttagcgccgctagtatccgtagacacagaggcgttggatgaactactcaatcctcgagatcgtctggtggtaacctcttcatccgagtccagatatctttctttaggcaattcctcttttttcctcgcccgtttcgagctcaaactagggctcgcatattgtgcatcggttacaaaggcgggctctccggacggggcagttcggacgggatttgtgatagtaggctttcttttccggcccctctttggacggattgatcctggattgtcatgatcggagttgcagtacaacatttccatcgaagagatcaggtactcccagagtttgcgctgtcttagctgcgctgttgacacctccgtttcggacgtaagtccctcctctggctcctcaatggcatacggtttcactacctcacttttgagaccaaatcccggagtatcaggaggtaagtcctcaatgtcatatatttctggttcgtgagctttagggatttctccgtactgttgatcttggtcggttcgaggagcaggcgtcgggctgcttccgcccggattcttgtaaggttgatacagatccgggttttggccgtttgctcccatagtaccgaggcccccaatatccacaataagggcaatcgagttgttcgggcgagtgcagttgcactgtagaagaaagagcaaagttcagctcctggtaatgattatggatcggagatatgtcgcatggaaattccataatagaccaagtacacactcagctgagtgcgaggaccgtcaaacatggtttatcatctcgtgcttgaaggcagggggagaccagagtggtggttacgatcaacaatgtgagcgatgtagctcttgaccgccttgggcgccattggccggcgctactcgcttattcaataagtccacgttaccgccatccaaggtgtcctgtccagaccccagactgtcaatagagacgcttccaggctacgtctcttttttcttctgctcaattgtccttgtgcagtggatgaggtggtcgcctttgtgattcctctgtctttagtgcgcggagcttgcttctacttctacatggtgcggcttcggccaacccttcttcaagatgcaatcctccccaaacatgctcaccaaggtacgcctacatcccattccaatttgcttgattctcccactgctagactctaactagtatctcctgaatagtttgagtcgaaatcttcccgcgcaaagggaattgccttccaccccaagcggtcagtcgaacagcttaccccctactgatcgcaccggtctaataaccccggtacaggccatggattctcgtctctttacattcatcgacgatccaactatgggattaccgtatgggaacactcatcgaccgatttgaggagcacgacggccctgttcgtggcattgactttcaccctacgcagcccctctgtgtttccggaggtgacgactacaagatcaaggtctggcactaccagaccaggagatgtcttttcacattgaatggtcatttggacctatgtgcgaacggtgttcttccaccccgagctcccatggattttgtctgcttcggacgaccaaacaataaggatctggaactggcaaaacaggtcattgagtatgtcgaactatagccgtctgccctgactgttactgaactttgatttctagtctgtaccatgaccggccataaccactacgtgatgtgcgcgcaattccacccgacagaagacctcatcgcttccgcctcgctagatcaatccgtccgtatctgggacatttcgggactgcggaagaagcactcggcgccgaccacgatgtcgttcgaagatcagatggcccgggccaacaatgcacaggcagacatgttcggaaataccgatgcagtggtgaagttcgttttggaaggccacgatcggggtgtcaactgggttgccttccacccgtcattgcccctgatcgtctccgcgggtgatgaccgcctcataaagctatggagaatgagcggtatgttgcaaatgtgtccaactctaatgttatcaatgacactaactcgactgaagatacgaaggcatgggaagtcgatacctgccgtggccattttcagaacgcgtccgcatgtcttttccatcctcaccaagaccttatactctccgttggagaagacaagacgatccgtgcctgggacctgaacaaaagaacacccgtccaatccttcaagcgggatgtggatcggttctgggtcattgccgcccacccagaaatcaacctatttgcggcaggtcatgacactggagtaatggtcttcaagctggagagagagcggcccgcatccgctgtgtaccagaaccagttgttctacatcaccaaagagaagcacgtaaagtcgttcgactttgcgaagaacgttgagtcgccgtccatgctgtcattgcgcaaactgggatcgccctgggtgcctcctcgcacgctatcttacaatccggccgagcgtgccgtacttgtaacatccccggcagatgggggtgtgtatgaattgatcaacctccctcgagatgctacaggcgccatcgaacccacagacgtcaagcgcggccaggcgtcctcggctgtttttgtcgcgcgtaacagattcgctgtcttcagccaggccaaccagcaggtggatatcaaagacttgagcaattctacgaccaagtccattagacgtccggctggaaccactgatatctactttggcggaactggcagccttctcttcatcacacctacctctgtcgtgctgtttgatatccagcagaagaagcaactagcggaattggctgtgagcggcgtcaagtacgttgtatggtcaaacgatgggctctatgcagcattgctcagcaagcacaacgtcaccattgtcacaaagactttggagcaagtgagcagtttacacgagactatccgtattaaaagcgcggcttgggatgacgctggcgtccttctttactccaccttgaaccacgtgaagtactctcttttgaacgggtaagcctccttactagtgcttctaaaaagctacagattgagctaactctaccgtagtgacaatggtatcatccggactttggatcagacagtttatctggtcaaggtcaaaggccgaagcgtctattgcctggatcggaatgctaaaccaagaaccttggaaattgatcccaccgaataccgctttaagctcgcccttgttaagaggaactacgatgagatgctgcaaatcataaagacatccagcttggtcggtcagagtatcatctcctatttgcagaagaagggctatccggaaattgctctccagttcgtccaagaccctcagacacgtttcgagcttgcgttggagtgcggtaacctggacgtcgcaatcgagatggctagagagctggaccgtcccaacctgtggaaccggcttggtatcgaggcactggcacatggaaaccatcagatcgtggaaatggcttaccagaaacaacgaaactttgataagctgtcgttcctttacctgtctattggtgatcaggagaagctgtcaaggatggcgaagatcgcggagcaccgcggggacttcacctcccgcttccagaatgccatttaccggggcgatgttgaggataggattcagatgttcaaagaggtggatctctgtaagttgaaacttgttctaacctatacaaagtggagctcttctaaccacattcagacccccttgcatacctcactgccaaggctcatggattgactgaggaagccgaatccatcctcgaggtggttggtctaagtgaagaccaagtctccctcccgactattgaagctcctccacagataccgcaacctattgttgccacctacaaggcaagctggcccgtcaaggctgctgcacactcatcgtttgagaaagccttgcttggggaagttagcgcagcgantgaagaagccgctgaactggg

SEQ ID NO: 5456 - DNA, 2873 bp, Emericella nidulans
gaaggttcagaggaagaggaagaatggagcgaattgacggtgcaagcgttggttgtagctgcaaaggccagcctcctgcagactagacggggaaccggaatagaagatccaggccagggtggatagaagtaaggcgtacggctggataactaataagaagaggggactgggattcgagtacgcagtacctgggaagtactcgataataaatgggtgtggtcgagtcagggcgacctttgacagggacaaaggaagagaccagaatcaaggacgaaggacgaatacatcttcttttattaatccggcattgatcctctggactaggtaagagaccaagagaccaagaggccaagactagactacaaagaagggtagtggaaggggcgtagtggaggcggcctttggccggccgctgattggctcccacctggtctggaactccccattacattgacaatgctaacaccgatacggaagacagcacaagacaagacgaaatcgctttttcagcttcacgttcgagtcattgagtgaggacatgaaaggcgtccaggcagatgagcaacggccaagcatacttttctacgagttcagcggtctggcgtttaagccagtgtgatccatcatcatcatcatcatcatcatcatcatcattatgatgatgacggataatgatgataatgatgatggatctcgtcggcagatccctcttgggttggactggagcccgacagaaaacgccttcagcctaatgcgccggtttccaatagggctgcacgacgcagactcctgagccagtctctaacgagtgtccgcttacagcagacgatttgggttatcagcgtcagactactggtttggagtagtccaaacgagacatcaaatacggaggatcacagaggatcacacttgtctctatcaggctctatctccagggctatctccagggctatctcctggcaatctccatggatacgtttagccggaacccagcaccccgggacgcggcccactcagtgtgctttacgcaatcgaagctctgtagaacaaaaggaagaactctgagatccaccggtgcccaagatgcacatgatcaccgttactatcgacagagacggctggattcggctgaccttcagacggaggcgaatggaaaacggcagaaaaaaagcaacggtgctgacaagtgacaaccgacatcccatcagaccggatggcaatggattctcccgctcgccggcccatgtctcggcattatccctgccttttggggtccggccgcatgggtgtggggacaaaacaattcgccagctgaagctgattgcttcgctgcccgtttgctcaggggcagagctagagctcagcgcttagtgctcagtgctcagtgctcaatcggcatgagtcttgagtctctgactctcactctcacatgctcggcggaatggccggatatcgaccggtgggacggacgaaacaggcgccatagatttcttattctcacgaacatccttggccgttagattattattgactaatgtgaatcctgcgacgggacgttcgggatgttagattgttaccgagcatttcagggcgactttcagggtgactttccagggcgacctctggcctgttggtcgttcgaccactcggccgtccggtctcgctgactggcgggacaatcgcattcagaggctgaaggtgtgattcgggtgcataagcttctgcatgcgtatgattgttgcagcagggatcagatgccgggtcaatgcgaccggccacattcttgtcttgcgccaggaccgtcgccaggaccgtcgcctggctgcagttggaatgtgatagtacaccccggccacccgtctcttgtctctggtaaatgctccgtaccgcgtacacctgcgagaccaggacgcactcggtctctagtctcagttggtcgcggtcttacggaagactgcctgttcctagtcttggcgccatcatccttcactgtggcagcggctccgaaagttgatagatcaatcgacggtttgagacactcgcggaaacagggcacacgatgagtttacagttccagccatccccactgctgccggcaaatcgccaaccacaacttcactccggatggactacggtgtctgaagaaaatcgcgcttcaagcctccaatccacatctgccgcttcaaagtaggtttgagaacctccccacgtggggcctccactgagttcgcctttaccacatgaaagttcacccatgataataatacagagtataaaaatatataaaaataaataaccggtttcgcaagaggacggtcctacggtgtacgaactcggaggcccagtggactaacacagctgggagacactcgtcgatcattcagctcatttgcctgtactcgtgtcccagttgatcacccgaatatactccgtatctcaacttcattctcgtactctcgtcgccagaacgagctctgactagcgactgcaacagaacatccacttttaatcaacaatcatcaacaacaatcaacaacaatcaataccagaaacccattacttaacccattacctaatccgatcccctccgatttcctgggactgactccagcttcatcgaatactacaatcacaaagtctcgatccgcccatctcagtcgactttctaatcaacccgatctagatggatcgacttcgacagtagtggagaccttctcaatgtaaaagctttcctgtagccaattaagccctgacccatacgcgcgcttgagtgattttattcattttcattgctaaactatatgcatgccggtggggatcactgtcagctttctcgaggccccgccttatcgcaacacttgcactaaccagtc

SEQ ID NO: 5457 - DNA, 8597 bp, Emericella nidulans
cccctatccccattgatattaatgacaccagacgcgaacgattaaaatacccagtcgaattaacccctggctttataagccatcccattgcctgaccaggtccaatcgctaacaattgcaaaaccaatataaagaaccagccccagaagaaagcgccagaccaacctcaactccggagggggaaacaatgtaacagccgataacaatatagatgtccagctgagatagtgtacttcaaaaaatcaatgcacaaaggaaaaaccacgagggaaatgatggtatacatgacgtgtagatgtgcctaggattgaagcactaaaaaagaaacaatagctccataggataattttggcattgcgagaatgaaaacagaatagaatacggtaaatcattggagatgagcagtcatcatggagacacgttggcaggcatcttccatacttttgcaaaggtaggcaagccgactggcagcggcctcaaagtcactttcgacaacaagctcgtagttagaagcctttccgacctcaataccatctaaggatggatcttgtgcgatagtcgacacggatcttcgtggctggtcggcgaacagtgcaagaaccgggtcggattcatcaacatcaacgttcacctccccagcgtccacagccgtttgttcttcatggggagagaatgagaggaatgaagcgtcccttttgctagaaacgtcggtgaaactgatcccttcgagcccagacggtttaccggaaagagtgtcgaaatctagtacgggaggctcagggacttccagaacagcaaacacggagggattgaagtcgatcccagaattccagccaccattgttcatgttcattgcagagacatcaatcccctggctcggaaccatcatcattcccatttgggagttttgctgttgcatttgatatccttgctgtccgtggttgggagtttgctctttgacagggtttgattgctgaagcgcggattgcgggatagttgagttctgcgattgctgcggcaggtgaggcaatggcacttgagcactggggagaccattaacgtttggctgctcatccaaatagtgcgaaaagctgggggacgatagcagctgacgaaccaagtccgtcagacgagcattttcgtcgcaaagagcacgattctgctggcgcagttcgtgagcttcgttggtcttctgggcgacctcgttctccagctgtccgatgtattctgtataatgaatttagtacgaagctttcaaaccccggcatcatcccataagaataatccaaactcacctttccttcgagatcgaaaagcacgtgctgaaaccttgttgcggagctgccggcgctccttgctgctcagtttcttgccttcctcactggcgaggagcctctcatcctcatccatatcttgctcatctttcttggttcttgtcaatggggcagcagacggcgatggggaagaatctgggggcgtcacagacgcagatttcatctgctgtagaaggcgtgagatacgttcatcgactgatgcatttggggcatgtgggtggtgaatatgttgctgttgctgttgctgctgctgctgctgctgctgttgttgttgttgttgttgttgttgttgttgttgctgctgttgctgttgacgcaacagctcattctgtctctgctgttgagcggctttggccatggcagcttgctggtgcatgccaggatacatgcgtccgacttgtgtggaggaacccatgggaacaacttcctgtcctcccaaagcattcgggtccacaaattggttattggttgaattttgcgagacataaaaaccgggaaccgtagccatgatgctgtctgactcgaggtccatctcagaaatgttccgggttggggtagagttgaaatccaggggcgcttcatcgcgcttaatctgaggttgaaacatgtcgccattcacggcgaagccagggtttgtagcgccaaagggcatcacttggttgaaagggatagcttgagccaaggcaccaggcggaatgcctgtctgttgcttgtgttcttcatattgatggctaggggccggaaaagcgacgggtgattgactggatgaggcaaagctggaacttcttgcgtcgctggaaacatattctgagctaggaagagcaggatgcgatgttggcaggccgatttttgatcgtgctggctctgaaggggtgtagcccagctggtccaggttgaggaacgagtcgaggtcttgatcataagacgtctgagcgacaaccgggttttccgcgagcgtcgccatgttatgatctgtgtgccgctaagatcgcgaaagatagattggatgatatttcaagacctcgtagtcaagacacaagacactggaacagttgggtcgagattcggctatatggagtacacggataaagcgagcgatcgaacaggggttagagtcgaaaaaagcgagagcgaagttttggaggtgcagagcaacgggtcaaacacaggccggcatcaactgagggcgaggagagaagaagcggatgaatagagtgataaaagggacaagatggatggtgcaggagatggagaaacaaacagggacaggtggatggaagatcaaccaagccgggcgctgggatggtgaggtctgaagagggcgagggaacgataggcggtgggtcgtagtggggagcgccaggggtaacggcgataccggtaatttacggagagaatagaaacaggtaaaagaggcttgcgtgtcctctgctgattcagcgcccgtgagtttcccggttggctatacaagctcggactagggctcctgaaaccggtgctagtgctgcagctcctcccatccttgtttctgtattctgatacaatacaaggttgactgctcgggagtgctacatcagtctacaaagtaagatactcactcctcaatttgatgaagagttggcaactacaatggtagtatatctgtcctctcaagactacactgcgcacaaatattggagctgaaactgggctgtgttgtgctatatttaccctccttcaggcagcagaataatatgagagcttcgaagtttgaaccggcgaattactcgtaaagtgaagggtgcccattacggaaatatagaccggacactgggattatgtgcgtggctttacgaacgccacgcctagtggttggttaaatatagttacaagcagtaccaaacaatagagaaacaactactcttaagtacatactgacctgcgaccgcttgtctgtgactgagttcggtagatatcataccccaaaccatacctgcatagccacatagccactacgaaactcagttgaccctagaagccataaatttgacttcttgtggaatggaatgtgcgagggtcaagagcttgcgtcaagacgattccgttggcactagctaataaagcactatatagacattgaattccatcaactgctcgcatagctcagttggtagagcgcgtgactagtaatcacgaggtcagcggttcaagtccgcttgtgagcatttatattttgctttttatgacccgatagtaccgagatctcgtactctcccctctggactgcaaaagccacaacaagtcttaccaaagaccacgcatgccccactgacggtgccgcttttgatttgttctttttctgtttcaggtttttgaccagcagcgattgcaacccaccaatcggactaaatcaacccctgcatataccatctcaggtaaatgacgtaggtggatccggagtggcgcctaaaccatcttcattcattgtcttgaaatgttaaacacaacagtgagaacaacgccgatgccgcggtcctggcaagatagtcaagtacaaaagataaataaactaatggtatgcttggtcttttgacggataatgatatatctgtccaaaggcactcttcattgacatacctgaaggcaataaactctctatataaatctttatgtgcaagacgtctggttgatacccttttgtgtcttttgctgtttttttctttttggattgcccaaccagcctcctcatcacttgccaggttgattctagggcaactattaatgtatggcagtactaattgcctagaaaagtgccaccgctttcgcagcgtgcgttgtgggcggctttatcccatccatcatcatgacaagcggcacccagtcgaaagcaattcttcagttcggggctgcaaaactctaatcagacagagtgggggtgccggcgggtagtcctatcaaataccgaagcttacatctaacaaaagccttaacctggaactcagcgccggcaaaaaatccttatatatctgaacgtatatacagagtaggtattctagaacatggacctcgggattatttcagcttcgcaaatacaacttgaggaacgaaagttgttctggctctcagggcgaagtggtgtggagcagcacaagtatgggtcacagtatggtaatacgtattaccccaaatccgagctcggatttaactatcagatcgtttgaccatggccgcggggctgttctagaaagagaaaacgcattctagaccagggctccaactttcagtggtgggttacccctattgcggcgcatcgaaccagctaccttttaggcacgccgtaacgcattcagttgcctctccagtcgggcgcccttgtcggttctgcactcttaaggtatgaagattcgggaatatcaagaaccagccaaatgtcctcgcaaaccgcattctctcaattcgtgagtttgagatggagtatacatacagaacatctaacttaccatgaaactggtagcgagaccacatgcttctagcaaagccccagttttcttcatcatgtcgcattatcgtatgagatcttttgcggaagggcttagatcccgagccatgagtcccgcgacgtagggctagccgaagccacactcctgtgaaatccgatattcacgggacactgtaccaagcaattttattgtcaaatgtggttaccaaagccgagtctaggcactttgagaagattcccaatctaatcttcgctcggttctcgactctctcgttctgtctcagtttcctggccagaacggcggtatgtaagcgtgtggcacagcagccttaaccctgtcatgcattcgagctgcagacatcctgttgttgtctgcagaaagttctatctggctaagcgacttaggcatctctttttatccccagccgattcgatcctggtggtgaagtggctatgcagaaagatacgacattatctcgtgtcagctttctcttggtttggcagagtacgccggaagaagaactggccgctacttttactccgtatatagtttacagcctacaacacaaacttgtctcagaaaacattggctgtttgcaccattttagcccgcgacgctccaaacatggatgtggcttggcccagacttacaagaactatgtacaagcacaggctacctacgctaaatatcaccgaagtaaacccggctcacacgcttgcacttgaagtccagctctgcgttttcctaacctggactaggcataacttttgtacaggctccgtagtaagaactgaagccgcacagcctcatctgatacagagtagaacggcagagttacccgaggaaattggctctgaaaaaaaaaaaaaaatctaacacaagaatccatactctcgttgaatatgagcgcaaatgacgtttgctgaatctataacttcctcaagggaataagaaggtagatattatcacgattctgataacgcccttttaccatagttgatgtcgagggtgacagccgtccagggcgttacaggagagagtcgacggggtcgtggatctgctgggctacatggaagcagcctttcaagtgaagaaatagcttcaggccttgttcgcagggtgtattccgcctaagcccatcagtttatcagatttcatagtgataaacattagtaaaaactgaagaaaaagagataatggaaaaaagaatgctcacaagcggacttgaaccgctgacctcgtgattactagtcacgcgctctaccaactgagctatgcgagctaatcgatagaaagcagtttcaactaaacgtatatttgtctgtctgcttgattctaacccgacttctgttctcttgtgatttgtataggacctactaagtaatactggcaacttcctaattcggatatcagaaccgcaagttccggtcaactgaagcttatgcatagatttccgccatttccttacaagagttatttatctctggtttgttatatcaggctaggttgcttatttttcttctatatttaaaccactatatacagttagattgagacaagcagatcatcattcgttcataatacgatcgattggtgccggtagccatgtctagggtgtgctccatatctcccctcgtaagctctttaccatcatttgaatcatgtcatgatgcgttgtggcagtatgtgaacaatggtacggtcacatactacatcccatcatatgagttgaaagtcgcttaaaactgctagcgcgaagcatgtggttcatatggcgccggagatgggtgcttgcgagaggtttcctgagcttcgttctctaatcaaacagcctatggatcctagttggttttcttgccgaaactctatagcaccaccaagattctaggcatagtttgaatatgttcgtacgatgttgatttcagcaatttcagttgaaggtacagctcaaacccacggctgtctccgctatgactacgatatgcactctagtgttgggatttctgagcagccttggatcgaattggatacaatggttgattctcatgagttgtcagagttgatgctcaaaatgttactacagtctaatcgtggccttggtggtatattcacggggtggtgatcatatgtggccattggataaggaatacaccagctaccgcgggttcatgaccgatcattggcagaacagccacgaagcaaatacgaccacactgcggttataacttaaggcgctgacaatgcccatgcgtggctatgaacatggccgccggttcgcgacctggctgatctcagcctttgggagttcgaaatcaaacttagggcaagcctgtccaccgcatgtgctgatctaggcttatcttattgcgctgtctgccggctgagagcgccaaaacactgtccttcgaaggggccaatagcgatgttcccaggtctcccgtactcgctcggtatagaacaaacaatatcctaatcattcgagcatcactcgatcccgcaactatttggagctcctttacacttgaattcttatcgactcagattatcaatatgtgcccagggtcttacgacaccctagtcctgtatgtgtacacgttccttatgcggcaaaatgaccggctttatccgttgtagccaaaagaaatctaaggggtttgagcagaaattgctgtcggttggagttctcagcgcgcctctaggacagctcagaagcgctagactctcctgagtttatacataaggtctctgcgccatgaatcggaggctcaaagcgtaaaagatatataaatttaaagagtagcagaatatttcatctgaagctcgcatagctcagttggtagagcgcgtgactagtaatcacgaggtcagcggttcaagtccgcttgtgagcatttttttttgtttctgtatcgcattatcacgatagtgaataatctcatgtttgaggaattctgtggtgccattgcctttagagtgctttaaggtttgaaactgtgttatgatctggcatgagcctgctccttcaatcatcgccgctgatggccgagctcaggtttcataccgcggttaagctaggccaaccaggcggagcacatactgcgatacaacactgctttctgcaaagcctactagcttaactctcagcaggcgtgggaacaccctcggcctcataagtaacccccccttaccagcgaccagtgtctttcccacctccgtctcctaatgagacggccgccccctcccaaccagaacatcgaccttatttagccacccccttcttcggcatgctccaccttcacaccataccccctaatcccacccaccacacagccccctagctgtcaccacccccactatctccctaacccccctccctgatctccgacccacttcagctacttcactccacttcaacttactacctaccacccacctacttacactcaccaacctccctttctgccccgtcctcccactccacttcctcccactcttacccatcttccatcatcttccagcctctccagtctccattccctctctccctcctactcattcttacatcaattcctccaacttcctcaccctcctactccccctccctctccagacttcttcccctcctatattcaccaattcttataccccacatccctactctctctcattatccctcaaaccaccaacaattttccacttctcaaaccgtacccctctccaacttacatccacctacatccccctccacacaccctctctaaatatccacttctctaatcttcca

SEQ ID NO: 5458 - DNA, 6848 bp, Emericella nidulans
tccatggataagcaggccagattgtccaaaaaggctccaaaaggaccgttccggagttgctctcccagtggcgccttcgactctgctttcaacgatggaccgactcgagaatctacggatcctacatgatgctccccctcctaaccagcccgccgcccagtagttgtactctgtagtgcaggtgcccactctcccgccctccctttcgctccccaactctattctccccccgacattcgaacagattacagaacacgctctttccggcttccctgtcattattcttgaggcactgcgctaaactttggctgtggcccggcatccacctctcttgctctccccccccctgctctctctccctcttccactcgcgctctcccttgttcttctcccagtcgtcatttttaattctatcttcctaagatttccattcatctgcatctccctcctttgatctcaaacactggtctattatctgatcgcctcggctggcgatcgctatcactatctggcttgtaccgtgtcttactcgcatcctcggtccgtcgcattagttggtcctcgatttctgcttcattattgtctgggccccgtccgtcctatcgcatcagcaacccctggaaatcctaattgtaagacatcccacgagttcgagtaactcctcgagtctttcatcctcgatcatcgaattttatcgctatcgcctctcaatttccacgtctgcgccgcttaccaatctcgtccggaaccaactcgcaaccccctcgcaactcgactcgtgccgcccctctcgcctgcgtggagccttatcaagcgtggactcctggactcgcatttctcgaggcatgactggcaattcaatccagtccacccgcacaagcccacggtcttatagtaccactcaacgcacaccctccgcttcgtcgggcgcgtcgcctactcatcagtcgttttcttccttgcaagcgccttcgacggctcagaatgagatgtcggccgacgtgtaccacccatctgcgtcgcaggcaccgacttctattggcccggatttcgcctcctattccttcagcccatcctccagctttgacaccatgccctcgaatccctcctcctttgacgccatctcgtccgcagccatgcgcctaggtgactcggatcgaccggcgcagaatttcaacggcttcatccgaccggcagacgcggcgggtggtggcgcgattttgatgcgaaaactccccaagaatatgagtcgcgaggccttgcgcagcatgtttttattttccaatgagctcttggatgctgatttcgtccactcggatctcccggaagatgccggttttctcagtgcgatcgcgcggttcagcagcatggctgcggcggaagaggcgcggaaactgctcgatggcaagccaaactccaagaacgacgccaccatggtagtcgacatctacaacagcggcccggcacagcctttccttcctcgccgcaatacgatcgaccattctgccgcgagtcgtggcctactgaacaacgggccatctacgcgacagtcgcgtttcaatggtacatttcaaactatggagaaattatcctcgacacaccctgccggttcatccgccaacgagtctctcccgccctcctccgagtcgaactcgcgtttacatggtttcttttctcctcagtcgccgctcggaaatggtgtttccgagtttcaacgcgtaagcgggaagtcgatgatcgaccaagatatcgatgaggatacaggagagctactcaaggaccctgtcggttacgccgaaaatggccattccgcctctgtctcagctccgcgccgatctaccaacccacaaattccaaccagccattttgccaacctctcgttgacaaccaacatctcaccgccgtcgatgcaaaattacacttccgggggttcggcgcacatggcgattccaacgccatcatcagcatacaccccacccatgaatggcgccgtgggcaacccagggtttccctataactcccagcatacggctcggcacagttttccagctgccaacccgaatgatatgaaccctccttgcaatactctctatgtgggtaatctcccaccagatactcaggaagaggagttgaaggcgttgttctcaaaacagcgcggctataagcgcctttgcttccgaaacaagcagaacggccccatgtgcttcgtggagtttgaggatgtgcgcacagcaggcaaaactcttaacgagctatacggctacaaactctccaacagtatcaaaaccggcattcgtttaagtttctcgaagaacccgcttggagtgcgttcaggacagcagggctccattagttcgtcgaacaatctcccccagcaaggtgctattcagggcggcgctggccttgggggaatatcgaaccacatgttctccacggtcagcggaccgccgccgggtctggcgacaccacctggcctgatgccgccaatggggcttagaaacaacggcattatgcaccccaccggttattcccacacacatatgcccatgaacggaatgaacgggatgaacggctcattcaatcccaacgctggcctgggtattcgaccaaatcccttgaacccgccgatgatgccaccgcagcctatccacaacggcggagcaaacggcggcaatatagggcagcgctctggcaatgccaccccgaactacgactacatgatggggcggtagaacgagacgacattctgtacggaaaccacgtccgacatggtttatgatactggtatatccggcgcattaggaacttttacttgtttttttaccggctagacagcattggaggatctcctgcctcccaggagtaaggttttcggaactctggacttcttcggctcgcttatggttacttggcttggaaatcgtgccatctcgtttcacttctcctccacttcttcgcttctcttctcacttcattttattctcgctacgctctgatagcatgggattgtgggcgccggattcagctttcttgttttgggattgttgcatcttcataggtagtctgttgctgtgtttgatgtcacttgatacctctgaggccgcaaacgatttcatgtgggttcattacgttgtttggttgtttagcactgtgccatacccttcacttgtcatcatgtttccaacattcctaagattcttttggcgggccttcttataagactttcactattcctcgtttaatgacattgattcccctgcattatcgtttatttggcgtctccctctcacactagcggtattcttatgctatattccctactaggagctactgtcgaacggctcattgtatgcttacctcctctccattttctcacttgttgctcgttacttgttttttttcatgattccttgacagaataacgataaaaacgtcaaagatgcgaacgaaatgaggaagaggggtcgctggcacagcatggtcagttttccatttcaatacactgcactgtttgtaaagggcgatagctttcatcgaagagcggcgtttttcgaggtatacacagattgatgggtgatcttgaagaaggggcgccggagatggtcattttatgttcgtcggcatttggagtggaggatatttgatgtttctttttgttcgattgatatgccttgattgacatgtgcgagttgcatctgagtcacgataaagctggtgatatagtttgctaaatcatgaatacatgcaaggattgtatgcgaccaaaagtagacgatatagtcacgtgagagctcagaactcgaaaagtttcttttcggcccggcaagcaaaacgtcctcttcaacctccatatttcacccatccagcgtttccatatacccagggcattggccctcaacaatacgtgctattctatactccatcaattagtcgctaattgactttatacctcaccacaatgcctccccggatacaatcgcagcgtgtctccaactctctccttccctacctcacctcttcacccgcgtcctcttcaagaatttcactctcatcaccatcatgttcatctcagttatcttcttccctaaattccgtccgcccgttctcttctacacagacaacgcagacgcaattgcgaacggaaatgttcgcatggctcaacggtgaaggtgctgcctacaaaaatcatactccagggcaaaccaactacatcactgatgtaaagacgcgcaagacggatccagacgctaggcccacaaatcggccatttcccttgaaccaggccttcgtcagtgagagcatcctgagtgaggagttgcgaaacgagatctacgagcaggttgtggtaaagaagaagagcgttcgggctgtcagttacgatatgggagtggatatgcggagagtcgccgctgtgtgtcggttagttgcaatggaaaagagaatgcggcaacaggtacgttgactaattttcattcttgttcctttccaaccctgcaatgatgagacaacaaaatattatcgattagtctttacgatctcagtatatctggggatgtgtacaatgcctatatcctgattgcacatgcatgcttacgcttgattgacgttgatttggttgttttccgtatcctaatcatttttctgaacaggggaaaccactggctctgccgtatgctcgcacgatccatgagatggttccaacgactcccttgtataatgatccacgtcggcaacgtgagaaccctcatgagtcgattaacgacctcccggcccatcgcctcactgatgctcaaatcttctaccctgtctcggagtcgcgccacttcactcgtattgatgctggtcgcgtattctctgccgctccagcccgtaaacacgaagtagttgagcaggagcttgcggacccctcaaaggccatgcaccgcatcacacgaaatccatctctgattgaaactgtcggcaagggcgacaaggaggaacccgtcctgcagccggccgacgttcgaatcccgcatccctctctcatctcttttgagcgcgaccgcctagccaacccgaacgagatctccaccgtactaaaggtccacagtgcgcgtctcaaggaggaggagactgctgaggaggagcgcaagcgtcgcgccgaggagcgtcgcgagagccggacgcagcatgtcaaacctgagtcatcccgcttcgagttccgcatcaaggacgttgtcgttagcaaagagactactggtattgatggtcgtggcgctaaggctcctggtcggagatacggtgtgcctagcgatgaccggaagaagggccaggttaagattcccactcgagtggaggtttaacatggcaaaccctatgccgtatgtgatgagtgtactattatgcttgtatcttaacttctatacttgtacaaatattgctaggattaaatgcatcctaattgaccagcccttcgctacatagcaaagccgaccggctacaagctcgctgagcttgatgagcatcgagttatcgtgatagtgatttatcgaactgccgtcatgatgaaacagcgactgaactgtagttcatcttaggacattatactactcgctcttgacggtgctgaccttacttttgggacaactgcgtacgttggtagaatgccaatcaacgaggtaggtatatgcgttaggccctgatacgaaacaactcgacaatgagcgtggcggcccttgcagcagatcgtcagcgttacaaacaggaaccaacacccgttcagaccagcaaacatcttgattaggcagcgccgcgaggccgaaacaactggtcggcgacagagtacattatgcgcaaaaagccgaggtgatcgactttagcgactcgctcagaatcaacatcatcgaggtgcattaacgaggtgctggaacgacgtggtcaggtaagagtggctgatgaagagttaagcgccggcttgtgtgtctgaagcgtctcatgaagcgcaggagacgctgatttcggccctcaatttcatctgcaggtttgcttcgccttcgcccttagacatggtcacgcaggataatgttggaacacgggctcaacacgtaatggtacgagttcactgcagatttgacaaggtctgagttgaggtgcggattggcgtctgtatggtgcattctgtaagtacatatgcatagggtcttcgtcttgggttttcgtcacgccgtttgatgaccagaccgaggatcgttgccgttgtcgtcttcttttgggtgtaagccacacgtcagcctcagtctggagtcgatatcagtagtggcgatggattgatggcctgggcccccaagagagattgcgcgtagagtcgggcggagactaaattaaagaggattacggcccacagaccagcccagcgctgcgccaggaactctgaacgagaacagaggtacgcccaggaacaacccgtgggcaaggaaatgaaatgaaacacctataggcaattaggtagtattcttttgttaattttatggcctaaataattctggtcgacttcttttcttctgtttctcttctctagaatccacttcaattactacactacctacagaggactaactggcagcttacttttcccgccggtagttcgcttcttgtacaacgacggtctagatttcttggtgcttcgattttcttacctcacttacagaactctccattattttctttctctattgatgccccatcggactgattctattcagcgtcgacttaacgttggttaaacccctatatttcgctctcttccattgttactcatcgtttcatccattttcatcatagttctgccctgaggctgctttttttttggt

SEQ ID NO: 5459 - DNA, 4724 bp, Emericella nidulans
tctatcaggttgaggatgaattagccaagcagctatcacagatgaagttgatggtgcagggactcaaggttcgtacagctcaaaggaaactaaatatggcgtggtctaacttactgatctgtgttttggcagaacttgaagcttctactgatcaggttcatgccctggtccaagctatgctccacgaggatctgctttacgaactcgcggtggctcttcacaaccttcccttcgaagcaagaaaagatacgcaaaccatattctctcacatactccgctttaagcctcctcacggaaactcgccagaccctcccgtcatctcttacatcgttcacaatcgtcctgaaattatcattgagctatgtaggggctacgagcacagccaaagtgccatgcatgcggcactatcttgagggaggcattgaagttcgacgtaatcgccgctatcattctttatgatcagtcaaaagagggggagccagctatcagactgaccgaggtccagcccaacgttcctcagcgcggaacaggtgttttctggaggttcttccattggattgaccgaggtacctttgagctcagcgcagatgcattcacaacttttagggcaagtgcacaaagaaatcatttctaagaaactatcctaacacgaaactgtttcctcaggaaatcttgacgcgccacaaatcccttgttacaggatatctagcgacaaacttcgattactttttcgcgcagtttaacactttcctcgttcagtctgagtcatatgtcactaagcgacagagcatcaaactcttaggcgagattttactcgatcgcgcaaactacagtgtgatgatgcgatacgtcgagagcggagaaaacctcaagctttgcatgaagctcctgcgtgatgatcgcaagatggttcaatatgagggatttcatgttttcaaggtatgtgaaggacgcaacctctatgaccgcgtaggatgcgtcgtgctgacaaagaatgtggttaggtatttgtcgccaatccggacaagtcagtggcagtccagcgaattctgatcaacaaccgggatcgcttgctaagattcctaccgaaattcctggaggaccgcacagacgacgaccagttcacggacgagaagagtttcctagtccgacagattgaacttttacccaaggaacccattgaaccatcacgttctgcgcgtgaaccgtctcgttcgactgccaacaccacgactgttgcgtagacatgagcggggctacttacagctggccgcagtatctacatgacacatcatcggcgttgttgttgttgttgttgttgttgcatggtcatctgggatcgccctttcgtcgcctgtgtctcgtgtccagaccccgcgcgtccttggctgtagtctctgtacgtatggttttgcatttacggccagctggtatctggctttttggagttactttttgggatttggaaagaactacacagcttgttgcctggagcgatgccttggacaacaaacaggaaaatcgacggaaaggatgcaataatggacgggaagtttagagtccttgcattggaggcgggcataggcagccctggaatacagaaccctgtagagttaaggagtgtaaacacccgacacagtatataccaggcccctttgtctcagggcacgagccaggggcctatagagcgataaaaccatgcgactattgataataatgataaccagcagcgcatagcccagtacgaggccttgacgtcaaggtcagtttctgcagaacaatcgcattatcgaatccatggaatgcactgggcctggtgggatccagcagcatcatcgccgttagagaaatcggctcaattttcaccgttgtactctactttattatcctcgttgagatcatcttccgggatctcaaaagtgttgttagtgtgcgcccagaaccgactgcccttgtcaagcccagcctaagtcgctatatgaatcccccaaggggatcgcttcgtaacccccttcgcgatcccttcttcaagcctcaaccgttgaatccttacacaacccatcactatagctctcattagctcttgtctgtcctttccatcaatttctttaaattacgattgtcatctttctttaacagccgcctacatcgttgaagcttgcccgcctgccaagtgtcaaaagccgcggtccaacaactggcagtctcgacccgattcagtctcaaaactccccccatttttgggcaccgaacccctggggatggtcatgttcaactgcttggtggaaactaactcacaattgtcgttcgctttgcccctttgtggcccatcctatatatcttaggctgcgattgactggcgcgacgttcgtgcgacgattcgatcctttgtctcgccaaccccccgccctcgctccattgagacgcattctgcgaaacgaacagaaagagggagtacgggctttgttatatttctatagaggttttgcagagataattcacccgacaattggagccacaaagagagccaggtgcaagtcatgccaggataatgggagacttgcgatcgccctcgtcgcccgtcgaaatgtcggaacgatccccttctcccgaagaaacgaccgcgagtacgacggacccttctatcgcccaatccgcctcgctacaacctccagttgatcaagctctgtcatctgaaagcagatcgatagcgacaacgacaacgacaacgacatcgtccagcggccttgatcagtcggcgcctggtaccccgacgcaccaaggtccgagaatagaccgaggattatcgccgcatccagcttttgcgaagctcaaagggatatcatcactgcaagaagccgaacggtcaactgtgagcctgcggtctttgcgcagtattcccagtatagtcgtcaatgacggatcacgtcccagttctcggccaggctcaaggcccggatcaaggcccggctcgcggtggtcagaaaagaaatggggcaccttcagaagtaggaggtcgatggatcaccagagagacgaatcgccgccacctgtaccacagatagcgccccaattcagtggtatctcgttggacattccggatgcgtcatttgatgaccttggtgtctcggacatgaggttctctaagcgtgggagtctcatccgtacggagggaaaaccacaatcaaagcgcaagctcaaggagcaagacacggacccagatgctacgggaactgcggcaaagggaagtgaagcgacgaaaaccgtcgcaactggaacagaaacagagactctgggggcgaatgggatgtctcaggagccggtacaagacggctctgccgcggatagctttggaaccgcccgtgtccgtccgcggcctccgtcattgcttcgtgttagtcggaatagtatagccagcagggccatatctgcggatgaggatatgctatctcgaagggttaggttgatgtatgcgaaaggagacgagaatgttacagactcggaagtggcaagatcgtatgccatggaaaacggtactttgtgggaggagccaacccctacgaagtcagagacctttgaaaatagtgcctctgaagccgggtcaaaacgcgctgaaacttcgactgacactgacgctaacccttctggtcccaaacgtgagcctaacgagcttgccgggggtatcgagtactggcagaatataaaggcgggagatgtcgatagatatggcttcattcggtcctcaaactctgctgaaggtgcagagttcagtcccattcaacgagtttccaccagtttgctgctagcatcggagacaccaaggcggagacgaaccatacgacctccaactgccctagcaagcaatcgctcgtttacaggccggtccccttcgcggcagaactctgaggcttccatgcgtcctgcttcctcgcagagcacgtttagttcccccttgcgcagatctacctcgcggttccgacaagcgacaaaccacttaccccacaatcgcagtcgccgcttcaaggatgaggctggcgatatgctcactcttccttctgactctacggcgtttgacgattagttggacagcgcaactgcgcgtgccgcaaggaaataggagtgggaacgggaagacaagtggacaaaaatggcgaatccgacaaggaaaggcaaccttggtggcgggatgatatttgactttgattccaatgagctcaaagttgattgaacggacatggaatggaatcccagatcggtggctatcattagcatggatttctttattagaaaccactgctaaaatcacagttattgccccacggaagaagagctcattgttttttttatgtgtcccaggactattcgtctcttgccactttccaatgttatgatttcgccagaatatctttacctcttattgtccgataatattaccgggtgcaaacccttcctattctgtgttttttctaataccttttcatacgataccgagtctctaatgttttgagcacttggtgtactctttttttcttctcaatactctttgatttctattcctctatgttcctcgtgattattattttcttttttttcacttctttcttttacctccacaatctctgttcttattttctttatatattctcttactttcttctcttttcttttacttactctttttatatttctaattttcttttcatattgctttactatttatatcc

SEQ ID NO: 5460 - DNA, 3425 bp, Emericella nidulans
taccaccactgggtccatgtcctctgcgaacgatggtactaaggtcatctcggatcctcgattgtcgtctgtgctcgcacatcgtcggtctcaatcccctgctgggagggtctccgccgctgtgacgtacagctcaacgaggacgctcctccactctgaaccgaattgctgaaccatccctgccgttcctttatctagtcgtgatcagtctcgcaaaaatgagtgtccgagagaaattacggaagttgctggggaggaaccgatgtaaaccgtccgattcggggatcaagatcgtgtattacagacgaggcgagattcccccatcaaagttcaagggcccgttcgataaggatcaccagaaacgactggctgcgtggtcattcgagaaagcccaacaaggccgcccacgttctcccgatctctgcctctcaccttgcaccaccctgccggactatcctccctctcgggaggttaccgacggggctctaggccaggcccggcccaggatacctggggtgggcttttctaatgaaggtttgtgccgattcggtcgactcctcttgtggcctgatcatgtacctcaaggcttctgttgagtccaatgtgctaaccaatcaccagcgaccccggcggcttaccatgacgaattcatccaagatcgacaggctactgcatccttgtcttccaccaccgccgttgatccagaaagcttcagcgactcaacaatgaccctcttcctcgacccccttgacgacgactcggggactaaggccaaagcgccaatccgcagcaactcggcagttgtaccatcgggcgccacgtcgactctcccggggaagggaacacccacaccattcgcccctaacgatctatcacaagcgttgaacgctgtacagatctgttcatagatttaccttgccattttgaccccccttctgagaagacctttatgcccgtcacggccaccatttcgacctagtccaacgatatattcttcccctcttaaaagggctaacctttagtcggtggcaaggaacccgacagtggttatcggtgcctggtatcgtgctcaacgtccaatgcttcgaggaaataaccgacatccaagcagcgcttgtggttactttctatcttccgtgcttccttcgtccgttcttgcagcgaatttgcattcagcgttgaaactgagatttatgaacgcttacgaatagacttagctgagccagctagatcagggcatcgctgggggccgaggtttcctgtactgtggctgactggttagacgataataaaatcaaaccaactggaaacatcagtgcgacaatacgttaagccaatcaagagaaagtgttccatgcagttctaaaagctgggcaagtgtttgatgttcccactaggattccttgcaagagttttagcagtgtgagatttgggatctgtttcagtaggcgtcactaagcacaggctgccatgaaacgcatatcctggatccttcaccaattgtaaccagacactattgtcgaagagatttcgaaactctctaacatctcatttgaaaatttggattttcagtttaaagtatccgtgcccgatgcgtcgaaccgacttcgcacgggctcggattctcggaataggcccaggcctattgtctttagtcagggaagactccagcctcacattctccaccaacaccaacactagcaacaccaagatgtcacgctggtttcattaaattgttactgccttggagcaggcaaggaaacgattgacggatattccggtccttcagatttaggttgccaacgcttactcggtcctgggaatattggcttcacactgcagacgccatcgcgaacattgcagaagaaacactccaagtcgctacaccagtttggcgagtaatactatgcagcaaatcatatcgccaccgtggctatagtgtgttaatgagacgcgatgcttcgagctatcagggttgtggataatgaacgcggagacgccaatactgcgtgaagtactgtaagcttcgggcttcagcttcgtgaagggagctagctgtttgcatgtgataaggcatacaatagctgtccctgactacaaaagagtctaggtgatgcgtccttttgtcgacttactccatactctgaatagggtgatcagactcaacatctatctcatccgccttgagccggttagggacgttctggcctaggtaaggctgcgttgatcctttaagatcttcgtgcatatcttatggcccagaccccgattagcaccaccagttccaggaagctggtcttcatgcctgcattgcatgaatcacatactacaggtactttttctttgcgggtcccaatattgagctgacccaaccgtaaggcaccgagatcgcgcatcgacagttttgccggagaggatatcctaggcggatgaagatcatttcctagagctcctagttgcggtatttaagaagaagcaatatcgtgctcgcatgctgcagcgcgtcttttggtagcgagggaagtgccctggaatccacttccatactcttcgcatattgcgggcctatctatatctgcaggcttgaagctttggaccatatccgtggcttcaccaataatgaatcttgaaggggatggtttgagccatctgttcaatggtgcctctttgctttttcttggatcgtcttctgagcttcgtcttatccaccaacctttagggcattgtactcggtactttggtcttttggacggtttccttgtttccagtaactttattacgtcctaatcttcagttttccttttttcacactacatttgttgggtggctcgtgccatgctcttggtcaagcccgtggtctcgactctatccaagcttcacgagttggcaatactttgcagagtccggatgaggcagggcaacctatgatgcacaatatagagtcgtgccaccgaagttgggggttagtggttaccagtttattgccagagtatctgcaactcaagaccccctcaaagatatcatgcagtaaccttgagagagtagataccgagtcttcgtcatgtaccgtcgatcgtgcagcccccacgatcttcgtgcatcggatcggcaacatggactatggttcttttagcctgagcacctggatagggtgctatggcgctaaggaacttcatagcaaaaggaccgtgccaaatatgcccaagtcaattgatcctcgttcttcagactagtgagcgctttggtcatcggatatactgcaatccgttgctcttctcaccttccgatctccggcttttgctcccaaggaacaaatgaggtactcccgaaccttgttggtgcgctagttctccagatcgaggcccgggaactgcagcttagcaatagtattacctgtaccatgtcctttacgatagacagagaga

SEQ ID NO: 5461 - DNA, 1630 bp, Emericella nidulans
cgcatccgctcctcaagtcctattcacccccttctgcgactccagcccagcctgtgcaaccagccaagcaacgttgcgcttgacctccccagacgtcttgcttggacagggatgctgcagcaggtccttcccgtgctaaacagcggcgaaagcactagtactaccgtcggcgtcacgatcctctgccgaggtgagtacgaattcggcgccacagttgaggaactacgactgctacgtctcccatctgaaactgaggggaacaaaatcacctcggatgatgcgtctacacccataccgtacgaggaagggtttatcacggacacctttggcgcggacatggcgaagaaacgacggatctggcatgccagagatacgtgtgttatgactgctcatgattaacggccaaaatatagacggcaagctcatttataccattccccacccccttcaatctcgagggccgtgaagttgagtcgggagcccagcggacacgtaccgtctaacacctggtcattgtatgtgtatttatgtcagctttctggtcctgcgagtgcagcgggtgtttggaaaggagatgggtttggtttgttcctggtcggctgctctgtgttctccaggtcatgcatctaattaattgtctaagctatataaatagatttacttgagtgataccagtcgctgtacatatctcagacaggtcgcatatgtcaatataacgaatgttattgacctctgaacccatcaatttgtccgcgtatattctcctgcacattctgagatggcttttgctggagagcagatattagccaggaggggttgccttttgcccatgtgaaggtactatcggcctcaaggttgacgagcatcgatcgctggcagccagctcagaaagtgtgcttcggaggattgggaagcctcgagagtaaatcgcggactctaaccaagacagaatggcctcagaccctagttcagtccggtttttgagaaagccgacatactgctgtaatcgaaataccagcgactttccatagatcatgttcttccctcctcttcctgctcctgcacgttcggcgtaggcttatccttcccctgtccagcggagccaaccggctgatccatagacgggaaactaagatacttccaatcctcaatctcctcgatgatgcacttgagtcggtcccgaatgctctcaactgcataggttcccagaataagtctcaggggtggataagaacaatgacctagttgccaaaccaaatgcgccgctttgaccgcgctggcgggctgtttatcacccagccacatgagcatccgctttgcgtgggctgcgggcgctgtgggcgtgttatatggttcactaggcggctttacgaggaaatggccatatagcggtaatggagaagagaggttatgcacgctgtccgtactggggaacggttcagcagagacaagatcccccacgtcatcgcggcgcatatggcccggttccacgagcgtagtcttgatgttgaagctgtcaacttcgtaaagcatactctccatgagtccctcaacagcatactttgaagcacagtacgggcccagtcccggcacgccgagcgcgccagaggttgagctgaaaataagatcg

SEQ ID NO: 5462 - DNA, 5691 bp, Emericella nidulans
ccagtttgaggtctatcccgttcgcaagttttcttgacgaccaaaattcccccgcgcgccaacggttacgaggccgcaaagaaaagtatcgaggatagtctcaagcaggccaacaccgaatactttgatctgtacgtctcgtcgactaaaccatacagcccgtgaccggaaccggaggggggggagagtgagagaaaaactgacaattgacagaattctgattcacgctccctacggaggaaaagaaggtcgtctcggtacctggaaggcgcttgtggaggcacaaaaagccggcaaaacacgctcgatcggcgtctcgaatttcggcgttcaccatctcgaggagctgcagatgtacatctcatcgggtggtggcggacagattgatgtcggacagtacgagcttcacccgtggcttgcaagaccggatattgtggactggctgcgaaacgatggagccgtcgttcaggcttactgtcctatagtgaggaatcagaggggtgatgagccggtactgaaagagttggggaagaaatatggaaagagcgcggcgcaggtgttgattcggtggagtctgcaaaaggtatgtcttcccaatatgggatctgggtctcggtgctgataatgctagggattcgttccgctgccgaagtcagtgaccccgtcgcggatcaaggagaatgcagaggtctttgactttgagcttactgaggaggatatggcgaagctcgagacgggcaagtatgagccttgtgcatgggatcctacggtggagaaggactagatatcttcgtaatagctcgcataggcttctcaaacccgcagaaccacacttctatcagaattattgcagcaacaaacatttggctagctatgatcaaagcctatcatatgtatggcatggggtagatttgggctcatcagcacaatagcccgtgcttgagccaacacggcgctcattcaagtttaaccttgatagggtgcagatatggatttacgggccatcctgattcgatcaacagtcaaagctaagcattggggctcaatatggcccaacatgtgaaaatcgtttgcacgtttattcgaagctggcggtgatgtatgatgtcaccccatcatcatgaattcactccaccaccttataatgaacatcaatggcatgcactcttcaccgtcaacagctaactgtcgaaatgccgctccatctcaatctgaacatccaaacagacctagcatacaagctcgcatcccacatcaccgagacggcctcaatggcaatcctaacactagccggctatctgagctccttcgtcctctccttcaccaccatccgtcttatcttggtcttcattctcctcccgctctacctgtacaagttccttctttcgttactcccagctaccatcaagaactctatccacctcctcgttgggccatccggctggtcccggctgataaagcacaccgaaacataccgcaacaagtcagatacactcgcgcaagcacagctcgatggatcatacagattcaagccagaagaggttttcagcatcgccagaaacagccgcggatggatggaaacggcgccgtgggccaacgagacggaggagtttgaggtctgcggtgcgaaagtgaggtatattcacctccacgcaagttatagctcggtcctgcaggacggaaagagagaacatcgcccgatcgtgttcttacatgggaatccgagctggagctacgcatggcgaaatgtacgtcttattctctttttcattttcttgatggttagatgttaattaggcctgacaggtcttcccctccctgctcaaccgcggccacgacgtctacacaatcgactggctgggccacggtcgaagtgacaagatcctccagcaagaggtcataacaccggagctgcatatccacacgctggtcaagttttttgaggtcacaggcttgcggaatgctattgttgcagcgcacgattggggcgggtacgcaaatctcctccttcgtcaacttcatcattcagcacttagaagctaaaagccggcagctgcattgctctttgtactattccgcgtctccccgcagagactgttgacaaactcttcctgctcaacactttcttcccgctccgtctgagcgactcgagcctacactaccgcctgctgaacaggatctggtactgcactaccggcctgctaggcgggtatctgcccgagtcgatgatccaccgcatcctcgagccatcgctgtccaaggcagacatgcatgccttcgctgcaccctacgccgacgttccccggtccgcaaaatcatccatcacccgcttcagtcactcagtcccttccctccctcgcttcgtcctattccagctccgccaaaccagagcctggaaattgatcgaaggcctcaccggacccgccaactgggacagcttaaccacgcaagctcggctgtctgcgcagggtgaccaggtccggagatattgggggctaaagacgccgttgataaaggatgtgagatcgcggtcgtcttcggggacaaagatccgcttattcgagactacaaggccgttcttacgagggcaatccatcccgaccgcatggtcgcttgggcacctaggggcatgtggataatgaacgcgggtcatttaccgatggaaggcaaagcgggcgaggttgccgggttgattgcgaggtgtgcgaggaaagagtcgtgataaagtaggatagaatctgggtgtcatagctatatagtcactctatatggtatgcgatatgccctggctgccattcgtacttgtggtttattcatctgattgggatactcaagtggctttagcaagagagtattgggtctctttgtcttggcgtagttagacagagctatccagaagcaaaaaagcgagaagaacaaaatatagtaaatgtaaataaaattgtgattaagaaaaaataagaaaaaaaaggaaaataggaaactcataagaaaattccccgcatcttagcgcagctacaagatactatcccacgagctcatgttcaagttgatccatctccctaccttaggtgaagttcgagtaatttatctctgacaagatataacacttgcttggatccgttctaaggtacgcagtagcatatgcagtggcatacgtattttgctacgttttgttactcggcctattactagggctggcagtgggcctcggccgcgtggaaagtgcagggctagaccttctagaagccaatggagccaagctaacatacctcttgagaaaaatgtaccttagcacggacatctgcaggactggaatgaaaggatgctttatggaagctggtctggtttagaagtcaagatcgtgtatattcctatagggtcataagagcacctgcaacattggattgtagaaggttgtagcaggtattgaacacagtaggtaccagaggtcgttcttttctccttgtgcgtctactcggaagtattccgcgatgtggcttcttgtagccggctacgtaaggtaaatgatatcgtgtaggtggaggtggttctacgtagctcggaatggatccggacaagataagcttgaggtttgagagcagcgccttgattctagcagaactagagatgctcaactagccagagtctcgatctataaaggtagggtatctttttactaatctctatacttgattgaaataccttctgttgttgttcattttgttgtaccctgatccccagtcttctatcagagcaaggtaaacgcaacgagacatctaattcaagctgcttttatggcattgtccgccacgcgtagcgcaactgctcgttcctcatcggcagggctagaggagcgtgcatcggcctcgtacgctattgacggcttcttcagcgagggatgcaccgaagatagaatgacagtgcgcaaggaatggcgacatctgaccggaccacaacaccaagccttcctcgacgctcttcagtgtctgatggagaaacctgcacagtccgggctgactgcaacaacaagccgctttagtgatttgcaggctctacatcggggtatgacgaatacagcgtatgcagatataatccaccacgtggtaggtctatgactcgtctcttcgctcccaccagccagccagcgcaagatgttgatatcacggaactcatatgaatagggtcaattccttccttggcactgctactacatgcacatctacgagacgctcctccgcgacgaatgcggctataccggctccattccctggtagaacgagcagctcgacgccgatagcgggaatatgtggcagtcgcccatgtggggggctgatgcattcgggggtaacgggacaggttcagacataagcgtcacggatggccggtttgccaacatgaccctccatatcggtcctggagacgaggataccgagtactgcttgcgtcgggcttgggacaacgagaacgccattgccaacgctaacagtaccatgctatatatgtgcaattcgtataacacttacttactcgccatggtgggattgcatctcgaatatcccgcacaagggggttcatacctatatcgggggtgtggtgagtcttctgtgccctaggcctgtgttcctgtcacctatcttgaaccaattagtttaacaagtgatctgtctaggttagatgacggacatcaagtcctccccgggcgactcggttttcttcatgcaccacatgtacgtcgaccggatctggtggctatggcagaagcaggaccctatcaaccggctgtacgatatcagcgggccgacgttgaaccataccgcgaatatagagcccgccggtggttggcagaatgcgactctccactatgagctctcttcgtttggaatcatgccgaatgttaccatcgcagaggttatgagtactcagggcgggtatttgtgttatgggtatgactgatgggaagggacgtgaaggaagtcaagagaagctaaagggctataatactctaagtcatccagagtatggcagactcaatgggttggtaggttatgtgagttttccttttcttgccatgctagctctatgcgctagtggaggaatgtgaatatacaatcactacatgaacccagattcacattccgtgactgactctctaatgcagtgtgttataatgcctagccatcaaccgtaatacttctgcggactcctgcaacgatttccttgtcagggtacccacgatacccgtacaaaacctgtggtccttggctatccgagcgcgcgcccattctatcattcaacccgtcagcccaagctccagcaggtagatatagctgaatggagacactcaccttcagcagtaataccctctaatgccttcacatagctcttatccaaagagattcccaacctctgtaccaacgggctctagcggcctcatcagaacctcgcctcaggccttgcaacttagatcaaactgaagcgatcttgatcgacttggtcaactggcgcggtgacggcgcgatgggtggtactcttcaagaacccgccagggtattccagtcatccgcaatattcacaatgatttgactgggccactccgtacataccgccactccccgtccggctacagaacctgcaacacggcgatcggctgatggaaaagaaattttaatgcattataatctgtgtgca

SEQ ID NO: 5463 - DNA, 3528 bp, Emericella nidulans
ctatagggagacccaagcttaggatcttgaacatggctggcagtcgccgcgacagaccatttcacttcccagtggtgggtttccgtctgcaaggagctactgattaacttgccaaaaaactgatgattcccgtgtatagagccgaaagctgcgacatctgacaggtgtttccgtccgtaatcttgtggtcaaccctcctagccgggctcgagggaaaacaatcgacgacgaggatatcccaaactctttgcagtcgccgtcaaagatacttgcgcaagaggctaatcgaaccctcaactactcgcgatcgttctcgaatctgaagtcctccccagcatccagcaatgagaatggtcgtacccagcagcgacttcctttgcggcaagcccgtcgacagagtacactgccctggagcgatcctaatccacaaatgcgacaggtaaagctagaggatataacgcgtggccggatagcaaacacctggttctcgatacattgcgacggtatccacgagcccgtgtatgtgagcgaagttgtggagaatgcgatgaatccaaactttcgagcatttgacctcaattcttgcgggccatctgtttcgcgcttagactacctcactctgaaattgtgggtaaagactgcgactatggatgattatatgatgctagtggagttacaactacatctgcagtcgcttcaattcttgggacggtcgttggataactttcatcaacctctacctgcgaattccgtcctctttcatttcccggatggggtgtacaccaatctgaccgacattccgcccatgtggacgccgttacctacagtgagttccaaacccagtgatacagctgtaccgacatcatcgtacgacgccctgatgcgacttgcaaatctggacgaatgtatccaggatgctttgattacaagggaaaggcttgaatcacagattagctcaattctggaaaagaatcaagatgctgtgcgaacgacgagcaaagcgtcccgggcgaaggataaactcaacctcactaggaacgcagtttcaagtcagcgcaagcaattgcgcttggctaccaaacgcaaggaagaattgattgctagtatcaatgctagaaaagacgccatggagaatggcactcgcagttgggaaatagtgcgcagccatcttcctgacgcacgaacgaaacttggctccagcatgagattgctcgaccaaaatacagaagaaaccaagggccagatccgacgcatatctgaggatattctcgatatctatccgattgagccgatccgtgataaaccacttgctttcaccattgctggcatagctcttcccaactctaactttgtcgatgtcgatcgagacgcagtggcagcagcgctcgggtatactgcgcacctagtatatttactgtcattctacctttccatccccgtaccatatccaatcacgccgtacctctcaaactcgctgatccacgaccccgtgtctacttctctcccacagaggacataccccctccacccggttaatgtgcagtatcggttcgaatatggagtattcttactgaacaaagatatcgagttcctgctaaataaacagggtctgcgggtgctagatattcgacacacgctgccgaacctgaaatatcttctgtatgtcctcacagcacggtcgtcggagattcctgcaaggaaggctggagggattcgtggcctacttccaggacgtctgactcccagcctctcccgccgtggcagcgaagacagcgctgtgtacggcgagactggcaatcatcgacgaggggtgagtccaatatcgacagtgaatggagacatggcactagccaaggggaagaaaccttttgcccccgttccgagcggatcagcatcagcttcgtttggtgtggcttgacggggcaacggccatgtaactatgccgcttggctaatgtatgatccgcagaggaatatgttatatgtacaattaattgatttagctgcagcgtcttagtttgcgatcgggcttgtttagcctacttgtacagtaataggttggtagctagtgtttctgaacaggccttgtacatatatctagttgcatcccttagtggcattgaattggctaggttcgtaaagaacaccttgggaagaagaatggcttaattaaacgaacaggggttggagtcctttggcattccaattgataacagggtcacgaccactggacctctccgcttcgcatcgcagtctaccgagtccactcaaggcgagggaattcttactcttctctaccccgcattcagcactaggctgcgatttcagaatgggtaacgagtcctcaacactcttttaatcgaggattccgtactcctagatttctccgtgcagctgaaaagtccccgagggcgagggcggctgataataaacaacccttcctgaccccaaacgtccccaccgctttcgacgctttctagcggtcgtcgtcgctttgcatcggcaaaccccagactgctccccatccactccatctgtgcctagcctgggtggattttctagtgatgatggcgacacacgacgggcagcaggacaacggcctttattctcgtgaaacctctgcgcgcaggtcgccgtcccctacaggtccccagcaccgtcgcggctatcaggcctgcgacccgtgtcgcaaacgcaaagtcaagtgtgaccttgggagtgagtccatctcttgcggggaacgcagccattaccgaaacaccgggattcgaatgctgatgctctggtcgtttaggtgtcgataatcctcgtccgccgccatgtgtacgatgtcgacgtgagagtaagcgctgcgagttctccgccacgcggcgcaaacgcaagacttccgatgttgaaggcagtgccgttgacgatgttcttcgtcgcgataagcgtatgatggtcggagatgccgcagcgaaaattgaggcttccccaagcgaaagatcagcctcttatccccaggttgaaccgtccttcgatacgcccaatctatcgcagcaaaagtggcttaataaatccccttccaacggccatctaccggcaccgagcaatggtagccaacattacacggcaaatccgtctacatctacagcccagttctccgatgtcaggaatacaaggcacccggcgtactctgctggggacaggacttccgtctcgaggtttagccttgagggcaaccagcccatgatgaaccgcaccgccgtcgagctactgtcgcccgcgatcagcaacagccatgacgctttacattttctgtcagaagcagcaggatggacagaggacctccgtacgctgcgacgcgccagtcggctcctgtttcggtaccatattgtccatgaccagcggtactcaagaacccggcggtcatttcacgaacataaacggactggcaactgaactttacagagatggctcttttgaaggcttgcccacgacattttccgcggctaactggttttaaggtgaagtgcccctcctcgct

SEQ ID NO: 5464 - DNA, 3915 bp, Emericella nidulans
  unsure (1)..(3915): unsure at all n locations
ggctttcctgccccgattgagcatttctcagttggagcccattcttgctgcgcatcagaaagagtcatcgtaccagctcttacaacctgtcttcttgaattagcagaatatcaatagttaaggatagagcagatgctagatgaatccggatcatggtaatgtatatatcgatctcaggcaatacaagataaggacaaaagggatgtactggcaatacgaacgctgtctcggctcgcgagcctgccccaagcagcgaacggactcgttccggcttattctgcgtgtacccgccggtctggaataatccttcagctgttctaggcttcgatactggaataagaaatgcttcctgctgactcgccgtgtgggattggagttatttatagcactgataaacagtaaggctgagaagggcgcccgctccgccgcctggggtatgaaccctacgtttatgtattctgtacgcaatcttcagtccatcaacctcaatcgccttgaatgcaacacgaaattgagacctccaggggtctttctccagatgtctgactccggaagctaatccagtgttcgtctgacgggaagtcncacgtcgcgctctttcaagcggatcccgcaaggctgaaggatgaccacccggatgcaaaggggctgtgccaccgcatagacgaccaaccaggtcagctcagactcccaacatttaacaaggcgttcttcccatctttgtgacttagcgcccgttccgttcgtttcatctgcaaccgttttgctaccaactgttggccacgagctccccatggctccggccgccaaagactaccgcctccctccactgcccgagtttgtctcgtcctggaatccagttgatctcggcgaccggtcgaatattcgatacgaacatgccccgaatgatgacgaggcggacgatcaccccgtccggcctgtagggctggggatcagccagcccgccggccattcgcggtcgacgagctacgatacaacacagacaacagcaacaacacctgatcctgcttcgtcacggttcgtaaactccgagacaagcctcttgggcgagcgcgagcggtcgcattcgcgagtgcaatcgcaatcgcaatcacatctggtcaagtgtccgactaagaagacgatcgtccaccgtcgtttgtcctgggtgcccgctacgatcctcgtgctcgccttctactcgaccatcttttcgggcatctatctcgtcgttgcatttatcaaacctcggtatggccgcttcattggtgttgatgggaaactggccgcgtcaacggccactttgctaagcactctgttcgcgaagaccatcgagctggcctacgtgacagtatgtgtcgcgttcctggggcaggtactcacgcgacgggccatcaccaaggggtcgcgaggaatctcgatctctgatatgagcatgcgcacttggatcatgcagccggggagtctgatcgttcattgggagtctctgcgctactcaggatggacgatcctgggtgcaatcacgctgacggcaacagtggtggcgatgctgtacaccaccgctgctgaggctctgggtaaattgctacgctccaaccttacctttgaagggcttacactgacagaacagtgaccccgaagctgaaatggggcgcagtcgaggagcgcgtcatcgtcggcaacgtctggacctccttcgccaacgctgactacctcgcagataactgcgagacccccgttgcaatccaagacgatctcgagttcaggaacacaacctgtctgaacatgcagcacgccggccaagcctacaataactaccagtcattcattaaagaatgggcgtccattgcggagggcattcaacccagccctaccgacgccgcgtcccgaccccgtcctaccgggtctgtctacgataatactacagtcgagggcagctgggtcgatagagtgagcatagcggatctggcagagaaatacggccgcatcgtgcacaacgttaccgcagcgatgccccacggcggcattattggcgcggcaaaccaccccgacaacaagattatccagccaaaggatcaatcaggagagggtatgtacgagctggaagcgtccgtcccctcgccggcagtcaatgtcctttgcgcgggcatgaacgccactgagctcgcaccgatcgtgtataatgagtggcccaaccacggcaacttcaacgcagtcagctggacgacaaatgtgcccgacgacgtccccaacattgagcactggcacaaccgtaccgtcgtcgacgatatcttcgagtttgggccagactatcccgaccagtacgcgcctgtcttcggcaagctgcccgaagagtttaataccattgtcaatgtcacctcgccgtacagtaacggggccatcttcctgctgggcgccagccctaatggcacgaaaccagagtacttcctttgcaggctgaaagcaaagcagtccacccgctgctcaacccgctacaaagccacagcgaccgggtcacacctttacaccgtttgtaacgagaaccagccgctgcaatacgacctccgcgttcctgatgccgtcgagtcatgggcaaacgactggatgtatatagcatccgaatggtcgttcacgctctccttgaacgccggcattacagatggcgcggccgcaaacgcccgattgcttatgcagttcgcccctacagcgcgcaccttgaatcccaagctgccaaccttgagtgaggccttggcagtattagcagggaacacgctgctgatggcctcggccaatgcccccttcgtcccattctggaactacacaaatacctacccagaaaccaacatcctcaagacccctgaaaaacaatacatcaatgcgacactgcgcgcaatcgagtatgcttccggcggcactcagaaatggcagggcatcttttacccaatcctgctctttgcattcttcaccagcgctctatgtcttgcatttatgcttctggagatccgaggcaagcagatcacggatttcacagagccacagaatctatttgcccttgcaatgaatagtccgtcgactacgaagctgcagggcgcttgtggatccggcccggctgggaagcagctcggggaacgatggtatgtggctatggaggaagaagacgagcactattatataaggaccaaggcggaggagggcacgcccatgagcggcaagactgtttcaatgacggagatcgatatggatgaaaccaagcccggggatagtccggcaatgagagagtaccgcaaactggcgatgaggaagagctggctttcggggttctattaatatgcaatgacgaatatctgcaattagcgagtgaatagcaaggttgatgtacaatgcataagcatggtatctcccggtgaaatataggctaatcaaccaacaatatctgcaattccaaactcaatctccccctcaaaatagcccccaagacaccggagcttgaccttgggaaaccccaatccatcgccatgcgactgcaatgtctccttcccgtccttttcttctagagtatgcgcatatgcaagtccccatcttcccttgaacgacggcgtgatattcaaccactgattctcccgtccattctcgggatcgtcggtcgcgatcacggcgtcctgaatacccggcggccatcgtgatttcgccagcggtggctgggcgatcgttaacggcgcaagtcgcggtagggggagtctcggcagcgacgagcttttcagcaggactgtgaagaagggcgtctttgagtccaagggtgcaggtgaattctcggggtggtacacccgcaacgaggtgtctgctccgacaggggtgaactcgaagcgtgcgcggtatttggaattcagcaaacgaaatgcatccatggccactgga

SEQ ID NO: 5465 - DNA, 6469 bp, Emericella nidulans
aagactcgaccatcccgcctctcttccgtgccaaactcgccgactacttccgatccggatatgacagaggccaccaggttcccgcggccgatgcgaaatggtcacaggaggcaatggacggaacattcgcgctgacgaacatgtgtccgcaggttggggagggattcaacagagactactgggcacattttgaggagttctgtcgagacttgacgaaacggtaccctagcgtacgaattattactgggccgctgtacctcccgcatcgagacgccgatgggaaatggagggtgaactatgaggttatcggcacgccgcccaatgtcgccgtgccgacgcacttctacaaggtcgtttatgctgaggaggggccggggttgccgagtgggaaggttgcctcgggcggttcgtgttgccgaatgcgcgaatctcgaatgataagagactggccgagtttgaggtgccgctcgagacggtggagagggcgagcgggttggagtttgcaagcaagctagagcatacgcgtagaaagaggctatgccaggaggtccggtgcgatatcgtggtgagggagtttaacaatgcgaagaagaaggcttagacggctactgtacaatctaaatcatacctatctgtgtattatcttggccctatacaaactttgctgtctgatatagacaaacccggaaataaaggcttgatgtcttcaacccagtccagctagcattgaaaggcgacgcccgctttcgtcgcaacattgcctcctcgtcctgcaaaccccgttccctcggacgatagttccaccaaaccaggctgaatcccttccttatccttcttctttttcttctttttctctcccgccgcagccttctcgtcccgtgctgggtcgcgcggcgtaaggtctgtctcgcacacatagcacagcacccggccatgcagttcagccgttttctcctgctcctctttcgttgcatgtggatccggcgcatcatggggcgtcataaacttatctacgcagggcttgcatatgacatggccgcagggtttcgtcactagcagcatggcgaacatcagcacggccattactatgtaaaaatagaagcaaagcgggggaatgacatacgcatcgccttgactgtattcgtcaaggtcttcttgcagctcggacacacccgcacggtagctccatcagcaccagcctcttcagtgaaatgcacatcgaccagcgatttcagcgaatacccgtgtttattcgattccgtcgaaccaggacatattgggctcagcttgacagtcttgttcgcggcaatctcgttgggatccgtacctggcgtcaacgagggaatccagaatgacggaagcgctgatttgcttgattccgactgtgcgccgacatcatcagtccaggtcctagagaatgatgtgaaaaccaaaccttttctctccttatctcctccatcaacctctccctctcccttctcatgacgccctctaccgttttatcgtccaactcaaacacttgctttctcacccctcctccaacatcaacctctcgcttcttgaccctctcccagatttcgtcgtcatcgaccccagcatccccatccgccttcctcttcttatttcccgccctgccccaatcatcaaaccccatgctaaccatctcgaactccctaacctctctccccctcgcctcctcaagttcgcgtccgctttcctcttcaagcctcttcctcgcctcctctcgctccttttccagccttgcaatttcctttcgctgagcaagaagatcgtttatagcgcattcgcggcagaataagtcgccattcgtggcgcatgctacgctaggcgtgcgcgatgggtgtagacatagacggcaggatccaaaggggaggaaggagtctcggcgatgacgccgcgttgagtgcccaggctgtgcggaggagggaacgctcgtaggaggtgaagtgcggaagggatgtgttgcgtttgaatgaaccattgttctctatatttcggtccgtgaccgtgggttatccgttggtaggttcttctttgggaagccaattcggtggtttgtagttcggacactggcctagtgttagatcgcgacgttttattgttgtagagcactggtcagtcaagtggagcagtatggcagcgcaatagatcctgcgcctccgatctctctggctagcaattttaagaagctatatatgctgaaataggatcggcatagattccgaacaaagttgtggatgtcatgaatctaatgggaatcaaacgctccgggctctcaccgcccgcggatctacacctataagctctctaagagcacatgatagtgcaggcttgagcgggaaacttgggtattatcctcattttagtcatataatggcttattgcggtcattcctaggataacctatatctacaagaatgcttgaatctgacgtggcctacccaatatcaaatctgatccttaacctgcgaaacgtagattattccggcaggcggacgcgccttgcgttgccttccctgccttgtcagacaaccagagagctggtcaatgtatgcggtccattgttgcttgtgatcctgggggcttgagagatctcagtgctgtttatgtggtgcatacatagcaggtgggctcgcgatccttgttactaggttcaggaacaatccccactctgaagactcttgaggagcttctccttcagcaaaatatcctcaggctcaatatggccccaccgctcctcaaccagcaagcgcacgaaaggatcaccaggtccagccgcacatttcaaagcggctcgaaacactatattgttggttggccaaatgatagggaagccatagcactcgatccgcacgtaaaggtgcagcagccgcgtgaatgtagctagatcacggtcacggatcaggcggcgcaaagtacgagtagcacgacgaaactcagtatctctgtcgaggaatgcccttgttgagattaattgcaaaaactcaagcttttcctctgtccagggcgcacaaagcagcttggcaggaaggcgggcatcctcacagcacgggacctcaaagtaaatcttcccagatggtttgctgtctcccactggaaggacttcaataatgccaaggtggaaccataccgcaatattgtagtcgtgcgagcgtttggaatcggatccgttgaattcgcgatctgaccggttggcccgcagaaccaaatcgctttggccgcgctgaccattcggtgccttatcacaggccttcagatcatcgaacctttgcgcaaatccagcaagaagagacctatcctcaggaatgatatcgaaatggcgacgtttatatttgatgacatggttcaaaaacgcaagctgacagtcgcgaatcaggggcaatgtgcaccaccggcattcaagaatccgagtacggagctttttcaattcatcacgctcgatgtggccaacaacatcatacgatgtcacaaattctcgcgtaagagaagtgtccccttcgccgtccgttttgacgaaggccaattgaacaagccatttatagataatggggttggagagcgcccgggcgaggtagatagaagcccgggcaagattgatctccagacagcggaggaatatctcctgaaccaattccgcaggcaactcctccaggcgtgactttggccgagccaggagctgctctcgggacatttgaccgcactacccgtaagctcggcgaggcgggtctctagggcgcgacgggatcggttcatgcggctggccagggatggcttgcaataaacgattggcataattaaagcaaacgagccagccgacgacgacgcctgtgcgccgggggaaccccgttcccttctctagaattcggacgtctcggttgacggttggtcccgggtcccgaccaagcggttaccaacagctcagcgcgagcagaaagtgcaagagatgcagaccagcgcacggttcaaggccgctgtaggtccatagcgaggctgtcccgggccggatcaacgattcttccggggcgctaacggatcctagactcagccatcaacaactcaaaagccacgtcctcgccagatcaccattcgccgatctaaaactccggatcccggttgcgctgcagagagctgcgcaatttcggaccctcggtcgacgacttttcaattatgtgcagatctacgatctcaccgaccactaaccatctttcaccccccaaaaggcgcataaactgactcgcccttacgtgactccagcaaggggcagaggctggggctgtctctgcctagctccgacaggtgccaggagaagtctatctatgttcgacattcgcgaagcatgtcagtagggtagcgacccgtaatatgcgggcctgcctatcaacacgttaggactcgcgttagagctcctcggggtccgccctgtaggctggcagatgcctgagtgggattggtcaagtatctccgaaatcactgcccaatcatagatcacctgcactgggttcgatgtcggaggaatgagaatggcagaagttggaatgctctaccattttcttactcatacattctgaggctaagattattaccccaggcaatccactagtctagaggttgcggcctagcaacaatggcgagcgaaggaacgcccaggatccgctttttaagccttcatccaatatacgttcttactgatactcggtagcagagctgagtccagcaaggtccagaacggctacggccaaaccggtggatggatgtagattgcaggacaccactcaagaggaggcgtgaactgctgctttccgagacaggtcgaagattatatgaaatgaataaaaggacaatcttcagatcaaatcatttcacgatcgcacaactccctttgacagatcgggatttggggccagagcattcttcgggcgttgaaaatcgcagaaatactcgcgtgtggatgggtccggatgggaaccttaaagagtttaccagctacccagtgccaacgcatccatttctcggcaagattttgatttggtgcccttccgctgccagcaaatagcgatgcgtacctcccgttgatgatatgcaagggaacagggacaggtggctgtcgctggaacaaacgctgcgcgacggtttctctgtacaacagttctagcctaaccggtgctggcgaggctgagtgaattataattgaaattaccgttctttgatccttaattcggcgttgtttgtccgtccttgtgagcttgtaatcgccctttcgcgcccgagattatggtccttgtcgcacaggatcaaggaaggattttcaaaggaaggaatgtgctgtcgaaatgccaaatagctaggagcgagcgcatacctagctccgtgccacaaaattgccgatctgcctagatctgcacggagacaatgaatggcagatacatcctgtcgcgcctcaagcccattacgcgtggaagatttatccagtatataacttccaggctcctggcacctaagttcattctctctctcccgtaagctctgcttcggcaatcagtctttcgtttagttcttccctttggttcttctggcgttgtttcttagtctttcgtttgaaatcatatctcatcgtccaatagaacagctttgcatcacatacgttctcttgtttcgaccttccagataaacggtatcggtccgtttgtatatagtggtcgctcgctcgcaaaccttcaccccacgttcgacataaaaaggcaaacagcaaaagccaaccggttatccagagtcatggactgcttcaggcaactataccgtttcatcaaggccccttttatacgccaacaacaccgaatttttgagattgtgagtcgatggcatagtttttgctcatcggaagactgacatatggtggccagggcccccccacagatttccgaaaggaagaactaccatcctgcttcaccgacgatgagtacgtatcctctgttcgtttatgcaatagaccctgacagcctcgcagtgcaattaccctacacagccgcaccgcacttgataaagaagccatcgtgaaggcagctgaagaggaaccttcgaagcgagataagatcagaactcatgttcggagactgagcgtcaaaatgtcgcggccacagcagcttattgagacagagtgaggtatacgcggcaatatccatcggtgtggaagtgttgtagaaaaaacgtcaagaagcaaagtccacctgcttgtcgcgttgatgatcaaatcaaaaacgttggtacttcattaagtcgtgacttttccgacgtcgtgtccttatccctggatttcttctgttgagcgttaataaattgaggggtttggctttcagaatgtatacgagcttgcgcggctcagggagcccgtcgaaatcatcagggaccaagccccttttaccttgcgtaatgttcggtctagtgctttctg

SEQ ID NO: 5466 - DNA, 3422 bp, Emericella nidulans
agagaatagggcgctacgtgctgaaaatgctatacaaaggcgaaagcgagctcgtacgcatagatggatagctcatgataatggtctgtctgtacaagaggctacagagctcgaggaagctcataatgcgtcttttcaggcaatacctggtccatgcgggccaccagcagaaggtgcacaaacaccaaaggcacgggcattacctacatgtagtacctgccatagaattgggcatagaagaaatgcttgtccaaataaataataattaatataaaggcgttgtggttgattaaaaggtcaaaatatgggaaatctgtatgcaggtgcgcagctcgcttacatgcgcagctcgcttaccaaccacgttaatcccaaacaatgctgagtcagctatcggggattacggacacccgaacccccgaacacccttctctcgtcacaccttgtcttccactgatctcaattccctactccctaatccctaatctctaatccctggcgctatcgtccagtgcagattgcttgctcatcagaaacggctggtgcttatatcatagcgatgtccgacacatcccatgctgcaaaacccatccgcgttctgtcatgtgttatgtgccagcagcgtaaggtgaggtgtgaccgcaccttcccatgcgcaaactgcgtcaaggccaaagctcagtgcatacctgccaaccttctcccgcgtcgtcgaaaacgccggtttcctgagcgtgaactattggaccgacttcgccgatacgagaccctgctccggcagaacgatatcgaatttgatccgcttcaccccgagccaggcaaggagagtgacggccatcagacgctgggcagtgttgaaccagaagaccgagatttggcttcgcgggactcattatcaattcgacccaagtcctccagtggagcatacgaggccaagtaaagaattacctccacgcttgactgcagttgggctgatcttccttagagacatttggaccgcagtaaaccagacggtaagccccctacctggctcctgagctgccgggaacagagctgaactttgtgatagtcgccagagtctgacgaggaaggtacctcgtcgcccgctgttttcccccaagaggttgttaagaaggtctgggaccggggttccgagcccgtggatccactatttggcggccagaacaaccccgtcgatctctcgtcccagcatcctgaacccccccagatctttcgtctctggcagatctatctcgacaatgtggacccgctgctcaaggtcacacatacacccactttacagagacgcattgtggaggccgtcgcgaacttgaaaggcctcgcgcccacactggaggctctcatgtttggtatctattgcatggccattctaagccttatgccggacgactgcgaggcccggcttggcacccctaaagatgaattgctcacccagtatcagcgcagctgtcgccaagccttgatcaattgtgggtttttgcgatccgacgatcgtgaatgcttgactgctctgttcttttatcttgtaggtgaatgtgcattgatgtcattcccatgcgctcacacacgcagatgtccatgcggccgaccattggcgatccgcgaacgctcgccaccgtgtttgccgttgcaatccgcacagcaaagcgcatgggtctgcatagcgagtctagatgcgccaaattccccccgttggaagcagaattgcgtcgaaggctctggtgggccatggttctgttcgatgctcgaatcggagagatggctgattaccgagccttcacgcacctcacccctctctgggattgcaagatccctactgatgtgagtgacttcgatctccggcctgacatgaaggatatgaccgcagtgcagggtcgatcctcagaggctctttttattgttactcggtacgcaatggccgactgtatacgcaacttctcctttcacctggacttcatctgcccgcctctaaaggcagtcgcaagggagatcatcgtaattctggacgggagtccttgagctggatgccctggatctcatgatgaatgtccgatatatacgtttatgggtccttgagaattggctccactctcgaacgatctggatggcgagagggtggctggtgaaatgccgcctttttgaatactactctagatacccgaccgcgcgccagtcgaacgctcagcgtgatgctgcgagtctatatgcgctcactatgttggattgcgatacgaaaaccctggcgaatgtgggcacaagccgctatctatggctggtgcacttgtatttcccctttccagcgtacgttcacctgctgcaagatctgaggagacgtcccctcaacggcctgatagagcggtcatggaattcactcagtgaaaactttgaagctcgttctaacttgcttttacgcatgttgcctggagctcaattttgcgcgctatccggtatcgttattgaggcctgggagacaagtgaatcggccttgagacaatctggtcgacaggcgctacaacccaaaattgtgacttttatgaaatcccgattggccaaggaaaatattaatgctcggatggaaaactcatcaactgcgactagcttcaacgaccacacagctgcttggtcgaaccagcagagcatgaactttagtgatccgttttttacgtctagcgaaaacagcgcgtgcgatcccgggacgtggatgcctttcgacattcctggtcaaacatctttcagcagtatacttacctcgggagattggtcgatgttgaattggggaatgtgaaacatcatttgcgcaccatgcgtattggatttgataactgccctaaacgcttagcattggctttctgagagtgtaccttgcattgtatcataaggctatggtctttgctttgccataccctccgctttgccataccctcccctcctgtagaatccgccaaagtatcccaaactaccagcaatctggccgggggtcatgatcagaagagaattcgatctctcgcagggtcatctcctggacatcatgcccattcttcctctttgttctctggtctagacaggcttttcgtggtatctagtccagtctcgcaggatcccgggccggtctgttctgtagatactcgtccaactcttccattacctctggggtcaatttcggcaacaactccaagcttgtgacattatcgagaatctgttcgggtcgcgaggctcctgtgatgacagaagcgacgttttcattcttcaggcaccaggcgagtgcaagctgtgacagttttacaccaagcttatccgccaacgcctgatttcgtcagaagaaaacctccaaagcctctttggacggcgccttacctgtaaacccgcaatctttttgacattccctgcccactgctcgctct

SEQ ID NO: 5467 - DNA, 4474 bp, Emericella nidulans
tcccgagggttcgagcgatgaccgtagattgcctaaaggaacgtagacggatattccctttagcgttgtagggtacacatacccagctcacaaagcatgccacaggtagataccccttccgacaggtttccgcctcattttcatgacggacaaagcttggatgggcgacatggcccatcaggacaacgagcgaaacgattgcgtatcgaaatcacttggtctgggttgacaagtctggatgtgatgatgaataggcttttaaagaattgggtggttcccaaacggtacaacgccgatcaacgctatcaaatatatctggcggactccaagatggaatcatgctcactcgtctattcaaaggctcaaccaatataatgatctctgaagactttattcaagaacttcataagcattgcggaagaagtcccgaaccagggtctgccttgataatggacaacgcatgtctccataattcgacgaatcaagcaaatgtgctcacagaatggtgttaggtcagtttacttaccgacttactcatcatatctgaatcccatcgaggagttcttttctgagctagaaccctttcaccgggattggcagtcacaagagactagcccgggacagggatttcatagattcctagggtgatctattgatatagtcgcggcacaagagcaaagtgccaaagggcactttcaacatgcgggattgattatcgaatatcttcagttagacgccataagttgcgttcgttaacgtggttggtaagcgagctgcgcatgtaagcgagctgcgcacccaaccacttttttacatgctgacgcggtcatctatcttccaacagccaccatgccccgagttcgcgttagttcaagccaaaattgccatgagaaggaaggtcggctcctactggctgtacaggctataaaaaaaaaggagattacatcaatatgcgaggcagcacgtcgcttcaatgtgcctgaatctacactacgtacgcgactacgcgggactacaaatcgcgccgaatctcgcgcaaatggccataaattgactgagattaaagaggaagtgcttaagcagtggattctttctttagatctacgcggagcagctcctacaaaagcttatgtacaagaaatggctaatattctgcttgcaaagcatggttccaccccaatccagactgtcggccagaaatgggtatataattatactcaacgccacccggagcttgagtcttgcttgtcaaggcaatacgactgccagcgagcaaagcaagagaacccaaaggttattcaagcatggtttaaaaccgtacgagccacaatcgaacaatacgggatcctactggatgatatctacaactttgatgagactggctttgcaatgggcctttgtgcacatcagaaagtgattaccaagtcagaatcatgtggccgaagaccagttctacagccaggaaaccgtgaataggttactgcaattgagtcaatcagtgcttctggataggcacttctaccaatacttatctttaagggtaagcagtataaccaagcatggtttactggccttccacctgactggcgatttgaaattagtacaaatagatggacaactaataaaattagcctttgctggctttagaagcaatttatcccgtcaacagagcattatacgcgcggaagatatcaacttctagttcttgatggccatggaagccatcttacaccagagtttgatcaaatctgtacagatcataatattatactactttgcatgccggcatattcctcccatcttctacaactacttgatattggatgttttgcagttttgaagcgctcgtacgccagcttggttgatcagaaaatacggcttggcatcagccatattgacaaacttgatttccttgcagcctatctacaagctcgaatcagtacatttaagctagatataatcagaaacagttttcgagcagcaggactagtgccattgaatcctgaactagtactttcaaagcttagtattcaggcttgtatgcctacaccccctggaagccgtggcagccaggcaagcactttttgcccacatacaccagcaaatgttgatgagcttctaaagcaagcttctttactcagagattttctcaaacagcgcttaaaaagtccactatcaccatcccataatgccctaaaccagctaattaaaggctgtcaaattgcaatgcaaaagggcatactattggagcaagagaatagggcactacgtgctgaaaatgctatacaaaggcaaaagcgagctcgtacacatagatggatagctcatgataatggtctgtctgtacaagaggctacagagctcgaggaagctcataatgcgtcttttcaggcaatacctggtccatgcgggcaaccagcagagggtgcacaaacaccaaaggcgcgggcattacctacatgtagtacctgccatagaattgggcatagaagaaatgcttgtccaaataaataataattaatataaaggcgttgtggttgattaaaaggtcaaaatatgggaaatctgtatgcaggtgcgcagctcgcttacatgcgcagctcgcttaccaaccacgttatcccaagactgatttgtaaggtttgctatcaattttggcttgctgtgccttaatctgtctcgtggcatagcctcatatgcagggtcatgaagccgcaaagagctctaacttcaacccattttcgaaacattgaaaacactgatgctcagaagctcctagtatctgcgattgagtgggctttatctgacttgtttcttaaagcatcaataaccggatggtagtagagcccactttgttggcaggtgaatttagaccatatatccaatacaggagaaatggttagccgtgactacgatttccagcttgcacggaaagctctcgaagcaacacctaaagatatccttagaggaaggttatctgcttattatagtggacgcccttaagaacagatactcaagtactcaagcataggggcgatagatgatctcgaagggcccatctaggttacatgggaagctatcagaacaacacagaaggatcatcatgacggccatgacacttgaataagcttggtaatcgacttgaggtcagatattcaatcacaggggcaatatccaatctttgtcaaagcaatgtcagaggatcctcctcaccgtgtacaaaaatgaacgacctcgatgatccgacttagtgccaagtattccaaagcataggcactaagtaatctgaaagaagccatccaacttggcgaagagttgcctaatcaatctcagaagataaaacaccccttcaaacagcctgaaagtcgaatactcaagcatagcagcagtagtcggccctgaagaaaccaaccaacttgcacgggaagcagttcaacaacaccaaagaatcgccctgaccgaccacagtatttaaaacagccctgcaaacaaccttgaggatatatacttagagccgggagcaactctgacattgacgagatactgactgggcgaaatatctcaacaatcttgcaattgagctcgacatccaatcttcaaggacaggagagaagactgaccttgacaaggccatccaagttgcgcgagaagctgttaaagcagatcctgaaaatgattcttaccggccattatatttaaacactcacggaaatcaactcggtaacaagttgttataaataagagaaatttatgaccttgaagaggctaccaagttacataaagctgtcaagcaacaccaaaacatcatactgactggaccaatcccattactcctgagagcgcacttctgattctttagcgaaaggatccttgcacctggctaacctgaaaaggccattcacatcgcgcaagacgcattgcaagcattaccacattatcgtctatagctcgaccacaattgttgtacagactcgcccaccacctgtgttattcaagcgtttgatcagagaaaaaccctagggagcactcagaactacctgtcgaagttgaggccgagcagcgttggctgatcatttggctgcaagatgtctgaacaattatcctatgagcgtgggctttagcacatgatcagataagctcttgaccttaagtgtcaacaaggctccagttactttctaaagtatgcctaagtaaatccaaatggtctttcatttataccttgaccccccttatacattgactgtttaacgaagacttatgactgtctctcgacggtgatgacttcttctatctgatcctggtgtgtctccaggcacactttctataatcctttcctctttcttacataatgtcatttccttctttggcatcttatcctatatttccatttctttatattttttttcatactgtttttcctcatattttttaccatcatatcttcctttactgtcatttctatatattctgcttt

SEQ ID NO: 5468 - DNA, 10108 bp, Emericella nidulans
gggctgtagcaccgcggaagacgatgagtcgtctctctcgtccgtctcgacccaggatattgggcctccagaggagactcgtttatcccgcaacagtctggctccgtcggatattgttcaacgcacgcgttcaagatcaaggagctcagtaagaaagtctcctagatcgtctgcggaggtacctagagaaactgtgctctaccgagaagagcagcggatttcgcttcgcgcgttccttcgtacacttctacagaacaagcggatagccgagtcaaaagctttagaagaattccttactgcagacccgtttgttcctgggcaggaagagacgcgtgacatggaacgacggaaggaagtcgacgctatcaggattgaggagcaaaagcgattctacgagattgcccgtgaacgggcggcagagctggatgtgtatatggaaaaattccgtcgagatattgtagaaagcagtaagtccaggtctccaggaacctggccagggggcataaccacgctaacatacgttgtcagatgggttgacaaagctttttgccgagatccgagagaaaccgacggttgaagatttgagccctcaatatcagaagtttgcggaatggttgcgcattgagtacgtgatcctgtcaaactatcacgttgcctctgctaactgattagggttgcggctactctgtaccatcttttcctggccgaagacaattcggcagagctcttcgcgcaggccaaacggattcactccttagtgccctataccttgttaaagaatgtgatccgcatcgccaaccccgccgctgtaatgactggcgttttggacctcttccttgcccagcctttcggctcccggtctcttctgcagcgaatattctccatgacattgcatgatggcattaaaggattccagcgatcgatcgatgccatggctgctaaagttgacgatcctatcatctcgcagaagctgaaagcgttcaccgaggcagacgaggctatcaagaacgagattcgtcttgaggctgccgaggacgatgtggacgttgctgtggctattctgcgatcagattatctgccatttgagctgtcgaccgagcaaattggcaaggtctttaattcatacgtcgcctggaatcacgctgtagaaaatgtggacgaggaaatgcgggagggcgcgcagtggttcgctaatgtgaagcagttgctcaaactatacacgcgacagacagacaaggcgaagatgctcagcatcatcgaagaaccagtgacgctccaactgttccgcgatcttttcaccatcttctatgagcctttggttcgagtgtacaagtcagcgaatgtttacagcagtatcaccgatttcgccaagtttgctgacgacgcaatcgctgtgattgaaaagtgccagaggcaggatatttccgccgacccaaaccaaactgttcaagcctttattgatctctgcgaacggcaccagagtagtctctacaagttcgtccacgaggtccacctgcacgataacggactgtttgggtccctgatggcatggattgaagatattcttcaattcctgcgtaacgggccaaaaggcggcaaactcgacatgaacgcgctgtttagcggtgccaaggacatgggtcagattgacccagccctcgctcgtgaggagatagataaactcataaagtggcatgaggatcgcaagcagtggcacctcaacaagactcgccagaagatggccgctgaaggaacggctagttctccattccagaccaagttcaaatcgagcgactttggtttggatgaggtatgtataggacctttaaagtaagtcacagataaactaacaagaaacaggccgaccttgaacatctcgccatttccgacgaggattctgatcactccgatgacatcgacgccgaagacgaggcagaagaattagacccgatagctgttgaacgaaaacgacggtcccggcaacaggaccacttgcgccgtacagccggagagcccgtcaaaccggaagttcacgagatcctcaagctgcccgactcgttaggtggtgtgctccgccaggtgttggcggactgaggccgccatctcgtttcgttcgttctgttgcgatacccactgcatctattcatatacatctcgaagttgcgaagtttgttgtttcggctcgcttttacagcatttgcattgcaggctagagtagactagggcatacaacatctggtgcatggcattatattcctatagaaatcaatggagggcatttgacgtcgcatttcgcgcctatcagtagtttcagtaatttcaggccttcgcgagattatgttcataagctaggtgagcctaaatgccatcatgctgatgcttggcgcggtaggcatgatgacccttgaataacagccagaggcgttctcaagtgagctcactgtcgaattcttaatactagaactggaaggatatctttgcgatattgaaatagagcccgcacaattcgtggttcaagcgccgaccgcctcaactcgatagtttccatagcgaccatcgacatctttcactgtcgcgcgatcaagtggcaccgtaagttcagttcttcgttccactatttatctattgtcttggatattgttgatcctgtcatcgtcattcatcagagttgatgatatctccccataaaccttgtcatggtggagggacaccggcctcccctcgcaccgccgtacctacgcggggtctcctactggatggtatatggcgatgcaactgtcccgagcgaccaccagctctgaagctgcagacgaggaatcatggagtaaaccatgggcggtggtgtatttctacctacttcctctcattatctatttacgcacaactaatccctacattacctaccttgacaggcggcgatgtgtaccacagacttagaagctaacgacatccttgaccagtttacacctgccagaaagaccagcaacaccgatgcaagttctttctgtggactagtgacgctgaggcccgcgagaagctagtgctcctatcgaactcgcgcaccgaagcagttccttctggatcctcgtctccaagcccaacaccgcacactccatcctcaaagactgcctctgcccaaggaagcgcagagggtctattaacgccgcgaaccggctacagggactacaaaaggtcgcgagtggataacacaccagcaactggcaacggcgagcgccaaagctcgcatgatggctgaagacacagatgaattcgactggagcgacgggctgcaggatgaaatggagaaagtaattgaaagcagccagccactccgacagccgcaattcggacctccggcgcgcaaggcaccgcagacggcagacgtgaccagtccggcaaagaggaagagatcggttgacgatgagggtgcgggaagatatggtacaatgacgccgggcggttccgtgcgtggaactgggccaagtaatcaaggagcgccgttcctcacgccctcaccggctcggtatagaaatgctggacagggtccgggagttggggagtcgccgctagcgacatcgtctgaccttgcggtgcaagtattgcggatactagaaaagcatggcggtgatgttccggctggggcaggggaggagttaagagagttgttcaaccggcaggagatgaagatgaagggcgtattgcggggacgggacatatcgcgggctgcgctgaaggacaaggatgagcagattgtgaggttgaatgaaagaattgcaacgttggagtcacagctgcaaatggagcgcacggtatgggggagtaaatgatattctttgaggatttgataccctggtacattagcatggtgcttttattcaggctggcctttcgcaaggtataggttaatttaatagccgcagagtggtcacttagaacaacgtaatttcggaggggttcatggagcaaattcaggtatgattgatgtcgatcacgtgtgcgataagatcgttgaaaataagttgtcctggtccttaagagaaaatcctcagcagcaagttcgcaggtaccaaccacgaaacgaacgaggcagaagattataacttgcctagaagcacctctttgaaaaactgcagttctgtttaatggcccaaagtactgaggacaacaccagacgtccgcgcccgagcgacctccccgagatgtttcgaccccccgtgaaccgcgcaatgcgggttctggatcgatcattcttcaaaaaaacggtaccgctctccgctgcgacaatattcaagaattcagacatctcaagggtgcgacgggcgttggagcagagcaaggatattctcgcattaccgcgcttgaatacgatccaggacattaaacaggatgatgtcgttaaaaagtgcttactgcttaaggagaccattaggcatgatggtatgatctgtgaatgctgttatgtatggatattggttaacgtgccgcagatactgcgacatggtcgccgactattaacgagttggttgataatggggttgttggtgttgggcccttcgatctgacgctggactacgactattggcttcactgtgagtacaagaggctacaaaaagtaatggaagctgactttggctagccgatattattagtgccgttctaccggaggaactactcgaggaagttccgcagggctttacgcaggtgggacatgttggtaagtcgagcaaaacgccttgtgcttctgctctggagaactgaccaatagcccaactgaacctccgcgaacaattcatcccgtggcgacaccttattgcacaggtcctcctggacaagaacccaacgcttcgcaccgtgatcagaaagaccgaggatgtgggatcgcaaagcgagttccggacgttcccttacgagctccttgctggtgactcagatatgaatgttatccagcatgaacaagactgcgaattccgctttgatttctctcgcgtatattggaacagccgcctccatacagagcaccaaagactcgtggacctattcaagccaggcgagatggtatgcgatgtgatggctggcgttgggccatttgcaatccccgctggaaagaagaagatttttgtctgggccaatgacctcaatccgcacgggtacgaggtgatgcaggatgccgtgaagaggaacaaggtcttcaaatttgtcaccccgttcaaccaagacggaaggagcttcatcaggtggtctgctagagccctccaaaaatatgacccagtgacagtgaccatccagccaagaacaaagcggacgagggacgcctccggtcaggtgaaagagacccagccacctctagaagtatacacccgtccgaaagtctttcaccattacgtgatgaacctcccgggaaacgcccttgagttcttggacgctttcattggcgtctatgcgggttgcgaggaactgttcgaaccacacaccaaggaacagctccccatggtccatgtgtactgtttctcaggccactcggagaacgaagtcgacgaccatattgatatctgcaagcgcatgtccgagaggctggaatacccgataacagtagaggaccgcgttggaggagctggaaacacagagctggagctttctatccataacgtgagactggttagccctaacaagcagatgttctgcgcgagtttccgacttccccgcgcggttgctttcaggaagaagtgagaaacctacattatgcagtggatgatagaattcttggctttgcatagcacgaggcgtttggttgggctctcttctccatcatagactagaatttgcttataatggcattgattctcgcttctttagctatagcagccttgaaacttgtacaatcgcgggcttatgctgtaagcggtactgggttgaccgcctttttctgccgcgatcgcctaccgtgggcctggagagttttcccgcctgcgcatcaggttcactattcatcctcaagatcagcgaagccatcacaatctttgtcgaaccactccgctgtactcccttagaggcatacagattccgacttctgatcaccatgagcggcgtcaacctccccccggctacccaccgccagcgcgctcccccgcagggtgagctcgaagctgcctcaacactcaagctcggcgcggaccagaacacgcacacgttatcgctgtccgaagcccgtctggttattgacaaggttcttgagaacaagcggaggggagggaagaaatatgaggaaccggagtgagtagtccgccggtcctgccgtttctacctgcgatgtagaacttgcaagcaacttgcgataagatagtagcagataactaacggtattaccacgtaggaacctcataaaaacgctggagtacctctcactttttgcccgattcaaagacgaggagaatatcaaggcagttgagcgactgttgaactcgcatacggagttggagatgttcgagaggtcacagctcggtacgccaccacatcggccactctctcctcaatattgagatgctatctcttctgctgatatgggcaggatgtttgctgatgcgttaacaaataggaagtttatgctgcgataacgccgatgaagcgaaatcgcttatccccagtctgcagaataaaatttctgatggggagctgcaggaattgctggacgagttgacgaagctgagaaacttcacagagtagttgattggtctttttctcttccagactagccctgctctgtctattaccagtgcctgggcggtgatgtgatatggtttcatagcatggagttaggagttacgcgtatcaagggccgaaaaccaccaaacctacctttgaaaggcttgaaagcttgagatggatcgtaatctggacacagatcgttattggacacagatcgttattggacacagatcgttattggacacagatcgtaatttggacacggagccattgaatgatgccagaagctagatatctagcctcgttcaggtatacctgcatctgaacagttcgacgatcaacatccaggatcgcctgattatcagtaatcagcgcttacagaatcgtgtgttgcagattgagctcgttataattagaagcgatcatgcatatatgctgggcttggattatagtatgaggctggtccgtgcattttgataggaggctctggggttgatatcgatatcgataaccataacttgctttttccccttgctttccacttgctttccacttgctttttccacatgggagattaccaaaccgagtcatgacacccagagcttaaccctcgactcctaaccttattatgtccaacccgactttcaaaatcatatatgctatgatccactatctatgccctcgatccaataacagtctgcaacaaagagctgtgcactagatcaagagggtgctccggcgtaaatacccgaggcatgcatcccagccactcacacgctagagtgataagaccccctgcctaagcatgtaaggaaaggaaggatgagactccggctaaaccggggttgccttaattttgcctttttacagatgtatggcgtggtcatcgtggtcatgcttcttcaccttgcgcagcaggacacagatgcgctctggacttaattccctcattgctgcagtgtgatagtatcgatcaacaattaagggaaaagaaaaagaaaaagaaaagaaaaactccgtcgtcgtatctgcgcatagattaagccagcgccaagcaacaagacacatttcccgaagcggagctccatactccggcggtgcagcggcggcggagccttcgagtccccagacctggttccgagttcttcctcgaaagccacgttgagcacgttgaaattagatgttggattagcaggtaggaattagtaatgggatcgcgtgtcgaccgcggttgaaccagcgagctctcagatgaaggtcagcgaccgcagcaccggagtgctgcccaagtctccgaaccagtcgtagtcgactctgaagttcaaagccacagctaaaaaccggggctgcgagtgtgtggggaggcgccgcaatcctgcagggccgatccccgttaccggtttggcgctaggcccgattgatattctctcacgagtcagaaatggatcttattggacgacatgtagtgttatcgcgaccggtgattggatacaagcacaattaggtaatggagtcgcccagtcgggtggttccagacgaaaatcagacccagcaccaaaccgcgggctcggagttaaggtcagccatgaagtcatgcagcgttcagttcgtgcatcaaaactgaccagcgatcttggacggctggtgctgcaggagatacggttgattgaagcgaatgataactgctgatgttgaaacctgtaccagaaccaattacttcagcgttaggtaacatgagcccgcgtcgagaattcctgtacgtaataccaagcccgttccggcaacagccaatccggcggcccaatcaggcggaagcgccttatctctggcctttgagcgcgcagaagcaggaaccgtcaacacggccatacgacgggattctcttacgtgtggaaattcaagctcacctgctattctcgtgtgagtcgtgtcgctgccggatggacgggcagcacggttgaatcttagagatcttataatgatgttctcgggagcagagctggcggagtgtagtgttggtcatttttcttcaaagcgttgaggctttttcccttcaacccatctcgctccgtacacagaacaaccaaaacatcagaacatccagaagagcagaacagcaggagcagaacagcagaacagcagaaccagaacagcagaaccagaacacagtaggctgcggtagacggctctagtctcatattgcattccatagagcctccgattgcgctcatagatcgatcgtctcgaccctcatattcccttcccggtttgataccattataccattacgtcgttggttatcattatcattatcaacctcgtcactcggcctcctgcccgtcgcctctgataagcatttccgcctcagtttcgacgtggcaggctccctgatctatccaaccagcagaccaggttcttgatctcagactgtatcagactatctgactgtatctgccgggtgtactcattggctgcctgcgcggtatctcgatctccccagtccccgttcctccgtactgttcgtggaccacattcgttctccagcactcccagaccacattctccaagcaccccataacagacccttctggggtttgcctggccctggcggattcccggcactcgggactgttacgtgacggaatctggtcgggtccgtcctgttcctatcaaattatcgattccctaattctcttgccaatattcgagggcgatctccgccctatcttcttcgtcttcttctccctactatctgtgcacttctctatcgcggtctcctgaatggctgctgttatcacgctccagtcgtcctcgacggctggtctccaacagggctctccatctgaccgtcatctccttcggccgctgctgcagaataaccctcagcaaccgccgctacagcagcagccgcttcaaccacagcaatccccctctcctgcccccattggcacccttcctcgtcttcctgcactgggccgggatggaccgagttgtgacgcctgtctgcgcagaaagagtcggtgtgctatgaacgaaatggtcaacaagtgttattcgtgcgactttcatcgccaggactgcaccttcaccctatcatcatcgtcaaccaccacaacaaccattaccacgaccgcgaccagcgcgaacagcgcgaacagcgccagcagtgccagcactgccggcaccagccgtccaagcacggctgacgtgcagtctaaaaagcgtaaactggacgatatcatcaatagtgatgcggattctcctaaaaggtaaaagccattatctgatgcggttcgagagccgatctcggatatactttatcagagagagactggggcgctaattgttgctatcccgccaggttatcgaccgtttctaaagctgacagtgctcgttgcccttgagt

SEQ ID NO: 5469 - DNA, 5889 bp, Emericella nidulans
gagttcatctgaaggtcctcgttctgattcgggtgcaccacctgtctctcctaggcaggtggagttcgaagtatcagtacattcggattgaccagatagttcgaacttaatctacggaatatttaggttgctgagtgaatcaattctcatttattgtcaatcaaataagcacaacggatcagaacctcattagaaaagccgcaagaacaagtcaagtcaagaaatcaaacccatgctcttttatgcgccgcagatacaaaccgtcgaggagaaaggggtgatggatggtggatggctatatcgagcccatatagaagacaggaacagatgataggaaacggagatataggagtcgggaaggaatgaacgagacgtcagcaaatgaaggtcaagtattggacaccgacatcagagatgcgcagacaggtaatgtacagcaatgtcatgcattagtataattcgcggatgggttcgagggcgatgtagtataatcgcagggaaatcagagccgctctcttccgcgaggacttccggttccgtgttcattagataagacaatgtcgcaggactgaaagacaaataaccaatgcgaagtaaaacacccacccacattgcgcctatccgaatatgaaacaagagggaagaaaaactgaagcaatcacgtcccttatgtcccttatgtatatgtagtcaacagaaacagtacggcagggagtcggctttcatcctcctcaccaagcgtctcattagaaggtatcctttataacaggtaaacagcgctgcgaaagaagatgttcaaatataggaaacagcggaaagggaaagctggacagaacgcgtaggcggaaagggaagggcaaatgagggttgtttcgctcgaccggtgcagcgaaagacggaggctagtaggcttgggggtatcgtggtcgtctagcggacgagcgccgctgctgcggcttgctgtgcgtctaggctgatctgactgctatgggccgagttttcggattcgagtgtggcactagctccactatcaccactttcagcgctggcgctcgcacttccggtcagacttctttgcttgggagtacccttggcggagtatgggttgctcaccccatattgttgttcaacttgctgcggacctacagcatttccttgcccaggagtgtgcctgggagcaggcgtccgcatgggcccgggcggtgacggatggcccccattcatatgaccatttggtgggccattcggaggaccgtgcaaatgcccgttcataggaccgttcataggaccgttcataggaccgttcagaggaccgttcatatggccattgggcggcataaaaccatcttgtgcggtgcctggtcggcccattcgggggccggggccaccaaacggcgtccctggagactggctattccgcctactaccggggtaaccagggtgtggtaggtcacccattcggcttgccgtcaaagagttggcgcgggatccttgttgcatttggtttctgtcaacggacccgtagcgattggatgagtaggccatcatagggttgtccatgagcgagtcatgaagaccagggatctcttgcataatgcgatcactagcacgtttccttcctccaaagtatcggccaaaggaagacctgccgctgttcatgttggcctcagggttcttgcggaattctctggcgcttggggctttctttgttcttcgcgacgttatgctcatcatatccacactatctgggtcaatgtgtggaatggggatattatccatggggtcaaagtagtcatcttcgtcctcctcgtcgagtaccgacctaggcggaggaggcctgcgcggtcctcgcctcatattcatttcctgttcccgaagcatcagctcccgctgacgcagagctaattctcgctccctcaaggcaatatctgcggccgacgggggaggaccaggggggccaccgggagacatatcatgatagccgttggttgcaggttgaggaatcacgccatccggagcatcttcataaagcatcaagtgactaaactcttcgaggccttctaatgaaggctcgcgaggaatacgaccaccagagggatgtggttgggcactcggaggtctagatggcgggcctcggcgcgggggcatcatccctgatgtgaccctagaagacggtgggcgcatcggaccatttcttggaggcggaactgaggagactcgaggaggcggttgagccacggcgggtggagttgcgtctcggggtttgttcaagtttgtggtattgacatggtgcagtagagcatacagagtctcaatacgaggaaccttgacacctgactgcgtagctagttttataggcgatccgagatatgtttcaagctccatcggtcgtcggtgctggaaatcctggtacattgtgcttggtgtatcgatggaggtcattttgtcaatcgtcttttgactgaaatcgctcgggaaagagcaaccgtgcgctgtagccaggtcgacaagctcttgaataagatcggagactagctgacgtactcccattttctctaagagttgtttaggatttggagtctcaaatatgacacttgccgggtggaacgcgataggcctagactgtcagtggtcgaagatcaagaggattcagcgccgcttacccgatcatacgctcaaactgctcctgtctgatgttggacgatactttgcagttgacctgtccagacgcgagcgtcatcgccagcgcttgagccatatcattctggatttcagccgggattccggagttactacttgtagccccaacccagatatctgatgagttgatgtgctcaaattcgctcggcccggtctgggttatctcgacaccggatacaagggacaaaacgacgttggtaggaaaccgctgttctaggtgtgattcaactccgagggtatttgaagtattgaccaagatgcatgtgtgttgaggggtgacaacagactcgatgacggcggtcagatcgtacacatcggggagcgccttgacgcacaggatgacatagtcgaatgcattttcacgagatgcggcattttttggagagcggacaactagggagatcactatcagtaacgttgcccgatttggatgatccggatctggagagctcaccatgacggggtttaaatcgttcagttccaaatgttttcgacctaaattgccagttaacatactagcgttcatcgaaagagtttgtagcaacgcacttcatcgtcactccatattgagaaacggcctcgaaattggctttccagactagcgtcacgtcgcaggatgtggttgcctggagtctccaggagaggaacgcagagatgccattgctgcccactaaacaggttttcgttagacgacggaccattttcggaggagccggaagattggaaaaaagggactgctctgaacgatcgcgaggtgcaacaggactatgaaagcaccaggccgagtcggacgagcaaagccccggagtaactaacctgacaaaatgcgcaggcgcggcggaggagccatggtaagcgatcgaaaatggaaggaagctgttcccgccagccaggatttgattaagattaagggtgacagctattaacgacaactcgacggacgttagtcttctattgcggaacgagcggacgcgattcactggtcgtggtccagagcgatccgatacgagtgtcggagagactgggcaccagcaggacggggaaagcaaaagcagcgaacgaaaaacgagagtaggggagccggttggaggtgaaagatagagggagtaagaaggggacaaaagaaggaggagagggatgcgatgggggaggaggagcaaaaagaaagagagattgattattgaggagatggatggatggatggagaatgatgggatggacagtggacgactggaagcaggaaaacggtcaggtcaaggtctgcctttccgcccgatagtcgactagactgccagtatcgacgttttcctttcccttttctcgcctgtcacttgttttttctcgtttcttttttttcgatctagcagtagtgtccaagcctctccctcctaatcgtggatccccgccagagctcgacccggaaacggaaccagggaggcaaccagtctggctctgcaagcgagaaaaacagagacaagaatgtactcagacacaagtcgatgagctgcgatatctccggatgcgattctacagtcgaacgagtcctggtctatccgaatgcatctttcctttctaggtcaggcacctgttgtccagctgttttacgtactcgtgcctagtccacctattgattcatcaggccgagtcgcaaatgaacgatcctgattatgcgtttttgagacacgacagcagcccgctaatctggccaccaaatccacccctcaaggtccaggtgctggtcggacccggtcagcttccgaattattaaatctcgtagtgaaagtctctcagtctcagcaaagtgtcagcgggatctcgatacatatctcaatcttccatccttgaatcttcctgtctactaatcaatgagaaacgccagacttaaccgaccagatctagatctcggcctcatcgtcatatgagctctctgtgcgatggatctaccacaacctgagtaacagtctttagaagccgcttcccatcaacgaagctctacggatgcctcccgggcgcatttgaacgggtcgatcggacacggcgacgggtagtacaagctggtttgctagctcatgacagtatcttttccattctcatctgtacctacaactagccgatgattcgactccgttctgacgccgcatccgcacaatgcagaccccagaacccaactgcgatctcaatatgatctaactgatgatattattgacgttaaagaagggggaggcagtgttcttatcccagcatgccagaacttctccggggtagggatcggcgcccttggacaggggacagaagcgggtgtgctgtttgcagctgctgattgcatgcggtccttcggcttctggtcttgacagaggctaaacccgctgttactggccatgttcctcgcactctcacccagtctccggttctctctcttcagggaccttgtattcccaagtatctccagaggttagggtctgtgtgcaattgctgtggcacgtcagacttgccacctgtcgatcccgatctacagaagagtaacggcgtgatgatagactgcgacccttgcaagaggttactttatcagaatatcgggaatcggggtatactgtgcggtgcataaccgggactgggccaagaatactacgggagacacgaggtttgtatctgccgatagcgatccaatgttagttacactacagaaaaagctgctctgtctctgattttagatccgtctcttgagagtctgcagaattatcatgctactcactgctcaacaactcaaacacggacgcgccctgaatcaaatcagaaattccatggaagccggaagtgccccacttgacaaagatagaaacaagctctcaaagcccgattgggtagaccttgggccagactcgtccagctccaccaggttattttcaggttggaatcttggaacattcggtcttgggtaccactcatgctccagtaatccaggagttatgcatacggggcgctgcttcatactgctcgatcgacccataatcctcaaaataatgaatatcacaatagattaactttcttaaatccagtctcaactttgcggcgactccgatcgccaatccctgttagcaactcgtaattgaaagcgcccttgacgtcaagatgatctcaccttggactaagggcgatcggccactgaacagcaagattcgcaatcacttt

SEQ ID NO: 5470 - DNA, 1886 bp, Emericella nidulans
tgctagcttctgctctacctaatctgcattgctttattggctaatcaaaattacttccaagtccatatcagactttctaacagcatttaaatggtcattgcccgaggacaggccttttcctccatgcgatcaggcaagccagcactatctagaaacgcgctgcctcacagtcgacccctcacatcatcttatgcagctcgattattgagttcaccccaaggccttcgttcagcaaatcgtgttatgcctatttcgaaaggggcctataatcccgcctcgagtagctcccctgtgtgtgggtatcgtccaactttccagtctcaaacgaaaataagccatcattattcggtccaattcggatactatcttcgtttataccacttcacaggattcccttaggctgactgatattgcacatcttcctgctcgatattgacttcggcgactatcccggtatacctaagagttcatgagataggggaaatagaaattggagctacatctaggtcaatgctaatgtcggccccctgacatgagctattcctagcaaatgcgaatgctacacgggtaaatctgccatacctatatctgtgttcagtggcaaaatccacaggcaggtctgttgtaatttcctccccggcatactggcctaagccgacacccatcctgagcacttacatgggcgacgggaggtttaggatgaacgcccgctgtaaatacaccggccgttgtgtcaaaaaaaaaactaggatactgttcgttaatggagcaccagccatatattatttattcatgagcaccaacaatcccgcccaaatactatcttactttttggataatattccgaatccgtctacaatccagagatgagatcacccatccaccaatcagcgcgcgattcgggctctttccaagaactgtcaaggctagagctctcgccacaagattataaacgccccagctctcgcagactttcaaacaaccaattctcatcggttcatctgtgcaaccatgactaaagaactggtcagttcttccgccgcgaataaggccctgctaaatatgtttattgctgcagagcttcgatatccggttcgccagtgtgccggcgcacgatcagtacggagatgggaaaagacttgcggatcggtagggactcagcttccctctgctctacttctatatcctgttgcgatagggattctggtcgtttgcgtgacgctaactagaatcgccagaatccgcgagatctacaagggaaaagggctcgagatcccagacgattttgactctacgctgacaatgccgccggttcatttcatgcagtgagttattctttgatttctacttctttccagttataaaagtaagcgttgctaaaccagtatagggtttccgctccagacgatgtcgacgtcaacgagctcaggaaggtagaggttccgggagggctggacattgaaattctggaatttttcgagtagcttactccagcgataatgcatggaattctcagcttagtatgactttgtgatcataattatttgtccataatacgacatagacatcgacctcgggtgatgaagtcattcaaccaggtctccacctgcaatcgctattccacgtcgcctatcttctctcttcgaacaccacgtagtcgatcttcgagtcagttctctagactcgttataatggtaaatgtgaatgcggaaggttctggtctgtttgtatcggcactgtttcggccgcaatcccccgggtagctttaaatgcgtttgatgatggaagtctcatgacatcacggtctagactaaaatatatattcgatccatgttcaatttaggagcaaaatatggacgatccataataccagacaaaaaagcggg

SEQ ID NO: 5471 - DNA, 4031 bp, Emericella nidulans
atccaaggcctgcgcctacgagtgccacgatcctatacaacttacgtcaaaccgggagacagtcaggtaccatggatcctggaagaagcgggaaatgaaactctgtttctgactcgtcgacccctgagtcagtctctgaactccgacctcttacactggccgggttcctgcagagttctatgaaggggccatcgattcaagcgttctgactctgacatggacacggataggctcctgtgcaattaatctatgtaccgttcaaagagcaggagaatcaagaaagcgaaattagtattaaacgtggaactagactcgtccactgaaagagtcactagaactgtggatgagtgcggtgacccgaaaatgttatagctccaacgggtaggcagcctgggacactattggcattgtacaagtcctctgactgcgagttagaagtcactgacccccaatgagagcctcgatctaccctctacttccccgctcggtataggtgcagatcgatccaccctagataacatactacatcaaacctcagcacgccatcctaaccgacgggcgatcaccactgaatccagaaaaagggggagactaaccggaataaacagccacggaacctgcttctcatactccttccaagcctcgccatatctctcgcgacagcgccggatatccctcctcgcgcggtggatgatcatgatcgtaaagaagatagagtagaaccacggaaacggcgagtcgaagcctgtaatcaggccccacgatatcgcgaagaaccagtcgcaggtatagtgcattttgcgggcgataccatctgtcagttgaacaagccatcagtatacgtatccggagaataacagggacttagaatgattattggacgtacaccacccatcgcaaaggatcaaccccccatcagccgtcttgatggtcttcgggtttttgacactgcgccaagggagctgcgggaaggacttgcggtcaacacttgcgccgcgctcttcagcgcggaagacattcttctggctgttgcaggtgtcccagatccagtagaaaaagaggtacagtcccgcccagatgatcagagttaccgggttccaccggtaggttgagggatcgtggtaggctaggtatagggtgcagtggcaatagctcatgggaacgccggcgagattccagaagatgagcatgaaaccccatttctcgtagtacatatccctagagacccaagtatcagctttcttgattctcggggctaaaagacataatcttgacataccagctcggaattattaggtcctctcccttcgcacaagcattggtgtaaaggaagtgagccatcagcaagaaacagacttcgccagagacaaaccccagctgttcatactgcttcaacgccgtcgcgagcgtcagaagaaacaatatgaaccaggggattcgcacctcaaaaaacatcttcatatcgatccacttgaagagtctcgggttgagttcagcgcccatgaaaaagtcatagatatggtttccagtcatcctgtgctgagcacctctcgccagcgcagagacgtatgcgatgaccgaaaccatccaccccgacgcaatcgcgacagacatgatcgggccgaattcggtgatgagtgcgtcaagacggaagataccagtgaagtgcaggcccagggccaggccaattgtgacgaaccaactccaggcagcagagcagtagtatgggagctggtgtccattcagatgaggaagcggtttgccgacgcggtagactccgggcaagtagaggtatgcaaagccctcgaagatgaggaacgaccagtaaatagtccaggcctttttgtgtgggtatgcatgctcatatgctaggtcaacaaaatgcacaaggaagtcggtgatggactggttggactcggggagaggtagtttcccatcgtaaacctttgcgccgatgaacatatagtacatcacgagtggaaatccgaccataagagctgatactccaattggaccaccgaattcatagcgcagcttttcaaccggttttgcttcgggtcggggctcgtcgtgaatgtggccatggcgccggttcctgacctcagtgctgagctggttagctgcacggcaactgtgaaagagaaagggaggctaccttgcgactggggacgacatcctgcaattcctactcgggcaatctagctttgtttccgtgcgttgcaggtccaatgtagaaccatatttcagttttatatcccctacaccatatagttgcgggctccgtgctcgccgcggagtccgcggccggcccggacacattcgatgcgcactcaaattccatccccgattccatccccgattccatcccctttataactataattatcacagatcggtattgaataaccaaaacgagtgcattggcctagatcgcattggcccatcaagaattgtgttctggtggttcgattcggctgggaaaccgccggtctggacaggattgtgttcagaagcctctcaacagccgggccctgcgctgttctgacatcaatacatcacggatcggaagacaggtcttcgtgccttagcgtttccagtgcaaggagactggatctagatggaggctgcgccattgcctctgatgtcagccaaactcagccccgatctgatattcaggtacgtacctaacttggaattcgatgacgccatttctcatacgcgaacagtacagcacataggctttattcgactgtagccgacagagaactgaagataactgcaatgtgaggtggccatagtccataattccttgtcaacctcgaccagcctcatttctcacagcccatatcatcgaccttcgggtaactagtggctatcgtgctccgagtagaaagtatcatgacgagtgcaaggccagaaaatgtggctcaatgttgactgtttcataaaagaaaaaaaacttggtcattccgtagattatgaggtcttggaatggattcggcaagaagacaaccaccggtgagtgagtcagctaagcgcggcagccactacaaatctagctacctaacaagattaagaacaagagcgcaacttccgagtcctcgccacgaaagagatgcggggtggcctgttagattcttgaaatttggagcacgagttcgtcctggttccctggtccagtagtcactaaggctaaatgatcgtctacagcgaatcctatacacaatgctagtactgaaatgcccgcttcgaaaaagcgcttggaaaagctttggactaagacgaagcggggtaaagaaaggaattattgaatcctaacccgcgctaatttattcgcgtgcgaatctgcgatgattttcttcagcatctgaacacgaccacaagagcgacccttctccattttgcccttgttctactgctacaagatgcagtggagaatatggtgaagaggaaatatgaactgtaatagcagcgctgtttgttgaagttgcgatgtgacctcgaatcctttcccacgtcaaggtgaagccgcccgctcgaaacggaatcatatatgcggatggcggtggcacgtaggagttgggacagcggtctcttagtctaccccacgagataatgcaaccgattgctgcagtccgtatattaccggcattaagagactggaagcgggcggagatcgaccttacactaatcaaggaaattaagctcaagtccagcacttgttgccagcttcgtaatcggctttcgtccgccatgaactcatacggcgtacggttacgcgtcgtcgaggttgagagagtggtggaggcgaatttgacgtctccagaacgacgatcttggctcctcagattgttattcggtgatctatgtatagggctgtcgaatctactccagcgtagattatcgagtcgaccacgatcagtatactctgagtagacaattggggtacgaaacgggcgtacgagacgggagtacggaacagatacttcctctttgcgtaatcttggataccgacttgggtatacaagagg

SEQ ID NO: 5472 - DNA, 4501 bp, Emericella nidulans
ttggagattaacgagaagagaggaaaggagagagatgaaataaaaagtactaatagaagtaaggaaggaagttgtaatgaaggtgtaagagagagagagaagagatagtgaagatagaaagtagttatattagataagaaaggtagtaagggggggtgtgggaagtagagagaggggatgtgtgagcggaagaagtaagggtgacttgaggtaagacagacgtagaatagtgaggtgaacaggggttaccaaagattatttggttaggaaggtaaagagaaggagacgtcagaaaaggagatgccgaagattggattagttataaaagaagtggtagaatccttgtgagtaagtggtgtggagaccataaagagagtaaaagaagtgccaatcagatgcaagtatggaccgaattttaagggagaaattagaagataaggagaatagggcatagagaaggctaggtggggggatgagagaggacttcccggggaggggaccaggtgctaagaagaacccctcaaagagttttgggttacaacttcagagggttcccgccttagaccccgtgccagtgagccgcatgtctgtctctctacatttgtacagggggcatgtccttcgcaacggccacgacatggggcttcaacttcatcgtcagtctgacctggctctcgttgagaggcgcatttacgccgcagggtgcatttgggtggtccgccgcctggcacatatttggctggataacagcatacttttgtctgccggagacatgggctctctccctctaagatctggaccaggtgttctctgtgcccacgacgcagcgtgagaagcacttatgcgcagatgtcgccctggtactttaataagtgcctcctcagccaggatgtccatctgcacaagcagctctatgagtaccactaagctggtgggtaaggcaatgaaagggtaaaaattgcaagggttgtcagcgtaagcttcaacttcagctatggtgttgcgaatcctcgttctgttggttttaagacggcgaggatggtgccgattttggggccagtataatcatgtatgctaagttcaatccgctaagatacctgataattggaatcctgttcgtcttcgttattgtcttcagagagttactctcagtggacataatatacatgcatatctctacttgcctttatctagttgcgtatagtaacacggtatagcctatcacaaccatgctccgggggtaaaacacgactgtctcaagctctagttgagtcaagtatcctgtcgaaagcttactgtatcctagcgccctaagccatggtaactttagcagtaatagtgacagcacgagttgccgcaaatacgtagatcacgaggctgcgtctatccacttccgtccagacccctgccaagcatagactatgggcgtttatgctgaagtataagcattcattgtgctatacttgatggttgtttggaaaggggaaaaaacgcctctctgaaggggcccgtggccatcaaggactcatgtatagtttacccacattgattatccctctatgtagcagatgacgaaaagcttcctttataaatttttcccttaataggtgtctatgtttggttttccaagtgtcgccgatttcggcttccgccgtaatatgatatacagtctggcccctttacacggtgatgcagcgacccggggtgtcatacgctctagataagcttggctatggcatgagagtaccgcttatgaagcttaggcagaacgtgatatgagcttgagaggaaagctgttacagtcctgcaccatatctggcacattgtcatcctgttgtcaggaacaaaaaaaaaagggctgctcattggtcatataaatagactgctatgaattgtctacttattaagcaattagcttcaaacatataggctctatatttaggacgaacgagtatataagtgaaccacaacagacattgtgacatggccagtcaatctgcccctctcagtgcgagtcatggaatccagattcaatattcatttgtactccgaagtagttatcgcattacagtggtcttgcaatcatgatcaccctcagctaaggctgcaagcgcccatccgcgatcgtattggcgccatatcctagatgccctaaactcgctagcttgggggccgtattcttgtccagcctgtcgattggcaaagctagctcacggcccgtacatgatccgttagaggggacaggtttgtgggtggtcatcacgttagagatataataagtacctgtggtgtctgcggtaccttgctcaccaatttctcgctcgctccgccgcgccgcagccaacacccatgcctccaggtcacccaagcaccagtagcaagaatgaggagggatttaagcctggaaacgacggagctcacaaccttgcgccaagatagcgagctccgctctccagcatccggcagttatcacgatccggatgcagatcgcacgtgtggggaaatactgggactagggggatggaaagcgaccctgtacctggggtcggccacctcgtttacagtcctgattctaaatctggtcatggtttgctgggcgagcttccgtcattccgaccaggaccagagagtgctctactcgggcaattgcgaccgcacgaaggaacttgggacgtgcgtgcatttgttgatcaacgtgctcagtacgcttttgctgagcgcgagtaattttggaatggtatgatggccttggattgtcacacaatgcatgagagtattgacaggtggcacggtagcaatgcctcagcgctcccacgcgcaaggatatcgatcgcgcgcacgcagataacgagtggcttgatattggagttcacagtatacgcaacctacggagaataccgcgatttcgaatgctgctctggctcagtctagccctaacctctgttccgctccatctgttgtgcgtcgccccttctcccgcggtactggatagccaggactcacctgaacagctataactccactgtctattcgagcctctccgccaactcctatgatgtgtacattggaaactccagttttacctcgctcacgccagccgacgtcgcgaacgtatatgatcccggctggaacggaacagagcattatgcatccgcaccaaggctggtgcgcatggcagctgagctagagaggctctcgccgaaggattgcatctcaacgtacgaaaccacttttctgtccaagtacgccagcgtcgtcttggtcagcgagaccttcaatgggagtacaaatgtgccggcagtagatacggcagtgatctacgtcgacaccgcgcgcatccctggaatgggggagtacacagagacggtgccgtacaaatggatatgccacgataagctcgataagctctatgacgattactattgtactggcagcgttggcaaggtcaagtcgggcgatgaatgggtagtgggcggatacaagattgactattgcctggccgagcgcacagccgagaagtgcacgctcgagtacagcctgccgttggcaattgtcgttatctgcgtgaatttcgtcaaggctctgctgatctgtctggccccatctctgctcggagacggaccgctgctgactattggggatgggattggctcttttctgcggtcgccggatgagacgactcaagggaattgtcttctgacgagagagatcgtggccgaaagaactgggcaggattcccgggtgcaatgtcagtcgagagtccaaaaggcaacgagatactgcatccgtagattgcgcggtattggcattccaatgtccgacaaacttgacgggtgggcatactctgctggccctaccaaagagcctggcgagtccgaaatcaagccgctgcggtattctgtgatgccaaaacgccgctggacatctctgtctagggctcgctgggtcacctgtctcctcgtgtgcgtcactcgtctgccttcctagatacatcaaccatactaacagtggcagatacatggcatcgacagctgtttgcgtcggcctgctgtctcgcggacttgcttccatggtaaacactgagggcgtgtggacgtctgggctcgccgttatttcctcgcagaccttgatcgagtcactctattggcctcgtgatctaatcgcgaacgtcctcattgccaacaccccacaactgatctactctggaatctacttcatgtccaatagcatcctcaccaatatggcattgtccggcgaatgggttaatttctcgcttcaccgaaagggactccgcgtttcgtcaaagcctcaaggccatcagcgccgaacgcactttctatcattacctttccgcttcggcgttccccttatcattgtctcagcgttattgcactggctcatgtcccagagtctgtatctcgtgcggatcatcgcctacagcgacccccagacacgaaatgctgattatgataccataaccctcgggtattcgccaccggcc

SEQ ID NO: 5473 - DNA, 5274 bp, Emericella nidulans
gacgacagatctggctgaccgagacaaagattatggaaggtgctaaatgcatttttgatgaagagccagctcctctgatgctccgagtgcgcaacagtactatctttgacacgaaatgcgatccccaaagcgaacacaacattaacactagcccagcaagaaggaactcgaagggcagtgttcaggttatcttcattgaaaagagaggtaagctttgcctgctcaaatagagggcacaggcagttgaagttctgtaagtactgatacaggagcgattctgcttcctctttcgatggaagcgggcagaaagcctttgggaagtcatcacccaatattccaaacgacgtcgcattgctatggatcccggacgatatcctaggggtcatgccagccttctggttcatccactgcaagccttcacgcgatagaaccggaatttctgaaatactagtcagttgagaagcttgggtttttcaagcgtcatcaagctcactcctatcagctggaccacccattatgcaccttgcaattagaaggaccctacagtcatcaagaaaaggggtcttattcacttcagggttttggggcacgtcatcttctcgatccatagatgggaaggtgcgtggcactcccgagtcctcgagggtcgcctcaggacacggcccacaacgccatagaccttcttccactatgttttcagacccgggaatagaaagcgatgaaggtgaacgtggcttgtcagacactgctagttgccgcggagactgcacacttccctccctgtctaagtccaaccccagttccagtaagcgggtctccagtcgccctatgttagtttccaatcgattgagcatcataaggctgtagtcagacgctctcatcagtaaacatgcatacgctggatttaaatttcaagcgcgagggcagcacggtacttcttcatgtttctttgacgcctagacaacttcggatcatttgcacccttcagtcttctgttcggatgctctacttcatggctgctcgtattttgcaatacctcagatcggcgtggattgcttttctacccaaagaatgttagcgctcgccatttgggtcagagtacagtacccacttgctttctctgctgacttctcgaacatcgcattttctgagcttctgaatcaataacaccccgcaccagggaggatgggccctggcccgactgagagcggggtctggcatcgctgttgctcgtccttgtcgccattgctgcgttcgttcgaagtgccacaagtgttttgcgacgggcgttctcaacggcagtgcgagctgtgctctgagcagttttatggatggttagctctcgataatgtccaagaccatatctatacgcacagagctagtaggctgtaactgacaagtcacgttagcaatcttacgattcttgaacatcacttagaatgattggacgtagatgagtccacttgacgcggcatgtggtccgttccccaggttttctgcgggcaactgaggactcataatcgaaggttgacaaaaagccctgaccaggtccattattactcggaggagttgcgatccggggggccgtgtgaaggccaagagacaacaccggtctggacgggaggagacgctaggcagtctaggcttcggatgctcggacgacttttgtcgaccttcaacacctcatgatcttgtccatgcatggacattaaggtaccgcccgggacttggacttcattgcagactaggcatccgttcctccttgtcatcggaatttcaaacgatgcatgcattctatctctcggaaaggcaaaaaagcggccatggtacggcctccaccgattttccggatccttctcggaacaggaatgaaagttcatcagggttcaccactaaagtagggtcagatctaatagcttcgtgcggtcattcgccgtgatacggttaaggccaccatgcctattgtgcgaaccattgttttcacaaggaccattatgatgatccagcctcggtgctcaaaaggccttcggggtcccggaagcttttccaagaaattatgccttgctgcatcgggtgcccatactgccggcagtacagtgtttccaatcggaaccaagactctcaatatccatgcttgatgtctccggcccggagctcgagatatgacggtcaatttgctaagtcctagcagggtctcgggtctcgctttgcatcatcctgctcagacggctcacagataaaaagccaggcatggacgtcaattgcttataccaaagggctgtcagtcttcgcccatagattggaattctttgcacatcgtgggcattaatctttaacaacgacacttcctcgccttactacgttgacgactagattgattgcgagcaatcgaggccagacttcaggatttgcttctgatgaactctcgcattggggtgtagagcaaacatgtcgtttctcggatccatctcaccaaacctaccgcggtctcagtcggttgtcagtcacaatctaccacaagcgcatggcctcgacgagaacgacgacatatatcacaatcattccaccaccgcgcaaccaggcgcttccgagaaggacaaaagcgaagatggagaaacgctacacgaaaacgagcctgacggggaagctcgcgtgacattactggctcgacaattgactcgtcactctactaggctgacggcaaagagcactctcgagaacccattctttcttgatgattctgactctactctaaaccccaacagtccaaacttccgagttcgtgactggatgaaaatgttattagaggatccggtctcgcgacccagagagatatccggatcgcacagctggcattgctttcaagaatcttagcgtgcatggcttcggctccccaactgattaccagaaagacgtcatgaatgtgctgcttgaaatcgggacaatagctcgcagactcgctgggatgaagatgccaaagatacagattctccgggatttcgaaggattggttagaagtggtgaaatgcttgttgtcctgggaaggcctggaagcggatgttccacctttctcaagactattgctggtgagatgaatggcatccaagtgtcagatgacgcagtattgaattaccaaggtcagcctccttcgacatcaggatcgttagcgattttatgaattcgcttctaacacctttcatctaggcatttcttccaagaatatgcagaactcgttccgaggcgaagctatctatacagcggagaatgacattcattttccccagctctcagtaggggatactcttatgttttctgccctcgcaagagcaccgcgcaaccgcttggagggcgtgagtcgaaagcaatatgcagagcatatgagggacgtggtgatggctatgcttggtctctcacataccattaatacacgtgttggaaatgacttcattcgtggcgttagtggtggtgaaagaaagcgggttagtatcgcagaggctaccctaagtcaggcgccgcttcagtgctgggataacagcacgagaggacttgatagtgccaatgctttggagttctgcaaaaatctggctcttatgagcaagtataccggctctactgcttgcgtggcaatctaccaagcgtcccagagcgcttacgatgtcttcgacaaggtcactgttctgtatgaagggagacagatctatttcggtaacaccaaagacgcaaaaaagttctttgttgatatgggtttcgagtgccctgagcgtcaaacgacggcagactttctgacatcgcacactagtccagcggaacgcctggtacgccctggatatgaaggccgtgtcccttgcacgcccgacgaattcgcagatgcgtgtgagacaagcgagtcacgtgctcagcttatgcgggagctgatgtaatatgatcgacagtctcccattgggggtccatcctggtatgcagtggtggatgcacgcaagtccatgcaatcgtagcgccagcgcgtgaactctgcgtatccgatctctatatggcagcaagtctccgtatgtgctgttcgtggatttcagcgtctccgtggtgatttcagtctcctgacagcttctttaattggcacctttatgatggcattaattattggatctgtattcttcgatctccctgacgatgcgtccagtttttactaccggggtgctcttctcttctttgcagtgctgttgaatgccttctcgagtgccttagagattttgacactctattcgcaacggccaatagtggaagaacaatcaagatacgcattctatcatccttttgctgaagcagtcgcatcaatgatatgggatactccatacaaactggtcaattcattcacgttcaacgtccccttatacttgatgacatacctgcgtcgcgatgctgcggcctttttcacattctggatattttcggtggtcaccacatttacaatgtgcatgattttccgcactattgcttctacctcccgttcgctatcccaagccctcgtgcccgcagctatgctaattttaggaatggtaatctatactggttttactatccctactcaaaatatgcttggctggcctcgttggatgaactatatcaaccctatcgcctactcgttcgaaagctttatggtcaacgaattcgacggtcggcaattcgaatgttgtgtccattattcccagtggggatgagtacaacaatgtgtctatgcagtaccgcatctgctcaacagttggagcagagtcggggtcaagaattgtggacggcggacaatacctggaactaagctatcaatataccaaaagtcacctatggaggaatatggggattttgattggctttatggtattctttgctttcacctaccttcttggcactgaatatatctctgagcaaaaggccaaaggtgaggtcttactcttccgccgcggtcgtcagccagacctgtcaacaactgaggccgatcccgatgaacctatacaacctagtaatgccccaaagaccgaagaatcggcgccacagaataccgctaggattcaaaggcaaacagcaatttttcattgggaagatgtctgctatgacatcaagatcaaaggccagccaaggaggatcctcgataatgttgacggttgggtcaaaccggcacctgcaccgcgctaatgggtgttccggagcaggaaagacaacgttgctagacgttctggccacaagggtcactatgggtgttgtcctggatcatgcttgttgatg

SEQ ID NO: 5474 - DNA, 4145 bp, Emericella nidulans
gggatgtcatcgcttgagcagagcactttcacctatcacggggccctatattggggctcaactatgttgcttaagcctgtcgaactgctcgtgcgagcgcaaagacccaaaagtatctgctctcgatcattcaagcatagcatctaataataccaagaatccaagaaatgcgaaggataggttgctttggacataggtattggccgtcccactggtcaactcttatctcattccatcatcttcgttgtgcgaagaaccccatgcggcagaagcgccatcccaatgcatttgctgaatccgggtactgagcgatcgagcctatcctttctcttgtgctaaagctcaattcagggtccaagatatggtaaggaattgccgacgtacaaagatctctggtattcattctcttttgacgttataagggaagcttaaaatctctcgctggagttggctacctagtgttcaatagccatcgactgagcgctcaggtaaagtgatgggcttgcaagttacttgtactacagctattaataccccgtttattaagactctgtagtctgcaactgtgagttcctttatctgttgccgaggttattgctaactacatccaccaacacaaatctactcttttctttttcaaagttcttctgcaacaagaatgcttccttttcttctgcgaatttcgaaaggcaagccggtcacgtccgcttcgtggctaagactttgtaaagtcgtgccagagctaagcatcccaagctgatagctcggtgggcgcttacagcaactcacttaattatggccatcagctcctacaaactttctgtgtcggcggatatttcttgccaactgcgctcccgcatgtgggaattttgcgcaaacccataaccttgccgaataacagggctatctactattcaaagcacttctgccacatatacgactatgagcctcggccctcagcttgttgtggcacacactattgacatctaggccgtgcccacacaccttgttcttgatcatttccctgcgatctggaggtacatgcgcggcatgaacttcggcactcacgtttggtcttgttgcaagcaattgagcctctcgctgcgcagctcgtaaagtctctcgagccacgactggcaagccacctgagcctatatagacaggtcccggcggtggacggcgtgaattacaaaaataaggtctagtgagtgagcgagcccttggactgcctcgagggtacatattggtctgctgtgagattttcagactgttaatcaggaaataaagaacatatttatttatcgctagagcctcagttacttgacaaagctgcctccgtccagatcgcatggcgtttctattccttatttaccacagctcaaaccatttacgcatcttgcattggtaagtattataagtttcaagtacacaaggtattgtcaagtcattttgaacagaaattttacggcccccaaatgtcctagcgagacagtaaaccccgttatcttttgctaaagactccaaacgcagattccacatcaaagggctgcttcctatcctcgaacccgcccagatttgaggtcaacctaaatatagcaagttatggagatgcccggccaatcacccgactggaccctgtcctgcatcgcgaatccttcgagaaaaacccacaggaagcactttatttccgccaggcagcagccagcttgcctgagacacgggcagacggaatgacagatgtgcgcgacgctcggcgctgtcaggatgaatgtgcttaacagacactcggccgttcgataagcgagatcccgtaccactctgtaccatcgatattgttcttgtgggactatctccgctcatgggtgcattcctgtactcagccctggaggctgaggctatggtgctccaccaacggagaagcgacaagcgagcgagcctcgcccaaaaatcgctcctggtaggtcagcatttatccttcaatggcagtgctcgaacgcaaatactaccctttgcgggcttggcaactgtcaccatgacattgtctaggattctcggtgaggagcttggaatgccaactggactgctatcagcaatgcctcatgaccgcaaccttcactaccgcaggcatgattaacaggccaattcgtgcttgtcttcgaatcattacagcgtcttttgattaaaaaacacaagtcaatatactttactatggttctccacgtcactttgcagcctccgtagatcgacatgcgtgcgcccgttccatcctccttgccaattgtttggatcaactgtttgggttcccatttgaaagcgagatcccggggtgggttatatactcgaaacccgtctagaaagccagtaatctgtctcttcattgcgggctgcggctgccttgggggctagataactttcgagcgggacgcgggagcttgaatctgatacaacgatgcggtacaagatagcgggttattgttgttgtttgcctgggagtgtctcacgcgtgctgatcttcttcgaagattatctgagtcgagcacatgttcatgtattgacctctagggtaaatggcggttcactgatgtatttgcttccattttttttaagccgaaccagatgtcaataagagccttgcttgttactgagaacaattggacagcgagtgagcgtacgcgtgcgatgttttagccatgcaagcatgctcagcagggagtaatgacatttgcgtactcggccaactgtcctagcttgcgtacgtccgggagtgctgaaattgatattgagactgtaagcaccattctgagggtagcatttcatgaggcggagggatagatactcctataatgaggttaacctgaaagctcgaagcatattccatattcggtatgtcactatcacgtttttcgcgtgatgaaacacgccgagataatccgcggcaatgacgcggcacaaggaccttcacaaagatgaaaagatattgcaattcgccggggatgaaacaatatctgatatgcaagtcatgtcaggtgtattgtgggggatatccagatcgtcgggtttctttcaattaatcgcgatcctgtgtcgatccttgacaaaacaaagacatcatgccattttgaatacaatacgcttccgcaatactgtgtagctagtggtggtagatagcaggatctagattatacatgatgaaacccatcagtggtcccgtctattacggtacggtaggatagtggcaacctgcattgctcgtgcctcgtgatcaagaagacgtttcaacctcaacctcaaccagacccccaccacactctttccactcttccgcctttaatattccctccacctgccgtgttgtactttggccaagatctagaccagcgaccttactgcgatggacctctcgaaaccagtggatcttcaatttaccaagtctcttccgaagattgaagtacgttacttgaccccattccaaaggcagcagcggaagagctaataccaaccggctcaggttcatgcccatctcagtggcagtatcagccgccagtgccttcacgagatatggctccaaaaaaaggctcgcgacccaactctcgaaatagaggacccctgggtggtgatgcccctggggaaggtggacttttctctgaacacgtaggttcttcgatcaaacatagaatgcataaacttgcccctatgacagtgcgatattccagtaatctggctagataaaagaaaagaaaagaaccagaaagctaactcagaagcacaaagtttctttggagtctttaatcaatccatttaccagctggtcaacgaccttgaaagtgttgcatatgctacgacctcagtacttcaggccttcctcgacgacggtgtccgttatcttgagctacgtacaatacctcgcgcgtcgccaaatgctgcattcacccgcgaccaatatctctctactgtgctcgatacaatcgctgaattcaaatcccagaattccggcaagatatcagtatacttgatccttggtatggatcgcggccaacttgtggctgactcgacacacgcacatgagatagtcgacttagccatcgccaatcgagagcgtggcgtgatcggcgtggatgtctgtggtaacccgacaaaaggggata

SEQ ID NO: 5475 - DNA, 10252 bp, Emericella nidulans
tctcctccacacaccaatggatcaaattcgccctatatgcttcgctgactttgaagctagtctcctttctatcagacccagtgttagtaaagagggtctgcgcgcgtatgaggattgggcgaggcagtttggcgagcgagcgggctaggtgctgcatcttctgcctatccgtctctgtcatgtcgttccttttcgctcgggtttgtatttattctgaattgcgctggtactggggttcgggatgcatagacattacggggtttgttggtcaacgggaggatactttgtttgctctgtatcttttcttttggcgtcagatgtggactactaaaacctaacaaaccaaatacctactgtcgtactttattgattacctcttattatgtttttttccggcgtattgccaattggggtctgaggctttactgcatatgctgacagaatccggtaaaggaatgtgagatgagctccgctgcttccacttgctttttcttctcccttcgtgtaagtgggtatgaatgtagtcagacttataaatgacgagaagtcactaagagagtaccagtcatatatgtggtaagcagaaagcgcaactcgaatgtaaacggaagaacggtatatagctacatacaagatgcatgggtaatgataaattcgcacacatatatcatggtcatcgaaagcgaataagaccagtcaaccaacaggctactcgtacgaggcatagccactccacttcaccgcagcttctctcatatcccaatgaatgccatataaccaaactccagaaatcaatgcacactgttgatacgtactctgttacgcatggtcaggtgtatagctggtttcacctagcatcgtctgccccggaaccgacggcgtagctgtttgggttggcggctgattcgggctagaagcgctcgtgccgggatgggcgcgtgccgcaacggcagcctggagtctttggtccaaagccttgagggcgacgctcggcgccgctcggcttcctcgcgcttggccatgcttcggccactgcggttactgaggaggctggggagaccggcttctcctcgtgcgagagcctgctgattccccgaggctatttcttccgctgagaagggggtgcatattttcagcgagacaaggaacgagtagatagtgtcagagaccaagccgattggtggctggattttgtcggggaagaggcacttgaacgcaaatgtctcgcttgcgtcgcccttgattccgacgccgtcggtagacgtgccagtgaggtcgggctgccgtttgtaaaagcggagataagtccagcttgttattagaccgaaccatgccagtgtagccgccacacgggttcctacgataattccgctgagggtattcaggagcagaaagacagccgggaagtgtttcactcgcattttgaccaggcctttgaaaatagtcaccgtgtgttctggaacgagctgcttgaaagcgacgaggaaggaagcttgaatcgagatgccgccgcagatttgtgtcacactggacagagccgagtcagcaggaaatgtgcatgcagttgtacatgcctcatcagaggacgaggacgaagacgagaacaaggcgtacccgctatgcggagtcgaacccgcacccgaacctgagcccgaaccaccactgattgcagcccaaaaaagatagcatggcacgatcacaacgttcggtacaagcgcgatggtgacaatgaacttggtgaactcccgcgaaccccatgcgcgctccaggtacttcccgccatagaaaagcgtcgccaggttcagcagaacggtgaaaatattctgctcgacaaatgttgccgtaaggagcgtccacgggtagaaaatgaactgtgaagggacgagggtcaggtaggggaccgccggagagacggcaggagtgcccggggttgtgtcgagctggcgccatcgagcaatgttgtacaggaacgagagagtgatgagactgatgagacagacacgggtcgctggaggaatgttgattctgagcgccatctttgcggctgcgactgctcgcgaacgcagaccgcaggctgttgggagccgggcctgaaatgtcgtcgaatgcggcaaaggaggcggaggctggctgtgggagcggacaggtcgcggtttggagacgactttccgcaactgatctgatttgcgcgtgatgaatcctttcagattgtacgaaagaaccgtatcaagtcagaattactgcgtcttattcttcctaacagtgaattaatctaacagccagcgcctcggttcgttgtttgggctcttcttcggtataccgagttatgaaatacatatatattgcttagtcattatacggcgcgtgttcacgaagcctctggcttggcacgtgagcgggcagtttcatcccatcgttgggctgatttactatcacataagaacaggactcctctgaactgtgaggtataggacctgggaccaacgcagatactcagctacagtgcagtacaaaaactgactgatgaccgggttatatatcctctatccccgtatcagttgagcggcctcaagaagtcatgaccataaaaaaagtgacattaacgccctctggctagtgcactttgccgatctctggctgcaggccaaccgtgggccagacgccacaaggagagcgccagtccagtgtccacttttctagcccagccgggcctcagctttcaagatcatttcatgtccaaaaaagctcagtctcagagccgcctggagttccctggagtgctagacattcgagaatcaatcccgcctgggtctggctccctgcgctcattcttcgtcccgtgattccatccccaaccgttccatttcccatcctctctcagtccacgactccgtactcttcaactgctcaggctcaaactcccactgcactctctccgtatccggccttctgcagcgggtctgatttgacacacgttggttgctgtgccgtgtcgaaattattctcgatccataatctccttgtccagcttctctttcagctctttgcctttcgaagtgcagagcatgtctaaggctgcttggccctctctttgatcacctgtctcttatcctccccactttgcttagtcctgagctagcccagcatctatcggctatccccagacttgccgcgcttctccttcacttcatatttcttcatcttaaattgtcattccagctattcctatccgtccagctccttttctttttcccgatcacttctccactgtctcctggtttcatcctgcgcacttcgactggcagttttttccaattaggtcaatcgttctcagaccgatttgtcgcataattgcgcctgcgttgcctgtccaactatcccttctgggatgctcttcccactatcccccttcatagctgtcatatgtaacaagcaatggcacacccggctctcacatcacaccacgtcaattacttgatatgaaggtacgttgttccgaagttgaaatgcgtctccgcgttttatgcttgattgtgattgatactgactgctgcttaggtaccttcaagaatcaggttcgtggaacctttctttttctcctgtacccctcattttccagcccggactcgtgcctgtattttattcggcggttatctaacccttctcgcaggccatggcgaggctgctgtgacactccagcgcgcttggaatcgtgatccgcagactctaccttttgctccttatatccgcactcatgcgctcgtctcgctcgtccaaaagggtctgcagtaccacgaacttgagcagtcgctcgacaaggcacgttgattgattatttctatttttctattcttgtcacttctcaaagaccttgtctaatttctaataggagggcaatcctgtccccttggagccatcgaactatttctttggcccgaaaccctttgatccggacgcgctacaaggtccagacgagacaagcgttagcgcagaccaaccgccagcctcaccgacaggcaagattgcgcaggatggggtcttgaccaacggtcattcgaccgctgatgttgccgctccgcagaacgtcaaggcttcccgcaaaggcgatcgcgcggaagccaatggagaagaggtccccatggagatcgaatccacgaacggcgttccgaatgagagcaaaccagatattacaaaatcaccatcagtgggaaaaaccgccatggtggacggcgacggggatgtggacatgggaattccgccggcttcgcaggaccaggaaccaaccgcggcgccgatttttaccctgaccaccggacacagcgttggcgttcagatcacccccgccaaggctgctgatctcagccccaacaccgccattatcgatgtggctggtgatgatcacgtgacaaccacaatctggcggccgcacgaccctactgtagttgtggcagctggtgttaccttttgcagtctgtataagctgtcttcgacctcatcaccggtgcacgaaacgctcgttgaaaacaaaggggacaatgtatgggtctctgcggtagcctgggacccctttggccagaaattggccgtcgctacttataatgacatgcgaggctctattaccatgtacgatgtgaatgggaacgctgtggatctcttgccagaagttccccgaatgatttcaggcttgaaatgggcagatagtggttcacaattgattgtcgtcgcctccgacagcaaaatgtcagaacttgtcctctgggacgactcattacggccggaagtgttccctactcctcagatagttgacgactctattctcgatgttagctggcttgggaccagccaggttttcgcgtgcggaggcatatcggttttccaatgtgacgtcaaatcgagtattcacctctccaagacatattcttctggcgaccccgagcacccttggactttcattcgctgtgcaagcgccggttcattgtctgtggcagttgcagcatcctactctaatgcctcgttttggattccaactcacgacatgcacttgaaagacgtccacgatggccatatcaccgccattcaattgaaacccgaaccgtccgagcagccagatcagccgttgattcttgcctcatcatcaacagatgatacagtaaagctgtggcacatagatttacaaaatcagaagttcaactgcatacaccgtttgtcactcggtcagtcgttaccaatcctttctagctgtttctcgcccgatggatacgctctggccgccgccagcaaggactctttatcaatatggaatgctcagcgtggaggtactgccatggctacgtggaagtccccgagcgctgacaacaccgagtccggggaaggggaagctcctgttgtcaatggacgcaatggaaacatggaggacgcgctggattgctcgctaaactgggacactgacgggaagaagttagcatttgggtttggcaataaggtatgtatcatcctatcccttggttttgcaggaaactgatggaattcgcagctggcgattataaacctacaacggtgacgtgcacataaacatgcagacaaacaaatcaagagcagcaacataagcaataatcccggcaggcgaccttccatcttcggcccataacggtcgaaacggacattgcattcattgttgggccagaaagcattatctcagaagcgagagcaagtgctcgccctcgaggcggatcatttcactgaacactgatgatctcttccgccggtctaaacctatccgtctagtcggtttagcgaagagacatggggcgaaccatatgattcggagggcatatccctacttatctgttatccacattttatgattacatatgcatctcaatgtctgtttgggttagacgatacaaaaggcgcagacttcttggaatcaggcgaaaggcgcggttgcggatagcatatggacgggacacgggtggataaatctgagttgatttttatcttttattctatagcttctatgggaggcacggtcaatgatattcaggaggtgcaatatcacaccacatttggcatatccgcgctcgtctgtttttgaaccatatatgaaaccatggaaagcagcttccttggttactagtcgttagtcgaagactccctttgtatattcgttatatcttgtctttgcttgttcttcccaatccttctttgcctgcgggctgtctcgccattgcggaattcttcttcgacatcagcaaagcctcgcatccaagctgtgataccgtcaaaaagtgcatccacgtcaaaatcacccggctggcaaactttctgcttcgaccaccaccctcgacccttctgtcttggggtctctgctggtttcttcttgtgggccaactgatactcctcctgataccgttcaatccatgtttcaaacccacgaacggtgccctggagtgcttctcgctcggccatttcctgctgcatatctgcctggctatagtagataatatattagtcctgaccggcggcaagatggcaaagatccacgttgacatacagctcttcaatttcggcctctagttcggctatcctacatcgcatccgttttcgttccttgtcatggagcgaatatatatagaatgtctcctcgcggcgtttcaagaaagcatcgctcaacctttgcatttcctcgtcgaattccttcaccagattgtagacttttggcgtctcgaacagcgtccgcgccggctgcgtcagctgcgccgtcgaaagctcccctagagaacgcgcatgggaatgagccattgaattagaagaagcggccgggcctcttagaccatccggtctcctcgacgcgccagggtcaggaccaggatcggatccgggactacgaccacgctgattttgtgtttgttggtttgaggcgactccttgcgtcatatttaactgtacatttgagcgtggattaagcagaaattctagctgattgaggcactggtttatactttgcgcctcggcggagaagcggttggcatgacttcctcgaagagttgaaaggcgcgcgagttgagtaaggcgatttgagatattgttggggcttagaggcccttcctcatccagtggtacagctctgttgtccacggtaaggggatttgggatatctttggagcttgacgcttctgcgtcgtctgccaatacagctttgttggttgttgtgctgagacttgggagctggtctggtgtaggattaggatccattatgttgggccgatagcgctgtgtatagttagtgtctgtttgatgaaacctggctttgggatcctacatggatagagaagataaagtattgaagaatatagggcttataattatacaagcaaacgcgccattgatgacttattgagaaaataagtctttgaagctgtctaagtgaaagtcacgaggcctcaatggcttgggagctccttcctctagaatttctctgaaacggaggattatattcttgaaggagggtttcttcactagccgccgagccgtatatgttttcctactccattggttgtcttgctatggcaagttttgttatcagtgcttttatccaagcggcggtcagcagaggagaaagtaggtacggagtatgacattgttactcgcgaatcaatattcccaaatcaccgctgccacaactctttttacctccgtaaaaataaatcttgctgcagattgttcgctccagcattttggtgcccgttagcagattggtgaggttggcttgccagcagtgtctgatccatagagttgctgcttatactgactcacctccgctcctccgctaaatttcatttctttacaatccccgcacacgcgacagaaagttgactgtcgcacctgtcgcacttgtcgcatttattgggtgtcaatcaggatggcgcctcctgtgagcctcttcctttctagccaaattttgccccttgtccataccagctctgcgccgaagccctcgaataggtactgacattgtctctgactcagatcaccattgtgccgtctctcgagaccgccaaagctgcgatcagccagtcgaaaaactcgcggttccctcctaacctccttccacttacgtcgtctatctcggccgatcttttgacgcccacgcttgcttatttgaggcttgctgaaaagtgacttgccgcccttgataacggttgtagtgttggaggaggctaaccttaacaacatcgcaacagttcgaaattgtcatttctttatgagagtgccgcgacaacagaaacgattgggaggtacagctttgttggtgcaggtatgtgatgtgcgcggtgttcatggaattctggactgggctaacgtgctctcatacaacatagacccccacaccgttcttaagacaggacctggtcatggccctgaaagcgatccgctcccgattctcgaagagaaactgttcatcttccgtgtcgcgtccgtgcccggactgaccctgcctccgcttaccggtggtgctattgggtacgtggggtacgactgcgtcaaatactttgagcccaagactgcgcgtccgcttaaggatatcctcggcattccggagtcgctttttatgctgttcaacaccattgtggccttcgatcatttctaccaggttgtcaaggtcgtcacatacatcccaattaccgataacgacgcggaactcgacgccaactacaagcatggacaggcggtcatccagcgcatcatcgatactcttcagcgtccggatactcctttaccccctcagggcccgattatccaaaatcaggagtacacctccaacatcggacgcgaagggtacgaaggacacgtcgtgaaactaaaggaacacattgccaagggtgacatcttccaaaccgtgccgtcgcagcgtctttcccgcccaacgtcgcttcatccattcaacctcttccgccatctccgcaccgtcaatccctctccttacctcttctacatcgactgcgaggatttccagctagtcggagccagcccagagcttctggcaaaggaggaaaagggccgcatcatcacacaccctattgccggaacggtgaagcgtggcaagactgctgaagaagatgaagcgctcgctgaggaactacggtctagcctgaaggatcgcgcagagcacgtcatgttggtggacctagcgcgcaacgatgtcaaccgcgtctgtgacccactgaccacgcaagtcgatcgactgatggtcgttgagaagttctcccatgtccagcacctggtatcacaagtctccggtgttttgcgtcctgaaaagacccgctttgatgccttccgctccatcttcccggcaggcacagtctctggagcaccaaaagtccgagccatgcagttaattgcagaactggagggtgagaaacgaggagtctacgctggtgcagtcggctacttcggatacaacatagcctcggccgacggatctaaggagattcctggtgcaatggacacctgtattgctttgcgtaccatgctggtgaaggacggcgtggcgtatctgcaagcaggtggtggtattgtgtttgattcagacccttacgatgagtatgtggagacactgaacaaactgggtgcgaacatcgcctgtatcaagggagcggaggaaaagtatctcagcatggaggcgaaaagctagagtatttggttaccatgatagattggatatgaatgacggcttattagaatatgacatgctttatttggttactccatagttgaccaggaacgttttgtatagcttcgatcgacgtcatcaagtgcagtgcaccgccacaccaggacgaacaccatgccaggtggaaagcaaacgttgcgcagggtattgcacccttaccgcagccaagaagatattgctgatggtaagagcaaaatcagagtacttaagcgactccgtgatgtacttaaactggatagcaactctcggcatcgtcagccgttaggcattaacattcaaaacccctctcaacagcgtacccctccattgtctattacccttgacgattactgattgtttcaatcagcttccatcgtctccgcgcctggagcaaaaatctacctctcttgtggtggtctttgtatgctggcaatatcttgggcaaccttgtctttggaagcgtcgtcagccttgcgccactcccacaccaaatttgactcttgatgaagaaccagccctcgacgtctttcacgacgtctt

SEQ ID NO: 5476 - DNA, 10012 bp, Emericella nidulans
ccattggtgccattgtgctaagatagagtcagactttgttggccatactggggcttagaaaagaggccaagcaactcacggctcacttcgacgtcgccataatgggttctaggaggaggcttgagtatccgtcggtaacggcctgcattcagtctgtccctgaattcccagtatgtatttcccgcgagatcatgccctggcaaatgacggacgatgttagtcttgtgttgttgctaggaggcgaggacgaatcgcgaacataccgacgaggaaggatcttcgccagggtaatcggaggctcttccacttgaaccacagactattaatcggactcatctgtctgcgggagaccgggtgcaagattgaacgaaggctttgcaactaggcagtcggattgtactggctggttggagatgaagatattcggggaattctgctgcgccgcaatgaaacgtcatcggcggaggttttgcatacccgtacggtaaataacggcccaacaggcattccatctcccgccctggaccctcgacctccctcccctctagtcctccctaaagatttcagttcattccgttcttgaagtatcttttctgctggctttcttgacaagagcagtccttgtgctcctgtccgtcagccgctgactcgtgctcccccttttacgtcattcggtgtccccttgtcaacactaaagttgcgactagaccactcccttgacgcctggggatagacagctggcgtttacagatatctacatccatgtacgaaaggggctgttgaggatttgcatgactaatattctaagaatggcctctgtcacatccttggacaaggacctgcgcaacctgcgcctgtcccgctataccccgcaagcggcggccgaagttcgctcatggatcgaagaagtgttgcgcgagaagctagcacccggtgatcttctcgaggcactcaaagatggtgtcgcgctttgcaagtaagcgaagagaacttctttcggacactgactactgcgaggcttggttgctgacaattgcccgattcagactcctcaatcttgccgtctcccccggtgtaaaatataaacaatcttcgatgccgttcgtccagatggaaaacatatcacattttcttcgcgcttgtcaactgccccctcttagccttccgccccacgatgttttcctcaccgtcgatctctatgaggctaaggatcccgcgcaagtccttcaatgtatatcagcctttagccgcagggcaaattcgatccagcccggtaaatttccgcgcgcaattggagtacaaagcaaggccggcactctgagcccgtccttaaccggttccagtcagggccctcatacgcctacaaagaaccgaggatttagtgatgccaactctagcgcctctggccgctccagtcccgcacggtccccccaacctgtcagcagttggagcaagaaatcggaccagtttgtcacacagccagcttggaatatccaccagtatggatacatgggaggtgcaagtcaagccaatcaaggtgtcgcatttggtgcccgtcgacagattactaccgctgcaccgcatgtgccaagtttagcggaaaaagagaagcgcaaacgtgaagaagaagaaagactacagctcgaacaagaagaggctgcacgaattcaccaacagcagcgtgaagcagaggaagctcgagcgcgagaggaggaagagcgccgatgggcggaagagacggcccgactgagagaaaaggaacggcgagaggttgaggaggagcggaaacggtgggatgaagaacaacggcggtgggagcaggaggaacaacaacgtctgcgagaagagaaagaggcagaggagaggctggaaaaggagagacaacggcgacgggatacgagtgatgtccgtctaaccggtcagtttcttagccaataccgagcaagtgaagccgctcccacacaaactgcatctagcgaatcgcaggaaagccaacgcattagggagttggaacaacaattagagcaggcgaaagagagagagcgcgaatatgaacgtgaacgacaggcactcaaggagaaagaaaacaaacccgccgaggccaagcgacctgtcccagtaccgcccaaaccaagttatgatctctcatctctcgagcaagaacggcgtcttctccgcggcgaatgggagcggcaccaggattcaaagccagctgcggaagtgcagacacccccgcccatgccccctcgacgacctctgcctgaccctactactgcccagccgccaaagatccagacatcagagagtcgagtcgatcgcttcttgtcatcaaacccggcgcccgtggctcccaagcccgccactcatcgcttccaagattacactactacatccgaggtcgacgctgaaaacagccgccgcatcgcatctcagcagaagacccgcgcaggcgggtgggcctcgaaatccctcttagagcgggaaatggagcgcgacggcgagcgccagagggaatgggaagagaaccagaagcagactcaggaagctgcggctagaggcgcgaaggacccaacactcactgcgggacccggcggcgcttgggacgtacaccagtatggcttcatgggtggtgataaccagaaccgaggcggccctggattaggcgttggaggagcaaggcggcagattatcgggcctcgaccacctccataatttgatttgtcttgtttcgaactgttggcttgtttgtggctggatatttgtcctgtgttgctttgatccccctcattcccccttcgtatttatcaattagagatattgtttgagagcacaaagcttactgctagtacttctcttgtaaggtctttagaattctctttctcatatttgtcaatgccatagatgctcccggagcatcctcttgccctaagttggacatcctatttacataataatactttaatgagctctatgccccagatccactagcaggtactacgcaagcgctcttgaccgaaacccataacctgggaactgagacgttctcgtttcaataacacaaaaatcaagggggtatctatagactaatagacaaggaacatgacgcacggcatggatggtaaactctcttgccaacaagacaacaatcgcaatgccatgcaatgtttaaaccaggtatatcaaacccattcaaagaaatagaaggcgctcaagtggcatacatagtaaggaaaaaaaaaaaaaaaaaaagacgatgtctatatgccctccgcagtcaggtagacggaatcacatcttcaaccagaaatgtcagtctctctgcactttcgaccaaccaactcgtttcctggtcatcgaccatcttagcggcttggttcttcctcgtctcctgctgagccttctccgcgcgttttatgatgcccaattcggtcagccgctttgtctcatccgtaacttcaatcatatcgctatccgcaagcaaaattagcagagcttcgagggtgatggacatcttagcattgtcagagagagacgccgttgcggcggcataggggaggaagcattcttctagtttagcctgactaaggtattcctccttcgagtcgggcgcggaggactcacgaaggcggtacaggagaaattcacagagggttgaatgcgctgcgggggagaagttgggaagggcaagcggggagacaaaggcctggtagattgctagggggagaggccggatattttcgacgaagagctggtagaggtttgagaggtccataaagcttgctggaaggaattgggagactgtggatagtaggtggcaaaggcgttggcggagggcgagtgaggaaatgtcgccgaggagcgaggatgcgagtgttgggtctggcgtcgcggagttaggagctcgatcaagagtggctgtgccaacatccttcccggtcctggcggctctgcgtgggcgttttgatccgtgaccggaggaactgccctcgtcctcgtggtcggttgagaggtagaaatcgccatattcttctgcctcgatgtccaccgctgctcctctcttccttgtgtccttctccttgttggtcttcttctgtgatagcttcagctccctatggaagacttcacggaattcattgaccgctgacgttccaccgtcagcgaaaatggcgcgcaggatccgacggtcgcgccggagccggcagtagaagtattgatgtagttgattatcatgctatctttcaaaatctggtcgtcgtgcgaggggtcctcttcatgtcttcgctggcgttcatcccagtcagcctccaagacttcgcacataaactccagccagatgcgccagtacttccaccgcgctggatgcaaaacagcgcagttaaaagcccatcctacggcgtgccaaaagtcctccgcgcgcgaccagaccgaggccgactgtgccatatcgatattgatgtccttgtctaggttccgatccctctcgttattggtcaccgaattttctgcagcacggtctacatggcgccttccaccatggcgagatctctcaaagtgcttgaatctgaaagccttgctgaacttgccatttatgggcccgacatgattgttcaccaggcgcagcagacggagagatacgcttggcgcttcctgctcttcagttgtctttggacgcgcggtggtggagggatgaaccagaatcgtggcggcaagtgcgagatgctcttgagatggaatgaaaatcggcgtagacgcgttagggtgagagctaagggcgttcaagagtagattgagcgcctgggtgtctgagcgaaacgttaattagtatatcgcgacgcgaagacgcgcgggagggcccttacggagattctcctcgaaaaagatacctacatgttgaaccaactcaaaagggaggggtttcgcagggtgacagggaggcagaggggcctcttcatctagagcagtcatcggcgggagtcaagaggttcgacggagttgtgttggatgaagttggtgagagcctgttacatgcgcaccaaatgaattacctaaagtcacattattttagtgcattatcaatcttaacttgagatgaatatatcgatacatcaaggtgctgtagtgtagtggtgatcataattcgttgtggccgaattgacctgggttcgattcccagcagcgccaagtgcgttgacttgattgtatcattttttttacttttcattaaaacagccctcaaaagaaaccctattcacttttttgtcaattgctctcaacggactaccacggagtatgttgacattttgcatagtgcaatcgcttcttctctgagacttaaaaatggtcgtcactccattactcaatcatagttgagccactttgagatgcaagtgagcctgcagtcagactgccgagtgaatgatgattagatcagccctgtgacacagacagcgcacacacctaagtaaagtacagctataaagaagcagcaggaagattgtcttgggaagaatagtgggatatctgtaataaatatctgtcctgtataagccctcgccaaacaccgtctatccccaattcttttgcgtcgtttctggttctgcgggtggctttttgcccgtgtcgcaggggatctgatgcctaatctcagaatcatactctttccccgcgcccagaataaaagaggtggagaatagactccgcccaaatctgccagcagtatggctcctgaacaggtaggtattaaagttatgacaaaagtagagaatagtagagagtagtagagagtaaaggaaagaataaaacacaacggaaaggataatttggcgggaaagtagtaaggtctgtaggagaaaacattggatagagaagaggaagccgttccgctactcttccggtatgtcggagaagagacctatccgtaatcggtgcgactgtactccgggttagcccagcccgcgccatccgtttggaatggtgtaggggatacatacgaagggtaacttgggaaggaccactcccaaggtagctaggaaattgatgacaaagtaagtcaggtcgtagtgggtgtaatgtgtactgagaaggaaaaggcagattggcacgcaaagcaggaatttcttcgccggagtatattggtccccattgtcgatttgctcccacatgttaaggttgtcataggcgcccgcgttgaattcgaagggaataccccgcacccagtggaacatgaggaaggaaccgaacatgtagctgatgttggtgagggtccatgatgtctcttgcgaaacgccggggaggatatcgtagaagatcttcaaggccgcaatcaagacgaaatggatagtccaagcacctgtaacgatatgtgagcattagttggtgcttgcttgatttgattctgagcagggcccaatagcagcgcaatggtagcccacgcaatcactcacccttagcattaacccagttcgcattcaggtttgggagggccgcctggtcgctggtgtgctcaatggactcgggaggctcctggtagatgatactgctcgacctcctccgcctgccagccttgctctgggacatgttatgatctggtgctagccggtgtggtcctgtgtcaacctccggtgggaaggagatagcacggggcatcagtaaggacgacactttggcggtgttcgatcggtgaaaagaggtactcgtaagcaaaggcgtaaagaaaggagagataagaagcaaagaaaagaaagatttcaaaagcgaccgagggtgacgaagctggggagggatgatagagttaatgatgccagtaacagcgaacaatggcggcacggaagaactggagatattccgaccgatcggctggtcacgggatgcccagtacctatcgaaagtccaaccgtacgaataatgcctctcaactctcgatgacacgacgttgttcaggattttgttgcgtggcgtcgaaactactcttgacttagtttcggaggaaattttctagaagtcacagagaaaaatcaggccagattttcaaaattgaataggaggaagataggacatgtctaataatagccgtcagaaaggaatccaagagcgaaataatacgactatatggattgtttacattattattgtgtccagactccagaatgcaggcagtctcacgttctaggccttgacgctccattaatagttgatttctagaatgtccaaaaatatccattccaaacggcatctacagttaaaggccactgtgactttaatcaatctcaagagtcggggttcgcttattactgtagggtactagagtatgttctgtggctttacgaagctggaattcccgtgctgacttgtactgctgtcaatctatctgaggaccattattcttggcttttctcctactgatacaagcaaatgcgtcgacacgtaccatatcgacgccggccgtcctcggctaaacccagcacttgaacccttgattgaatacacgaagttttgcatatccatcgagctccgttcggctcatataaccactataatagagctctttcttctaacgaggagctagttaccgcaacctcattgtatagtataaggttaccgtgatgacgtaaaagagagatttccgcaaattttacaatatctgatttggaaacaagtacgacatcactacatctcatcagaaaaacgaaccgaaagataactcgacaaaagcattaatgcgcctcctcaagggtcccctccgcatcgtatcgcccatcagtcccctcggtctcacccgattgcccgctgtccgtccccaactcctccctcctccgacacacgcaacaaaagttgtcctcaaatccgccccactcatcccatttctgagctccctcttcagttcaaattcccgagccgaatctcagaagcaaaacagtgaaatggcgccgcctccggtcaacaagagtgaggatgagtggcgcgctgttttgagcccaggtaagcaggcttgccccgcacattcgaagagcccgccttgggccatggccgctggttgctccattgaaatggaaagtgaaacaactgacggctggacagagcagttccgcatccttcgtgaaaagggcaccgagcggcccggcacaggcgaatatgattcccactacccctccaaaggcgtgtatacctgcgcgggctgccacgcaccgctatacaaagcgagtcacaagttcaagtccgggtgcggatggcccgcgtactttgattcaattcccggagcagttcagagacacgtggataactcgtttgggatggagaggacggagatcacttgtacgaactgcgggggtcatctggggcatgtcttcaaaggagaaggatacccgacgccaacggatgagagacattgtgtgaacagtattagtctgaagtttacagaaaatgaggagggcgaaggtgcgaaggctaaagcgtgatacggttcaagattgtatatatttgtgatatttatgaattacggcacatactttaaaggttggggttgacttccatacgggataatacggaccatatggcagcgttctccctctttgaaatctggaacagcggagtgagcgactgttctctgatcccaggcaacaaccgtccttttctcccaagaaactcgacacgaaacgtccactgaccggatatcatgcaagaagcccagcagcaggtccgactcactcggcttatactcgacgacctgagagcgattgtcggattcacgaacacgaccggctccttcgtcactgttgtgatattaccagcgggtgctctgtcctgaccgcccccttgagagctcgctcttgccctaatcccgcgatttccccaacactggcactggtgtgtaaaagctttagacggtgggggctttcgcgaaatgccggggagagggcagtctacgctgctgtcaacgaagtgaaggctgtatctcccccgcctgatgcgggaacttcaaggacccggaagaacgtcaggccaggtgtatttggggtgaaggtttgtccgatatgccacaagttgttcgtgagcccaggagatggcggagattgcctctatgtgctgttagtatcgtccccgggtgccgaaaaagttaggtcagacttacactttttcgtcactgtagacgacctggagtcctggcccagtaccctttggatatcccatggtcgggtgctatcgttacgttagccgccgctaaagatcggacgaactggccgtgccttgtgcagcggaccaaaatgtctcgcaatagccaattgcctctctggccctatatcggcgaagtcctggtccctctttgtatggtcaactccacagtaatggcagaaggtatatgagccacgcggccattattgacttacaagtacaaggacacatcgttgagccgccctgccaggagggctacctggcccaagcctgccggcgtcagctgaaggcccgatatctccgttccaacgcgcggtatgatgttcttgagaatagcttttggcgagaggagctccggtagagctgggtctgctcgcaggccaggctcttccacaacaaagggtgggatgtccagtgctgaggtgaagccttcacgccgtacgaggaggtactcggggtatagagactctgtagccatgatggcgatatgggtaccgtttgtatttggagatatggtaagtcaagctcctgttcagagctatagaggtttcacgagtataatagtgacaccagtgacgacttaaagaagcttgcagcagtgattctgaaattgtctcatcccggccagggaaggcgtcacccttaccattattccgcatacgacggtttttctcggacacacgccgacttcagcaagcaacaatgctgcgtatctactcatttgttacgtgctttttgtctgcaacgttgattgggacccaccttacggtcaaacaaaagaacattatgtactgtcacaggatggggcgagcacgccatagaagggtccctaaaaatatcgtcg

SEQ ID NO: 5477 - DNA, 4711 bp, Emericella nidulans
ttcgctttggtcttaagagagagattacaggttggcggaaaatatgcgcccaggaggcgcaaaagctctacaactcttccttgtctggagcatagaacgatctagccacaacatatcatacgaagcggtgcaacttaccggcagtgatatctcggtgagattacgtgcttcagtgcttagccctggcttttaattgggcggaggccaatactgaggccgaggagttgcgtaagatagcataaaccataggaaaccatccaggcttcaaaagtccaagcaccccatagggtgcccgagatttgcgtagcctacaagagctctattggccagtcagaatgagagtaaacgaaacgtggtgatcacaaccaaggagtcctaattatacctaagttcttgtgtcaagtgaagatgcactcgccccttccgccgaaagtttttcactgctgattcgtctcacctcagtgtcacccgacccttattagtattttttacctgaatagctccatcaggactgacgcggaggtgggatgacatagttctacgtgccccatactggaataacctcacaataatgacctctgataactaccaagcctgatagatcgtgcaattaaggtaagcaaccacctcgtgttccgttactggaacaactcatcgtcaatctagtctcaccgggactgtcttggctgagttttagcatctttccagatcgctggctcagatgctgagccttcacccgtatttcgtgcaagcaaccgacatgcgcgctataacgggctatgtgtacgctagggcatggttcacagtgaaagaaatcctaaggcacatgctatgctcatcgatcaagcgcgaccgacacattctcatcagttcctgggctcccgttttgaatgttggtttcccctaaattgataaaggtactacttctctcctgccaatctcaagggtctttgctctttgctgaccatacgagacagggtggaactggtgaatctatttcggcaggcttcggctctggagtcgtctacggcaccgatgatgacgatcattatacggtacacagagcagaaagagtaaagaagggtgtaagagttgatccaaaaatggcatcgaccatacaacaacgttatgaatatatcaatattgtacgacgtttaccaagtgtaaggccttcattggcttcacagccctgggcatttcccagacctctacgagttccggacgggaacattagctacctcgattgctgggggagataagataaattagaataaataaaagagcaaagaacaagatggtcttctcttttctttccagtggcgactggtctatcttggcactcgtcagccgtcattatgatgccaggagggaaactatagtatatgcacgccatttgtcctcttatctcgaataattcatacttactgtacctgctttggctcgtttgaaatagatcttcgcctctgtttttctttttggctagcaatatgtctgacttttggctaaccgaccatatccgacatctcgtggtgcaacccgcagatgcccgcctaaatccaccagaagcctatcttttcgtgcaggatggactcattatctcctgtgggatactatatgcccttacctatgtgttctgtatgatgcgcgctgttaaagatcgggttttgcctggctcgatcaaatacctgtacgcttgttatctctgagtttttgtcccatggatgactgatcgcttaattcaggtctctgacattggcgtacgaattatactacgccttcgcgactacctcaacccgaaccgagaggatctgtttcctagtatggttccagctcgaccttattttcgtcgggcttgctctttggcgcgtttacgaccacgatcagtggcgacgggttgctgcggagatggtcgtctatttcgtaacagcgtgcggactgttcaggtatctgggctatatctatcccgacgaccgcgagcaagtcacggcatattggacaggaatactcttacagctcccggttggctggacctacgtgtatcggctgttgaaggatcggtctgtcctgggccattctcttgagatctggtaggtggattgaactcctagtcctaaattcttccacctgttctataacaccactatctgttgttccagacttgtgcgctatgtcgattgtttcacagcttacggtgtctccatctgccgttatatcaaagcccttcagcactgcgagcatgtgcaacccgtatagctcattccgattatgtgcgcggtcccatctcccagcgccacgtggacggacggatagacgtcggagtcagcattagattccagtctataagttgggctggggtagggtagatactacaagtatgttcgtcaggtttggttggaggtgttgctgtttagagaatttgaagggccatatctagtagaagcttgcactgaataaggttaagtatattaagaggccatgttccatgatggtctaatatggctcttcgtctcccacattcagaagaactaacagttaggcctatttccaaataaggccgcactgacatgctcaggttgccttggtttagaagacaacaagcattatgcatgaaaacagtaaatctgtcccttgacctatcaaaggttaacctataagcaattaaatacccatgcagaaagcagtatagaagagtcacctggaagctataggatgatggtaggggactgtcgatacagttatgttcggggagacttttctacgaacaaaatgtggccatgaggttaccagactaccagtccgaattattcggacaatggctcttgcatctaattcacctttaacgaagacggtaagcaaaaaggtaaaataaaaaaaatcaccctaagggaagatcaactacttttccatattgtagcctgcagagtcctaaagtccaactccagccacctactggttttgcatccctggtgattttggagcagctctagcggacatatgcgctaatttcccctagaagcgtatcatggcggatatttggcatacccagcatcttgaggtgtgaaacaagcacaagcactccaagggcggatacgggagggtgggcgatatcgctgtttgagaccgtgtcccgacatgactacctctcttacagttcccaccaccaaaggcgatgtcaccgtataacctatagtttctaggtcgcaaccagaaccacggcgaacggcttcggtggctgaggggaagtagtctgcgtccgcggtgcaacgagcttcttcccccgtcagctgggcccagtcctgagtgagaacaagtccagaatgcgcgtgaattgatattaatgaggacaaggcgggagataatcgccgctgcgggagggccagcgctgagaagggcatagagagaacttgtagaggattccaatatttcatttactaaagagacgttgtgacttcagatttgtggcgtaaaaagggcacaagtgttggattgtttgacgttcaatatacgctaatttgtagcacataagccctccaggtatagatagtagaggcggaaaatagagtcattctgaccaaggagggaaattcaacacgctgacccgggaacttccccggtcgcggggttttatgggcattgactgaagagctcggtactcactgcataggcccaatgtaggatggtgggtgcccctcaggattcgttgttcctaaataaccgactgtcaatcgcggtaaaaaacatacatcaacaaaggacgctcgatttcccaacacatattgaatggtctctctgaccatacctgggccagaactactgacagacttacattcgcagacaatggtcaccaaaggaggtatatcctgggacatcaatgttagggcacgtcctcgacatctcccgggttcacttgtaacaactaacccaatcaggaatattatgatccagctaggctttataatcatctgtaccttgccttgccgtgtgatcggccttctcgaagttcgaaactgagatttcccggtggaggttatctcgaattcactgatataagaataagaaacagttcaaagacagtgaaaggtactatcttattccgttacagtgacagccgtgtctagatgagaataacaactgtgttgcaaccatagaccccgtagagagttctctctgcctccgcaacggtgatatacggactaggagagatacttgaacgccatactgattatcccgtgaagctgctgacagcagactagaacaaatgagaaggagaaaactgtgtctcctggagccttgacagcaatactggagtaaacaaggatagtaacagcggtggtaaaatcagggagcgggtaagctaccggaggttaaataggtcattctggccgagatcttgcagtgcgagaggccgccggttatatctggaagccatcgcggaacaacccgcggacctggtccgacgaacagccagatctgggaatgtcgcatctacttgaaaagggtttaaagccacgaaagtcaatagatgcaaaattgatgacagaccaagaggtgcgcgggagtggtcagtagcttgtcgcttaggaactgttatccaggttacccaaactattatcctggccaaggaaattgaacagctctattcactaggctttgagcatccatgttgacaatggtgaatgcctgtacgcacgacttggtcgctgccttcaag

SEQ ID NO: 5478 - DNA, 10975 bp, Emericella nidulans
caatacttgtgaatgcagcgacgtataccctcttgcttttgcagtaccgtgcgggggatgtttcaaatttgcaatgttgaaagctatctttttgcgcctgtattcggtcgcatggcatgccaggtatggttacataggccaagttgcagccgcttgaaaggcaattatgatgacaaggagacagtctggacgatccagacttgaatataatgtctctaaatttgcaagagggtggacggcctggcggccgaagttggtgcgtaatactgctagggatttgccaaaacttgagctttacgcgggctctccacgacttccaactgctagcgtgcttttagagcagtcttagctgtgcttctttagtcttggctgtgagtttggccgcgtgcaatggttcttttagccaaaaggtaatgtccctgattgccaatgacaccacatttcttgggttcatcagactctggagttcatcttctgaaggcttacttggttcccttggttcttttttcttcctataaagcactacgagctccgtaagaaagccggaaagcatgaggcagagcttcgtggttgattatggagacgcgcccgaagccttaagtcacgaatcttatgcggacggcatactctgggttattgttgagtccctcaatacaggaacagattcatagcatacgccttacccgagaagcaattataactgaccataccagagtctgacctattgcttagaaaagattgcttagaaaagtagcggcgcaagccttggtgactccttggcctccatctgcagccagtgagtggctttgtccacctcggcgtcgttctccatgtacatcaagtaatgtcttcccgagacgcgtcagggttctcgtgtacaataccacaatattccagaagcatctgttcggtccagcattgatgtacaatttctgccgccgcgatatgagacgtccgggatgagtctgtgcgaaggggatccgttgtcagatcgaaggagctatgcacccagctcaactcaaactagccgtcgttgggttcgggttctggttgggagaaagtgttgacgtttacgtatgcagtctttttaatgattcttggccaaagaaaggagtattatttcgcccatgtatataccagtcaacaaatggacactgggtaaccttgcccatttagcggacgtgtgcgctaataatatcccttcagtatggttcatgcagcgtagctcactatgttagagaatgggaagatcagacgaacagctctttcacggtcggttatggagagactttatcaggcctccgtgtttgtcggtaaccctgtcaataaagagagcgagttccgaatacatctgcttcagatctcacattcaaagacgaccctcaagacaaccgcaccaaacgcaatcatgcctaccacgacatcaagaccaataatctctgtgacactccaaggcacgaatgccaactgactctctggtcgcgtctgcgatggcctaaaatatccagccgatgctatcgccaggaatgccacaacccaaataaacccaatagcctttttccatagctctggctcctgaggagctttctgagagccatataattgtttccagacagcttggacgccatcttcaatcatgtatccaatagtgaaagacaagaaaaaagtcatagcaccggagtcgcgtatagggacattcataacaacgtcatttgtgatgtgtagaatacccgagaggaagaagaccagaaacacgttggtgtagcgttctagtattgatggtttagggagactgagtaccttacaggtaacaaagttgctcacagctgtgaaatctactcgtagaatctgatgccagaattttctgtcagaatgcgtcagtatagcactaattataactataaacgggcgttcatgtagggacttacccccagaagtttcgtaatgtgtacgcgtcagtcatcttattgaatagcggtgggaacgattccggcgacgaaagtcccagagccacagagatagtggacaacaagcgataatagaaactgatcagaattcgtgataaaacaaaccaagccaccaaagcggcgatgacgttctcgatccagacttccacccataagttgtcggtgggttgagaatagtggaccgttgctttttcctttttctccagagctgatttggcggcttgtaaagccaatacatctagagccaaatattgccacgctgcaattgcagattctcggatcaagaagcggcctcgtgggatagttgtcgggctgcttttcgtatagtattttgggacaggaggcgtattttttgcttccctaggtgtattgagcttccgtggattacccataagccctatggcacttcgaagacgggagaaatggctctgaatcttcccatcagcgtcgacaaaatcccccgcacatttggggttaattaatagaacatcgagagctgtaatgatgtgcatccaaccaccagcggcgaatgtgaccgccaaatacgacggcttttcgacagggtacagcatcaaactccagacccaaatcatacacgggatggacacatagcgcaagattgagccctttggtgtcgcaatcacaacaacagggggaatcagggtttgcgtggcggtcagaaaggacagcctagacactgtttgatattcagtcatggctgcaatgaaccgattgcaaaaggaggagttccactgcaccaggtacagtaaaaccgggaacttttgtgcttataaaccttcgttcctgtttagcgagcttacgccaaggagttctagtccgaaagagcccatacggaggaactatattccaggtagacctaacccgcggttacggtttaccggtaacggatctacccaaaaatctgcaacgaatcgagtatgggcacatggcctggaccgggggtcaggtacgggtccagaccataaactcccgcgggtttctgggtacccgtgggatgtcaaccaaaacaaacatgctgtatgaagctagaaaaagaattaatcagcaagccgatacattgattagagcctagtatagactcacctgtgtactcacctaatatagaagttttatgcaaactgggttcttggcgggtagcccgcaggttacccgacgatatcgaaaagggggtgtcatgcgagcatcttgacctaccccacgtgatataagcggcctaatctatgacccctgatctgacccctttaccgtatgtattgaatcgagagagattgaagaggacatccaccgtcattgaaatatagaatcaaccgtaatacggcgtccgactctcaatagactacgttcgttaagttaatactgtttccttctgccctttcctcattgagcgtccactacaccccaagcccgcgcggtttttccggttttgtcacggtctaatttcaagatcttttacgattgcccagttattcgctccggaataggtaaaggcctaacgtatgtgacgcctagtcatataaagagctgtcctattttggttttcaaaatgcaagctccagctgccgttatttatgtggagccttctgctatttccgggcaatattcacttcaattataacctagatgaggcaatattatagctatggggacgcataacctgatcacatcgaggcagctgttcgacaatgagcccattaaatgtttcaattcgaccacccatagctatacggagggcgtccatctgaatgtaactgaaactttgcggcgaggttccgcttcgccaatagcggcgtggacgaggctgagataacgctgcgtgatcctacctttttgactccttctgtggccgtcacgcatcgcgagaaagtcatcgagcacccccaacctcgctgcataacagaccgaggttagcaagggggtcaccacgatgcacggctttatgcatgcagtcttctggcaccgtatcaatatgagagatatctgcgagatccggaattgtgaaacggtcgctctgctgacgagctgggaggagaagagctaccataagaagtacaccttcaaggaagctggaggccacattgcgagtttaccggtggaggtgcatgggatgtcatatcaacatcagcttgggtcgtttgtgaaaaagcttataatgcgtactttaatgcagcaggttttgcggaaacgagagatttgcgtatacagagtacattcacctgcaacaatatcaactgaggtagggttaatatattatcaatatatcacatccatctgatagacaagttatggcatatagtaggacattcgataaatgtctcattgagatttcaatcaatggttccgcagccaacttcctagaaagacgggttcgcattctgtaaaagctgcacgaaatatgcctggagatgtaaatcatcagcacttgcatgacctctcaggtctaacatttatcaaatatactgtaagagcgttcatgtacatacctgaaaccaagttcccgcctcgggcgctggctgcagccgtcgctatacccgcaatgcgcatcataccgcgccgcgaacgtatcagaagtcccgtcactctcgccaccaggtttaacccagacaaaagcatccaataaggaatcacctgtgttcgtggatgggcgcgcgccgaagcccgtgccgatgacgttgcaccagtcgccccaggcttgttggcctgttggctgcttcccgttgcggccttttcaaccatcagaagttagcggtcggattaaataacgaagaaaggaaggactctagagaagggaaggactgagctaagagggagaggttacccgtatctgtgatgaagtgagcgtcaaagccctgagcgcgaagcaggggagcgagggcgttgatgtagtccttttcgtcacaaacggagttaccttgcgtgtatgaagggcaggtatcgattgcccaggcgttgtaattggcgacgttggtagcaagaccacgaagtgcggccggtgacccggcgtctgagtagactcctgcgtagaggtttgcggcgggctggaggtttgctggccagccaagccagccggcatgtcctgtcttgtttagtactgcgacagactgaaagggaactgagaacgaaagggggaatgggtaataccagcgtcaagatacatggccacgttcggaaggttgagctgcgtgaccgcgtagtttgtgcattccaggtaagcgctctgggcgttggcacatttagcaacgttcaagtttgtgacaagattagctaaactgtccggttctatcatcaaggagatcagaattgccttccaatatagcgggtagatcgcgctcaccaataaccaggattacgtggacgtctgagtactccacgagaatttcgcggatggaatcaatataatccttataatgctgcaccccgccatctgaaatggcaaactcgccattactggccagagcggcgcagtcacggtccggaaggtcataaacaacaaattggcctgcaataggagggttggctccggcagcattctgtgaccggatatccgcgaggtaggtcgccattgtgggcacctttgcggcaacatctcttgtctgacttcagtcctatacacggaaccatatgggaggaaataacgtacagccatacaaaagaaggtaccttggcggcacgagtggctgccggtgcaagcgaggagagtgtcccagtgagggatggaatggcgatactttgcacctcagatgagtagtaagggttgacgtagagctggtagccactgaaagggtttccagatgcagtggcagtgacagtaacagagcttgtagttgtcgtagagccaggattgctcgtcgtggttactgaagatgttgtcgtggtcagggtagtagacgtggtggttgcggctggcaagcactgagcgtaccctattcgggttgttagcaacatcccaagctgtattgaatgcgcatacattggttcagagtagaacacgctgcgccagctacacagctcgtagcaccggtccagccagatcccccacctgatacttgttagcaatgcaaaattagagcgccggttagtgtatacattgcccatagagagtttgctgagcctgaattgcaggaagcaagaatgccaacgcgagacctgaagcagagtagtgcattttgaagacttgacgaactagataaccagatgttgacttgctacactctttcagaggcagcggactctgcgtggtcctagaagggttatataggtctctccctaccatttcctgacggaaccaccgccgtctccgcttgtgagttagggctacaggtagccttcattctggttactttgcaatggatgtgaccgaaataggagatgcagaatgcgcgggatactccgtccgttctcttcagacacgacagggtggtaggccatgaacctgcattgcaaacagagtggagcagccacctgctgtcattgccgcagcgccctgaaggtatttagcgacgccatttctcagggtgcacctgcataatccgaaaagagagcggagatcatggtagaatcatggaattgaggttatgcttaattaatttccccgcttgcgtgcagaaggaggcccgggtcaattaaagtgagcaagaattagcgactggttcccgttgattctagcggtctcccggcccggcctgccacctcaattgctttttatttgaatttttggctgaattagattaagtaaaagtctaagcatttatattcccataaaacttggtgtagctatgacatgctcagatacactttgtattgcaaatcataggatggtgaccgccaacaaagtcatggaatgatattaaaagatagatttatgtaagggatgcttctcctgttaaacatcctacggtaatgcatctctccgtacctgtttggtcacccttacatgatctgtgccttccaagcttggcctaatatcttaccagcaccactatagcctcgaccagacggagtccagtttgtcatgaaagcctgataagaacttgggtgacaaaccaaataagctattattgagtgaaatcaccagattcgttgagtatacaggtcgcacgaattttttataaggattatatactggctggcactcaggatgtaactaccacaatatattgtggtttgatttggtttggtttaacgtcactcggcggatcacggggcccacgtaatctgcggcctcccagggggcatcggtcacaggctatggcctggatttttgttgtcggccatgccctcaacctgcttctaaataaggttctgcaacatcagtatacagcctcggaattgcggcctcgaagcttaggaaaggagatccgtcctcataattttgggaaaggggtccatcggcatacaggtccgggaagtcagactggccaggtcttctgggggcagatgcccgtttggctacctatagatgggggggaggggctgtaccctttatccaggtagatgtatagactgttgcactatcaagcgctccggagggcccagttcgggtatatatccttgaaaaaggatgattcttgtacaatgcggctgaattcttcagccccagcagctgtacttaagagccaatctattgtttttgacaggccatcccttatatatctccatctatcgttccagcgctttctggtgtatgggcagaagaagaagtatactgaagacgttgtcttgtcacaagagcagctctccaagtagtctgtgtggttaaactattggtggtatgctgtaaaggctctgtgtcctttacaggcggcgatgagtcggccaagtacccattgagggagcttgtgctcgcgggagtgggcttcctttgtatagggtctgatattgagggttttatgggcttcgggtgccttactagcatatgctgtacttgtctctgtatgaagccgctgttttgcctcccgtcataggtctgctggggaggggggatgttgagactgtatattgaagaccaaagcttagccaatttgtctgccagctcatttccgacaattccagagtggcctagaacccagtgaacctgaagaggcttctatgacatggttaagattaaaggggcctccatctactgggcagctagttggctaaaggactctaacatcgatgcctatgtagtattggcctttagcttgctagcaggcaggcttctgctaggttatcaaggaggattactaggtggatagagtagcatatacatggttgtcccaggccgcgtgtaggccttccacagcacctaatttctgcatcatagacctctgtcctaagacctgtgggaccatgcctcttagttaccaggatacggccaaagtaggctgcatagccataccctgccccttggccagtttgcaagctgtccaagtatactgatatctgtagtagtgcagggctataatctttgttgtctgttagaagcatgtggaggggtgggtgtcacaggctatggctggattttgggttgtcggccatgccctcaacccagtcctaaataaggtttctgcaacatcagtatacggcctcggaagtgcggcctcgaagcttaggaaaggagatccgtcctcataacttcgggaaagggatccgtcggcatacaggtccgggaagtcagaatggttgataaagcggggaggaagatatctgcgcttctatcttttgtttctttctctaagcttgtgatactcgtttatacaggacagccagttgaaaataatactgcctacgcccgttacagcagtacatttataagctgcagttctctgccagccgcatcaatagctagtagaccagacagtctgggcccagataatcctttatgcacttgaagggacacagattgatatggacttgttgattttatattttacttatataggccaaatataaacttgggactgcttgaaacacatctccataagagatctgcttgtgatatcaaccacaattttcgactagacataactgcgcgatgtgtgggtaatgtgttgtacccaattggtagagcattgccataaaacgtttctagcctccaagctcgacatcgtactatattgcttccaaggatgttgtacagaagtggacgaagagaaaaactccaaatggtccgacaaggctagttttgtatttaaaagctacatagcgaccactcattcaataaagaatataaagcaagagtgtacttttgtgtgtttacagtgcaatttgtatatccacccacaaagtaatattgatattcaggaatccaatcacaatggggtgttctggcatttccaactgtggtaactggtgttctgttcaagaccatcctcatggactcgcggggaccaagtggccgccctcaagcgtcatcgtccgtatcagtgtctacatctccgtcatcgcgattaccactgtgagaaccctttttgcccagcttgcgccgtatctcctccgcacccttgatggcgaaacacatggcagtcaatgttgggttagacgcatttgacctaggccctggaataacattgaggccaccgaggtgaaggttctcaaccccccagaccttggagttctcatcgcagacggaaattctcttcatctcgtcttctgacctgcagcctttgcgaagcgctgcagtcgtcccgcatacgtggagcgccagcccgggagcaaggaactggggctcagaaccggggagataccccccgagttccccagcaaccttttccatatcctgcatcattctgtgcgattcaaggcggtctttcgtcgagagcttgaagtcaaatgttggttgcggcatgccgtacgcgtccgtgagtttcttggaaaatgtgacgcgatttctccactgcgtctcggctcgaccgaaatagcgaaggtcgacgatggtgcgtttgtcaatggccgggggtactgcgccgtatgaaaaagcatcacggtggatctgcgtatgccacggcgtattctcagtgaaggggagggtaacttgggggtccagatcgtcgaaggggattcgcagggggtcgtcctcttcgtcatattttcttcggtgttcctcacattcgggaccccagttatttttctggagctcctctacccatttatccttcagtacaatctgacagaagcacattgtttgctcggtcaagttccgaccctgaaaatcaagttagtcgtcagcttcttcctctaaggctcgtcatgatgggcagggaggaggtgtttccctaccaatgctgggatatagagggatgatttatttccttcagaatcttcagcatcctcctcatcgtaacggaatccagacttgaacaagagctgtggagtaagaatcggtcctccacacacaatcacatactttgcctttattctcagtctgtcttcatcttcttttgaagtttggggctttgcgagattcttgatgattgcaaaactgactttgttggtttcatcgttgaattccagtttttcgcagtggtgctgatcgagtagagtgaatttttcatcttcaaggagatttccgagcacagtagaagaagacgaccacttaatcaggtttttgccctcgactttttcagcggcaagtggcagggcttttgcgtcgcgattcttaaattttttccgtagaatatccaagaccaaccgttgtcggattgattggtcgagtacatcagtccgagtgccaattagctcctcagctctcttgtacaacctgtcccaggtagcgtcatcgaaaatttttgaccgttctagttcgtgctgtctgggcgtggcgcacgtccagctggaatgggtcagtagaatgctaaatctcctcttgtgagggcttggggcactcactgagtggacatgccgccaacattgcgggacacaccattagcgtctaagttgtggtagatattctgctccttgttctgcccgttgaagttttgtttttcactttgccatgatcggtatagtag

SEQ ID NO: 5479 - DNA, 11253 bp, Emericella nidulans
agaatccagaatacaaacataaagtgctgtaaactacaacaatgggctgcaaggggtctatataaagcatttgacggcccgtaagttgtagatagccagttttcattatacatccatccaaccacaatgtcctccaccacatcctcttcttcatccacggccgaaatcccgcctgcagcgctggtcgccgagtagcactgggccgccaaatatcctaaaccatccactgcccaggcagccctgctcgccatgccggctgtctgcgagcctcagattcggcaaaagcacattagggacggcaaaaccttcagttacgtccgtaacagcaattctgaggcccttctggggtagatggttggttctcatgcgcccaagccatgcacccactgccacattaaggaaagtggactgtttgaaggttgtatagtggtagctgggcgattccagggggcttgtgctaactgctactttggcagtgagggcaagcggtgtgactttcacagtaaatggtctatcatccggaccgaaagaataactgctgacaggtaatagtcaaaaatcctgcaactactacccccaagcacgcccgcaagcgtgctgccgcccttgctgcgcttgttgctggagaggaagaagaggaagatgaggaggcggaggaggaggaggaggatgaagaggaggaagagaatgcccgctgctgcaaaggcaaagccccggccacctctgcccgcaagggggttcattttgccagtcatgacacccgtgaacatgcagatagggtcccgcgccgcgcccagcgcttacacaccatgctggccgtggcggcccgacaggcatctgccgccgctgctgcccaggaagctctcgcccagacgctgctcctggtagccgccgagtacgccgatgatgatggtttccaggggtttggtggagaggaagaggaggaaggagagggaggaggagatgaagatgagtctgagctctcctcactggatgaggagattctgactcttggcaggtcataatcacccgtaaatagttttcaccgggaccggatactatgaaagcaaagtaaattcagaccgcaaaagaatcagacacgtatatgcatacctgtaaacactatatattctggtcataattaggctgcctcgtccgtaaccataccatcatcccaatctggcacgtcatccaagcttgcaatatcctgcaagacctcggggtaaacaacattattagtggtccgaacacctggcggcagcaagacgctaagtcgccgcacatctgtaacccgcgacattgccacatataactgaccatgggagaaagcagggacccgcaaatccacacctacctgctgcaaagactgaccctgagacttatttgtggtgattgcaaagcatggacggaccggaaactgtgttcgtgacagcacataatgcagatcgccaggctttgaatacagggtaatccgggggatgagatgcactgagcctctgaagtcacccgtcaagatgcgcgcgcggattgtatagcggcataactccacaatctgcatccgcgtaccattgcaaagaccctctgtagcccgtaaattccgcagcaacatgattggcataccaaccttcaatcgtaatcttgctgggggaagacctggcagatccacagattgcaggaactcatgggtgatttcctccaccccttcagcaacgttgtccgttaaggcctcgtcagcggaataccgcatagactcctgactgcgcatggagtccgtaatacggtcattgaactcaaccaaggcagagtttcgcattgagagtattgcacggcccgcaaaaaagtccgggtcagacgcctgaaagtcggcagtgtgacaatgggtcatatctgctgccggaaagacccgctcgcagagttcctcaacggacatggacgcgctatccattacatagtccggcagctccaaagtaccatgcattgtattatcaacagacatgcgagcgagtaactgggagaataggcgattaatgccaactgacgggagacgcatattctgggtgagccgtaaaatagcccgtaaccttggccagatataggatctgcgcagggtggcggatataatgccggcgcgaggtgccttaggcacaacaggaagacactgctgccaatcaccacctgtaaggacagatatgcctccaaatagctgtttaaccttaaggatatcctgcaggagacgatcaacagcctcaaaagcatgtcgatgttgcataggggcctcatcccagattataaggtccacacccgctaacacacgtgctcgcgtgctgcggagggttacagcgcaggttgattcctcatgcagagccagcgggatgccaaaagtagaatgggatgttcgtccgtaagggagcagcagcgaagcaataccggatgaggcaatacagaggactgtcttgccctgggctcgcaggtggtaatatagagctgtataaaggtaagttttacctgttcccccggcgccctgcaaatagaaacattcaccggaccggtcagccatagccgctgacactgtatcaaaatgacggcgctgatcaatattaagggagggaatcagagcatccacccgccgagccagatctactggaggaataaaaggcaccaacacgtccgtttgcggctccagacggccccatgcggccgtccatagaggcaatccatacctatccagcgtctctcgttcgccatgctccgccaacatacgcgcgattatgaagaggccgtaatcaatatgacggtcctcaatatcaggcggattatccatccgtcggatctcatagtgctccaaatcgctgcaaatccggcacttaaactcctcccacaggcatggcgggtcattcaatgtaccgctggtcagagccaccacgaacaatgtccgtaactgcgcgccgatagcggatccaacggactcttcaaaggcatgatgccactcgcggtcatcctttaacagcccgcgagcattgcaagcggccttgaaagtgggatagagaatgccatcatgcgtccgcagatcttcgaatgatacaggtcccacgcagactgtcagcaggagccggatataaaaacgctcacctgcatttgggctgcagtgatacatacggccaatggcaaatcgatttcgggttcgcggacgccaaatccggtccgctttatcccaagtaaagaactgaggcatcttcgcgtacaggtagcgattcaatgccagcgcggcatttgccggattagcagcatgggcattgtattcaaagaatcccattaacattgactttccgccatctatacagtcctccaactctctcattccagcattgctgttgtagtagactaaatgacgggccggctcatggacatgcagcgcggttacaggtggccactcctggtgtagtgggaagcggagcaggcgccatacagcttcggatgcgccgacataacgggcatctagatagagatcaacctcgtccgcaaccttcgatctcatcgacgcgcggtccggacccttgtagatatatttagtgatatatttaatcacgtcaacaccccggcagacctccacattgatgtgagaacggaagcgcttgagcagatacgggttgtaaggcacaacccacgtgttgtcgatgcggaccatatcattgttcttggctttgatccggtatgcgccccttggatccgcccgtcgacgatataggggatagccctcctcgataggttgggtctcatactgctcagccttggggaaccgtttcgtgcaatagatcatgttcgaatcagagtgtttatcacaacagggggctctcgaattgtataccggtccacaaggcgcgtggatcatgtgcttctttaccaacttatataattccagatcctctcgcgggtctggcaactcagcagagaccatctcatcaatatgagctgcatctagaaagcgctcgcgctcctctagaaagagaaccaagtgcatatggggcaagccacgtttctggtactcaatagtaaagaaacggcctggcgcgactccaaataatttctttttgcagagctcatcaaccatttcggcccgcaaaatattgaaaacacgcgacactatatccggccgatcctcccacgtctcgccgggccgtagttctcgggtgacctcatcccacgccggattggcagtgaatgtgataaatagagatggtggaccatagaactggcagattgccattgcatcctggaacagctgctgcatataccggggcgtgccaaccacattagagggcaagataaccgctggccagtgttatttgcaaccaaaacatcaccgtcggcagcagcaagagcatccgtcaaaccggaatacagctctgcgcggatggtggtctggttatgccggatccattctaatttggcctgctcaattgtaccccacgcatcaaccaagtattgctgccagagccggcccccgtaatgccagggctgaactcacggcggcggatatggacccggtaggcatgatacatacgggccgatagtcgtaacccgtcaagacggcggcagccccagtgccatccatcatctccatatggaaagaacagcgggtattgcattggcagatagccagcatggcttggatcaatgcgctttaacccgctgccattaactgggtggcgcaactgcaagatgacttcgcgaaacgtgccatggtccagatcatttacggttggatcaatcagcagtgcagccacctgctctccctcccgcggcagattatagcggcgcttatctgtaccttctacggccaccaaattaattccaggtccaagcaacaactcagcaggcgtgccccgggcctcgttggcaaatagctgctccgtagcggacataaactgctgggaaaaacgattatgcagctcaaaccactctgttagctcaccaacaatacctggtcttaggtccgaaaaacgcgtgcaacggacagcagttgccaatgcgcggtttctatcccgcgccgcatccgtcaaacgatcgtatatccatagttgagcaaaggcaggaggcctgtctgcatccggcagcagggggccaaggaagtgtactaactggccctgtatctgaaacgggccgtgctggccctgcaaccgaggatcctcacctgcattgaaacttgtcatgctgaatgcacagttgtacaggcgggcattctggcggaaatgccttccattatcatgatcactgccgttgaacagccgttgtaggaacgtaggcacctcaacgggtggaataaaattgtttcccccgccgcaacacttgccaaatttcggggcagcaatggacgtccctttatcccgttcagccttccaatgtagcccatgacaatcagggcactctaggtccatccggcctatattcagcggcctcatacggtgaagctgagaccggtagccccggtaaacggacgtgttcccaacagaaatcggcagagggggggctgcagcgggtggctcatcctcatcatccgagacaccggcttgaaaatcctcatcataaccggcattatgtatatctgttaggtccaccggaggtggagtgtttgcaaggattgaagcagactgctggtaatcatcaccctaaggcaacacaggggttagcggacagaaacacatgcatagaggataacaaacccggcaggtatggcagcgtgtcgcctgagatctccgtgtggcagaaaattcatcctcaggcttcgagcgcaagcagcgcgagcagtatctatagccctctacagcgcgccgtgatctctgcggcctggaacggactgcaaccaatccgggcgaggggctagatggcggcggcggaggcggaggacctgaatggagaactgagggaggcggatccaagaaattgtcctcaaacacagtaaccaccgggctggcaggagtctcattggcccgtatattgagattggtcgcgctcaacggctgtaaaggaacactaacacgcggaccacgccgaagctggctctggcgtcaacaggtgaagcaagacttccatggaggagagccacgcccggggggatcaagcggcctgaaaaattcgaaatccggccagtcacgccgacagatattacatcggtggtgaccggaaacaggcgccgaacgttttctaggcatatgcaatagtaggagagtgcaatatgaactatacagatatgtggaattgggaagaacacggcagcgaggtgtttattgacagaaggcggcccgtagcggtccgtaacggacgcgaagaagaataagtgacgggtgggtgtagaatacatcatgggtgtatattgcattctgcgaattaagtggataacacgtgactgcggtggagtcagagggtaaagttcgtatagtaatgttaatacgtgctgaccgtcatttcagataggaaggtcgtttatcggaccgagaggtattggccaaccacagacggcccagctgactagtgctgattaattggcttttgcgaggggcgacttcctcggcactccacacccatttggacgtgataacataatgggtattactctcacatagcttaggttcccgcgtactctaggatactcccaatgaccactgctagccagtctattcgaggtaaatcgctcctgaaagacagtcgctcgcccgcctctgattgtttctgaaacaggttgtttccaatgcaccagacgacgcatcgtttgcgacaagggtgagcccatatgtcgcaaatgccagaaaaagggaatcgaatgctcaggactcgggaggtttcgattctactcgggcagctccatacggggattatcgcagggagatccagtccccgtgacgctaccagagcaattccaaaggccgcagcgcgatagcgccgggaagcaagtgcctctcaatattcgctggaaatcagatcagccgtcaaaaaagacaagacggaaaagatctatacccgctgcagggacgacggctgagcgaagtttggaacattcccagcagggccagatcgttatagacgaacgtcattctggcgtacacgataacatttcaagccctgcacttgatgtctcgctagcgactcccatgttcgatgcgtcctggggaattccagacataggggccgacgaggatggctttgtcaagaaagccagctgtagcgacgaagttgctcaggcctctatctcgagcaccatagcgccttggattcctcccctgaaccctcaaactcggatgtttctttctcactgtgagactaatcttttcccgaaactcaggtggatagctgatatgttttagttgccgatgaagttgctcccaacatggtcgtcctagacaagatctcgaatgggtatcgcgagattctcctaccgttagcctttcatgacgaactattattgcaatcagtgtgcgcagtagcggcacagcacctatccctccgacatgccagcttcaggcggatcgcagagtctagccgtgcggccatcatatcgcggctccgacgtgacgccttccaagagccaactgaacgtctgtttagtgccttcacatgggctaccttgattgtattgttagtcggcgagaccattactgccagtcccgagtacacacacttgctccagatgttgttctgcatggcagggaatacatcgactatggcaatgagtcctgtcaaccaatttctaacccagcaaacgcacatgtaggtgtcttgtacttctgaccctatccagtaaatagtcctaatccaccaggtttcaatttctcgggcagccgttcttgggcgaaaatcagggattggatatgtttcgtcgccccctgaatctctttctcgactggacatactacgatctccctccggaatctacatatacacagtctcttggatttatacgagaatccttcatcaaagcttctcaaatatacattggacgggcaactaacgacgaagatcaatggatgcaccttgaggcgctaaaacagcttgtatcctgcatccatccggacgagcagggttctcacgcccttgtctgggtgtgtttcataggggctgcagatagcacgaccctcgatcaccggcagtttttcaccagccgcatggagagcgtgttccgtaagacgggatttcaaaacgtcgctgccgctatacggtcattaccggcaatttggtcacagaaggactccggtcggtggacatctagccttatccgcacaattccggctttgattatgtgacgaagtgtaattgagatttgcctacgtaccaacatcatgacaaagtgacccccgtataccatcaagtcgatgaatcctaggcctgcctgttcgaacagagatctgacctctgccatgggttgcctatccaattctcaacggcatcccggctccggctggtcatgctattcatcagtttgatcatcatgctcgccagcctccgcctccttcaacagggaagtcgccatagagcttcaagatgaattgtcacgtacgcaaaattatagaatacaccatggctcgccaccaagccctgcagccctagagaaagtaatcatttgatataatgaacaatggtgaccttgatacttgccggtaaacgcccagcatcaaagaacattctacgagctttaatggcaattgaaaagtctggcgattggcgtgttttttaatcagtatatgtttctcctcgctaatccaccctgcgcgatatcaggttcctgactacctgaggtgtactagattgttaccgccagtcgaactacttaaccactttcgttgaaagatctgccgcttccacagcgggaggatgtacatggaagccccttgccagccataatgtcccccggggtcatcaacatgaccgacaatagttgctttcgacatcagctttgcccattgaatagctggatccattgacaagtttgggtttggcgaaattatactaatcgcttttgtcctggtgtattgacacctgaagctgctcgcaacgtttgctgataaagagactgcgaaacttggctttcgaggtcaggtttaggttaaggaatgcccaagcctggaaaagggtatcaaacaacaacttacgcggcacggaactgagaacggcctatagattatttctggggttacaaagatggttcgttcatcaaaggaagatattattttttcaatagatgcaaagatctttcagccgttgcctgagactttgacggggattgtggatagagggacaaaagcacagcaaagagagaaacagagatttagacacttacaatatagtcagttatgaaacttattaactccttcctaagcctaagaagggactaaagattaaaaagatatacatattttatataatacttgttgccactgttgaccaacaaaacgaccggtgcctctgtcgtttcagaagcgcaaatatagaatacagtacttttgatgcccaatataactatattaatatattgggtcaggggagcagcatccagataataaaccaaaagactacagatcgaaacccaaccacgcatcgaattcgagagccatccatacatcgatgcatttgttctcgcctccgtcgccagctgcccactgatggcgggggtaagagaccgtatcgttctttcggtagacggcgtttccggtagcatcttcatgccatattcggccatgctcctccaacggtttcaagccacaatgcttcacatcttttggtggagacgggaatgcttcattcccaagcgacaatggctccacggatgggatgatggagtcacaggttgagggttctggtgcccacataccaccaagctttgtttcgtcgtcgccgggggtaccctgggagagacaggtatggagctctttgaaggcgttatcatgatgatcatggtattcggcattcacattcggccctggtgtttatcttgtcagtgtatcgctcttaaatatacccgccctggatctccttacctgctgtccagaactgcatatggcagaggttttgcttattatcctgcaggcagaaatgaaacccgctcatattatagaagtcatagtccttgaagtcaccgccccaccatagcttttcgaccttgacgaacttgagctcagggaagtcaataccctgactcgagagatcgaaaatggtcttaactggtacatcttttgcttctttccatgggccgggggtattctgttcttttaagcgaagaaagattgcccccaaccgttcatccgcttttagcacagtgtcatatataccacggggcttcagcgactcctttgctgggaacggcgcccctccaagaggccgacgggtcacattttgtccctcacttaaagatccgaatattaccttaacgccatcttgtttcttgaggtgcaccttgtgcttaggaggaaacacctcaacccggattaagtaatttgccacgaccatcagttctttcttcaagtgatgcttgagactctcaggtcgaggcaagtaaaccatcccttcctctccccaaatcattccattgatctgtggagagacggacgggaagctgagttggtttttgtatagagtgacaactgggtccttttctcggtagtacttttttacatggtagcttagcgaggctaaatcggcccttccgtttccatagaagtcgccgacaatacatcgagccgatgatgttccaggtggcaggtgccatttagaaacaaggcctttatcaagatcaagtatcttatagcaccagattccctagaaggaacactcagcaataatgtccatcatggtttgcgcaatgcccctgcgcttgcgtactcaccttatttggagatacccccgtcacatcctcatcctacgatttcaggttttcagccggaatccagggaagagaggaggaagtagataaatacttacgggagtgtcgcctttagaatcacgatccaccggtccgaacatagacaccagaaactcgtcattgccgtcacctggatcaacgatgagacattagtgcctcgtaatgctctcacgagtgtgagggtgaagtcctagcttaccatcaatatctgcacacacaatattatggacaggtccgtctccccagcatcgcttctgggtaggtgttccgtaaacgtccaagacatggcgcttccatgggtttcccggctgccacggcggttcttggtatagagactgacgtatggg

SEQ ID NO: 5480 - DNA, 1898 bp, Emericella nidulans
ttcatgtatcatacacatacgatttaggtgacactatagaatactaggatccaagaaattcgccgagctcgcggcgtgggagtttatccgcgacagaaagccgtcgtttgatctcgttactctctgtccgcccatgacctttggcccggttgtgcatcctgttccatcagtggagagtctcaatgagtcgaatgcaatgctgtggaaagtcgctgtcggcgaaccgcttcctgtcgcgcgtgtgcctttctggattgatgtgcgtgatctagcggatgcacatataggcgcattgttgaagcctggagttggagggaggagatccagctcgtctttgagtacgccattaatgagcttgctgttttggctgcaggatgatttgtttacctagataatcagcatacgatggatgccagaaaccgttccactcacatcattgtaagcaatcatcactgacccgacttcggcccgaacaccctcagcgaacggccaaatgtagagctcgtgaagcgttctgtcatcgatgttggacgagtagccttgtgtgacgacactactcattcgatgcatctcctgctcattccctacgaaatgcttgatgcaagcaatgaggcccgtactttgcattcccttaatcgtctcagcgcctccaatgccttgcaaaaccggatcaaacccgaatccttcccagttgcggccaccccggggcttgcgccctaacggcccgacagaagggccaagtagcacattgacgccttttccacgtgcttgctctccaagtccaacaccacgctcgtacatgaggctcttgtcaaacgtagcaccgaccgtgattcctggagggaaagcagtgttgtggtcggtattgcgcacgcccaacggagagtcgtgaagacataaattcgggatgccgagtcgcgggacgctgccggtctggcccgcgcaggggcccatgaatatcccagtgccggtggtgaggttcaccttctcggccagggtcaggttgctcacgatactgtgcgctttctcgtatgcctccgcccaggtcgacacccagccgccgttcggggctgggtagtatggcggagaaaatggttcatcatcggactggcgctcgttgagactgggccctggcgaagccagggcacgcggcgccgctgccgcaacgagagcaagaatcagccagcgatgagccatcttgcaacctcgtccgttcccctggttaacgaacagtagttgcgctcgatgctttcacaggcaccaagtcagcgtctgcgcaagattacccgccagcagacaatcgctaaaggggcaaaaagacaaacgactgtgcctcgatctgacagacgctcgagtcaaggagggtgctgagggtgctgaaatccatgatatatcacaaatcagctgcaaaggggtgccccgtgccaaggtcatgctgcgcaggcgggtcatcttttgcagtttttattcctggaaattctccatgccccttgaatgcaacggagcagtcacacctgttctggcaaaggccgagggacttcttgcaggatgcatgttgatcaccacgctaaccaccggatgtacgtgcagtggaggtcaccgaggcttgcctggttggcgttcagtccggttgacggtaattgtggggaaatgttcctgtcgaatgactcgagactcgactgtcgggctggcgatgggaactgatcttcatattcgcttaaccgaaccaagcgatctgtcaggggagccttagaacgtatcttcgttaacgtcatgatccaacagacccatactgggcgctggcacagcatgggaagagaatccagccgagtccccgtggggtaaattgcttttgtccgtcacatatcacatgcgttgaggaatctttcacttccagt

SEQ ID NO: 5481 - DNA, 4405 bp, Emericella nidulans
  unsure (1)..(4405): unsure at all n locations
ctccaagcccgccgcaagaagaacagcaagctccatgactaatgaaattagaggttttccataaacaaagcttgtgacgtaccgtataggataggaccccggaaatacgataggatcttggctatgggattttccttctcagaaactaactcgttccacccagaccgtcgtcgtctgttctccacttcggccgaagataaaccctgatggatgtccgtaatgagccagtcatccgggtacttacccggttctttgtcttcaggtttgaggcggatcttgcgctttttccaaggcgcataccacacacgtttctcctcgaaatgctcctcgccctcttcttcacctttgtcgcggaaagttgagatgtacttgacgagcttaccatactcgtcaaggtttgcataatcttgcgacttggcggaggaacgagatacgcgtcttgaggctcgcctgtcctgagacccggatacccgaccttctcccggagtccggccctctcctggagttggaggaggcactatcttgattccttctccttcgcccttctctccgccgccctctccaatgcccttttcggtgtcacctcccccgactgaggtgcctattgctccggctcctgagccttcagtccccgcaccagtggtgcctgaccctccgattcctggatcgcctttgtcacctttgtcacctttatcgcccttgtcacccttgtctcctttatcacccttatccccctttggtcctttcgctcccttctgtttgtcagccatgttgacggatggctgcttgactatgaaagaatgaatgacggatcaaatgcaagtggtgaagctgacacgcaatagagactcgcaaagaaaagcctggttcaggagagagaaatagaagagatggtcagaccgcgttcttcggatctactcgatccggactacacttccaagctcttgagatatgctgacgtcgtagactcgaggagagttacggtcaaaacgcatgatgaattgcctctgacttggaagctcctagcaccgatcaggaaactgtttccgcacctgggcctccaggcgagtgtcggatagccataacgacgatactgcgatgactagtcatccaagcgaacccgtctagaatgtcctgtacgtcaagacatcgaggtatcaagatcttgagaccatatccggagtagccgccaggatattcgaaaacagcaagttccagcaaatttggtcagggtgaaactcaattctttattagagttaggctcttcatcagggataggctgcaagtacagggacagttccggaccacggattctgacgaaatttctataagaacaaactcaatggagagttgatcttgtttccagcctatcatggttgatcgtcgcggtggtagattgtccggtggttccgacgggaatccgttgaatacgacgttgacatcagatgttgatgaaaatggtatgcatacgatagtctcagaagaaaagcatcatcgtttatgtaatcatctgatggaattacttgcagggagcgtaggaagaaaccacggttgtagcacagttcagggaagaggttggaagacggtgtttgcgcgaaaatgggttggaaacctctgccgcagaagcggcccgattgggaagtcacgtttcttctcacatgcctagaagcaactctctaggtagtggcccagcttaggccgacccagtcatcgaagaggaatcgggcaagcgttatcgaaatctgtgtaaggataaattgaagagctagaaaataccgggattacaacttgcacactgctaccaggtgaagagttagggctattgatacacttgctcaaaaagcagcacaatgtttccgctgttaagcagacgcgaaaagaggcacaccgcaggttatggtgtgaagaacacggattatctgcatgaagctaactcagtacgtccctgcagctcagattgactggtggcatccagacaagggatgaatgggagtataccttgggagcaactcacaagacatccaagtcaaagatccgcattctccagtacagcctagtatcccccaggcagtattaaacgatgcctcgatatttcaaaccagtcttacaaagtcaatgcgggtcaagcagtaactcttcaagccttagacagaatcccgcctagcccacggtctccagggtgccgcaaaatcatctacctcaggtaccagctttagaatcacattttgccatccagtggtattggccagaacgtatctctgctctaatatctcgaggagatgtccgcgtatcgtcgaatttcccgttgaaaagcagtacgctatggcagatcgtgtccagataatgagggcgatccgatgggaatagcgatccgtgaagacgtcctgggatagtctaggagtagctgctcttccgcatcagtatctgagtatatggtttcggagggggcctgacggtcagtgttggtatcgctgaggctggtcctgtctaccgcaaatccaccctattcaaattgttgtggatgctcccaagggaaagagcagagggaagttgtatcaactacatgaatgtagcctattaagatcggacaccatatgataattgactctctatcttgatgttaatagatatcttcatctctatacgatacatggaggactagatcaggggttagagaataggctgttgatattacatggcataagccagccatgaagcttaccatatatacctggatcatacaataaatactatataatattatataacactaccatttatttgatactccaggcattatgtagtcagtgtttctagatttatataatataataatatttacttttttctactagctggggtaaaaccctaactctacagccttgttaaaattataggggattaatatctgaggtatgtctacagccttttttataccagggtcgggatcccatcttgctggaagtagtggttccttctgcagacttgattgacctatagatcttgagcttggtaattggctcccagtgtatttcttacagcagtggtgctgagtgatctgtttctgcttctgcaactgccattttagggaaatgtgagggcaaggggcccctaatcagtatcaatgccttagagaggatgtctaatccaacaggctcgacaacgacatgtacgcgcactcaacaacacggtctacgcgcaactcttcgactccatactgtatcaacacctggctcttcaatgagtacggcatggatccgtttccccacaacgaggtcatgagcggtccgctgcggcatccgcttccggtgaaggtccctgcaagcaggtcgcccttatggttaactcatatgcgatacttcgcctcagtcgggtttccggatgtgctggagctggggctctgcgtcgtcagcttaggaaattcaagccttgtctatgaggccggagtgtttaaggaccatgatgaacaggtcaaggttataggtagatatatgcatgtttggttggatcggcggacgtggcggcctgcgccgaaggaatggaacctcgcgtgcgcaaggcactggagaggccgatcgccccttctcgctggtctcctcttcaatctccgcactgcttatatttatcctcttcatctagcactgtagtttcatcctccttcgagtaattggtgacagcaaaaagagtgcaagctcttctagaggctgacccacgtgtcgctgaaacgtggtactaggaagagaatcctgtctgtagatagagcagtcatatgtaccattcccactgaattttgaagtatgtgtatgctggatatgacggtaccattgtcaacggccttcatagagcttaatgggcgtcgaacacccggggaagatgcagacgtataacatcagatcgcggaagatatggcgcatacatgctcttttgtttcggaaagtgatgatataaaagcaatatagatactcaaagggtctctgctccgcccctttctttggaatgggtggtattttgggggcatcttcactagtgccctcgagcagagtgcttccatatgaagtttcaggtgcgccacatncggaaatcatgcgctcaattgatgaggtgtgtctctgaacacacctgttgcaaccgtttctgataacgtggctgatttactgtcatcctcgggatcaatgctcaggcttaatttcgcataatgcctttcacgatacttaaaaaaaaaagccctttgtcgtgccattgcagagccgatgtgatcaatagccagtgcatctgcatttggatatttcgtggacgtatgctgcttggcccaggactggaagggctcggaatccagttatttgtccaaccagcctgtcatgcggtgctgggttgcggattatcatggacatctggtagagctgcg

SEQ ID NO: 5482 - DNA, 6157 bp, Emericella nidulans
cgcccggacagaaaaaaataaaaaaaaatcccggggccaccacggttttttcctaaagtgttcacccaataattccctcgattcacccctaaagctttgctcgacatacaaatggctcattgcttaaccaaagatagctggtttctacatttggaaagtattggtcgttgggaacaccaaaggggtgaacggcgtctctcgaagatcaattctttagtcatgtaggttttgttaagatagaatcttgggccctacaaggtgagaggcgaggcactaagtaggtaaggtagctgatatcagtaacctcatctcctttccagcattgctgtatagtagtgtgagagacggggatgaatgaggcactcacgcaggcgcccacggcaggcgaaggctggaagctggagagggcctcaaagcccacagcgggtgattggtccatgctggtgattcaagaagtatgccgttgccctgtgagattttggatgtttcgagaggtcctggcgaggatgtcagacgctacttatagccttctttgagttggtggatataagcgacagcgaacccccggctaatgtgcaagcgtgcctactgtcgcttatcgcccacctctatttaccgacctctctacactttccttgttcatcttcatgataatatttcttcccccagtcttttgtaccattcgggacttccttgctaccactttgttggtattatcaacgtacgcagcatcagcccatccctagcattagcgttaacgttcagttgcatagtgtccgtccactcacttatcaaaggaaacatacttacattcttcccagtgttatgatctattcagcgcccaaggtccaatcgtacctaggcagcagagcgtatactggtctcagcaggaatactcatggagagctcctgcgggctcttccaatattaatggagaatctgttgattgcaaccataattcttttctccagatcaagcaagtttgccatccgagtgacggaaatggaacgctcgcggggattgctagtattgaacatgagtgtcactattggtctgacaagctgagacgttaggcatcccgcacagaagcctcctctgtatctgtagggccagacagagacggtatatattatacgctgccttttattccaggggtattaattatcccgggagcagagatagccctgctgaagagactacgcttggtggtgagacggctcggtgagactgctcagctcttccaacacgttaccgacctcactatcgcatgctaaatagctgacaggcagcgttactattacgagaacctggcgggttttggctgcgacaacatcgtctcatgagtcgtcctttccaacggcagaccatcacagcaagaaataccacagagtggcttctcaaggaatttttcttcagcattatccttacagggggcgtcgaaaggcctaatatactgtccaatcaacacatagacgcacaataacggcgttccatgagattcgtcgcagatcaaacctacgatgcaaccctcttatccatttctgcggcgatgtggccgctaatggattagtgtatgtagctctcgtgcaggaccatggcgttcagtgctttcaatatacaccggagagtatgagtacaatgaggttcgagtcttgaggaacctctcgattcagacggggaatgtggctccaccgtcattctggtatgttgtccagttcttctctttattcttccaccacaacaaactgtaaaacatccaattatctccagtgacatacaacctattgatgagtacggattgctttcaggataacaatctgcatcattcttctatcctctaacagaccttcatcatctggtacaccagcacagcttcaagaaccctcatcccagaatagccttgtccaattgccccgcaataacagcccaatgctttctccgcagcggaaacgtcctggatctcgacgttatcccttctaaggactgattctgggctattgtcaacattattcattcaacgcctgatgatgtggctgttgatgcggcggcggagagaccaggacggagtatcatgatgctgagaagtccaagaggctgtataatgactatgtagattacaatcatttaggacgctggcaagatccgattactagttgtggcaggaatcattggcggttcatcaggaaagctgcggagaggtcttatcggcatggagttttgcaggtgctttgccttggagtgtccgagatatagaggccgttggaggagagaacttggctggaatatatgtgagcagtaattaacataggttgctgagtgcctgtaaatcgtgatgcagtgtcatctactcaggaagccaatgagcgttagtaaggtcaccattaaggttgggatattgcgactcctaggcgagtacgtgccaacaacccagtacatgtcgcagaaagtcgcgtggccatggcttgtacaacgttgactcgtcgcgaaaccggacggatccgttgtccatagatattctgtggataggagtgttcacctgttccacatgcatgactcgctgctcgctagcattgtatatcttgtatatcagaggaggagtgccgaactatcgtataagccgggatcaatatcatcaagagccactgttcgacgcaccagaggccggattggtgactcacgttgctatttctcatcgcagtagagtgctatagcgtataatgcgcagttccgttgtgacccctgcggctggaagacgagctgtagatagaatcgcgaacactcagacacttagtcgagcagctggctcagggagtcaggcacgcattatgcatgtctatgcttggatcacataatatgaggcgataatttatacgacatctatgcacccctggcattacggcaaaatagccctataaactgaccgaggcgtcgtttgaggcacccatctgatgtaaaaaccaaaaattcgtcaggaagggaatagagaagcgagtcagatccacgcgtaaattgaattgcattatcttggttggtcaattggcctcatgacccacgcgatcaacggtgaagaccgaactttttagcgggaagctcagacgggaactatgcaccgaaacccagcgacgcttgtcagagacgttgagcttcctgcacgggagaagaccagccgggctctcacgaggaggtagggagctgttccgtcggaacagcaccttaatcgacttcaagcgaggctgttgctgattgttaatgttggaattttgattaaaatccgagtattggagaagcaagtccaatttcctatagagaaagcctgggctaagatgcaggccgtgttagtggacgatcgatatacttgagtgctacctcatacggcataagcaagtttacaaaccgcacgctgagcgaactatggagtcatcgcttgacagcttgctccctattctcgtcccttgactggctcgcgagactaagtatagatagtgagggtctcgtggctcgatgttcgacggttttcacggatctcaagatgacccattcagatggacttattcagtccctcgagtcatcttctcctatcttgagttgatttctggtcctattacggagaaaagcttcattctggtagtgaatgaaatagctggcgtatctcagcagaaagatgcgcgaatgagttcccctttttgtgtcttggttggcgatcgacatttagccatttatacggggtacggataacgaaggtttcgtagaggacaaagccgctggcgagagtttccctttcatgcgccttcttcaattggaaaacgcaggaagccgtcattattgttagacacacgctttatgcgtggttcatcgcccttgcaagcctatattccccaatcgcgattttgatcctaaagttgaagcactgtgattcttggtagcgataggtggccaatacattgagaaaacgatgcgaactagttgatgataggtgtttcgatgcagcataagagactcgtcgagtgtgagatgagtccaacggggcggcattagagtgcataacacccatgaaccatgtctgattcagccccaagattgtgttcacagctcaaagccaaagcgggccagagcccagaatcaggttcgcatgagaattgcattttgagggtccacatttctttttgttctgcttcaggccactgatcggtggcttctccaagtaacgactgcgagttcaccgcttggaagaaaaggcggtcgctgagcctgtactttgtagttggcaattttgactgtactttgactgcgctcagctgcactcagctgcactctgagctgcgggtttgactggataaactgacaaagagccgctttcgacagtggtttccagtatttcaatggagagagcagtggattgcctcagtcggcggcccgcaggactccagatgacgatgggcgaccgtgtgttaataggctaagatatggcacgacccagtcaagcttcgaacgggagaaaggtctgggcgcgggagttggggggtcttcatttcgcgctcgtctacatgtaacacgccgcccctgtcaagactggaggtatttccttcttcgcttatccgcccgctaccgcggggagagcttaaggcggtgttcgcgtgggacgaaggatggtttgtttggaggaaattggccgtttcacatggctacattgggccctagtctcaagacagacacctgactatcaacattgcgggctaattgtacctggcgagagagactcagaatcctgcagtcccatggttcgtgggctggggacctggtggctgtctggccccccaactgcattccaggaaccgcggaagctatggcctgatggcacacctgcattccatatagaagtcgcggtatgagactctattattttgccgcgagcaaaatacatgatatctgagcatgagcatactttcaattgaccaattgagcctttacacaacctctggactcagccgtaagggaatcctggaccaatgtttgtaacagtttgtgacagtttgtgacagtctgtgacaggacgataccaggaacaatgagtatccgagtccaggcccagaccgtgggcatcagcatatagttttgatgactttcgacgactgggttcgctttgtctgcgaggcaaagaaaaaggtatactccgtagacagctcgcctcaacggcgaacggtctccggtgggcgtgaatacggaggcctccgtaatcgtaaacggtccgactggggcttggagtccataggcaattcgctgagccatccactagttaattaactttagcggttcaggagaccgtcacttgttggatctccagacctgtcaggtcaactctcaactttctttctctcagtctctccttttctcgcgtcctttccactccttcttgcccgccgttccttttgcagttcatcgctgctgtttgttgctgtaagtactgcttctcttcccctctcccgagtggacggcccaaagtcacggtaccactgcccagccccccgtactccccgtacccctgatcgtttgtcgggcttgtgcatcagctctttctttctttttcttctctacaatgctcgcctgggattcaatttggttctgatcttttcccgtcctccaggtacgcgggtcttccccgagacccacgtccgggctctgctcgatcatggtttggttaacacccggaaacaccagatttgttgtcctcgcaaatcgtgtcgcgggccgccagttgcgattgctcgaatccctccgacgcagcggttccgtcctactatcgatagacgcggaacccgttttcgtttgagcagcctgcatttgctgatgacttccttctccttgcttccttaaccaaaaattgacccactcaccgcgatcgccttggtcatcgtcaatcgcggatcaatagacataagaaggtcatgtcggctttcccgccagcgtcgcctacgggcccggggccccagagaccttttagcgctatgatgcgcactccgaggagcaacagccgtttgagcatgagcagtaagcatggcgggagcagggcttctgatgaggacgggaaaaccgcagtcaaagttggtgcgttatcttggactccgcgggatgcagcccgcggctattttactcaaatatt

SEQ ID NO: 5483 - DNA, 3989 bp, Emericella nidulans
gccattgccgccgccgaattggcccagatggctggtgcccagcgagttgaaggtaccctgtttggcaacggtgagcggacgggtaacgtcgatctcgtcactctcgccctgaacctttacacgcaaggtatctcgcccaaggtcgacttttcagacatcaatgccgttataaaggttgtggaagagagcaacaagatccccgtcaacgagcgatggccgtatggtggtcagctggtcgtctgcgcgtttagcggtagtcaccaagatgccatcaagaagggattcaagctccgcgaagacgccggcgcatccgacgacatcaggtgggaaattccctaccttcctctggatcctcaggatatcggacgaacctacgaggcggttatccgcgtcaactcacagagcggcaagggtggtgctgcctgggtcattctgcgcactctggagctggatctcccgcgcgcactccaggtcgagttcagcaagattgtgcaaaagcgtacggaagaagccaaccgcgagctgcggcccgccgagattgtcgccctcttcgaggacgcgtaccacctcaagaccaacccccgtttcaatctggtcgactacaacatcaccacagaccgctcgcagtctcccgctcctccagagcccggcaaggcgctcaacacaaagaacctcaagcgtcgcttcactggtatcattgagattgatggccttcaacacgcgatcaccggcgtcggaaacggtgccctttcctccctcgccaatgccctcgcaaccctgggtatcgatctcgatgtcatcgactacaaggagcactctatcggtcagggggccggtaagggtcgtgatgtcaaggctgcgacatacattcactgcagtgctgctggtagccagcagaaagtatggggtgtcggtatccaccaggatgttgtccaagccagtttgattgcccttctgagcgctgcaagctctgtaagtttagcatttttcatgccactcacaaccgactcaccgcgtcttcatttagttcctcacaagccgagctggttcccctgctcccttccgccctatccgatccaacacacttaccgacgaagatctccaagcgctggagcagctcgccagctctaatggcgccggggtgaccgtggccaacgtctccgagggccagtccgactccaaacccacagtcgacctggaagcctcaacgaaaaaggcggccagtcagtaatgatttaactgatctgtttatgtctgtcttaattgcttggggtagcgttgcagtaatacaaaagtatatcgctcacactataccgatacatacgatctgaattgcatccttcttcttgctggaacaatcgacctgtccccgactagactcactgctcacccgccaatataatttcaccaccctctataaaccatctacctagaccccacagcaccactgaatcgcgtagccaggttgcacatagcacacctctctagccggcacgcagttgccaaattctccatccgccgtaacaacactcacaaccgcactctcattctcgtccacgcaagtaacttccgatccttggttataggccccgcagacctcgccatttccgacacgggagtcgattattccgcaggtgctattaacgatgagagaaaatgtctccgttgctgtgcccggggcaatgcccacgccgacggagtcggggttgcagatattctgggctgcggtcgatgcagcgaggaggacggctgttgttactttgaacatggaaagtcgcatttttagttcagtattgagtttgaatttcaatagtggaaaagtgactattagcaaatgtccttgaagccgaggatgatgaaggggatgaacatgagaattccacctaccttcctccgtatctgggtctatatatatatggccgattcttcacctgaggtcttcaagtcgtattttgggcagctctgaaaaatctcgtactgaagaggcaaactcgtattccttgttgcacaggtcatctgtaggcgccgagtcctggtatttttcaggcggccggttggacataattccttgaggtctcgccttacggatcgacaccagagtcttaggaggtgatttgactggggtgagacaatgcagaaccttgagttccccagcgttgctgctggtttgttcggtttcaatgcttgatgcacgtggtgcgtcgtggttgactttctgtccctttctccattccatctgcccatcctccaccatcacggcttgtctacaagcctcggggacatagtcctgtcttcaatatatcatcagtgattcatcgtcgtcctgagcccctccagataccaatctcgccaccgttctgcacgagaccggctttactgtcggtcagatggagtatacaccaatttccacttaagtctgttcgaacagttgccgcggagaagaaataccgagggctcgagtcccgtttgcagtcagaataggggattggagtagacttggagacttacacgcaatatgggactgcgaaatgggatcatgaatttactaccctgagttggctcaagtcgactcgagccaactcaagtcgaaaagatcattcaggtccagcaggggatgattggggatgattggggattgtgtcccaataccaatcgaggttgtgcctcagagctgggagcttacgaggtccatctacgcgacatgtgccatactctagtcttactgcgcccaaaatagaggctagtacagcaagacaggatgatcgtccgaagctggtcgctctgctgtggcagacaagcatggcgagcaccttcaagtccggttcacgaacggaacaccctccgctcgctccgccatgaatgaacaccctacagtaagccaaataaacggcttgagataagcactataagtaaccatactcggtagagcaaacagaagggtctaggccccatcgcgctgccttttttcgtggtcagattggtaaggtggaataggcccctaatgacatagaaaggagcgatggacaccgttcctacacattaccacgtattgggtttcatttcaaccacaatccaagtgttccttttctcttgcccagttgttgcttcttttccctaacgctcgcttgatttgataaatatgggggtgcatttggttaagatcaagtcgccagctgagcggagaagtgcccgcgaaatcaagtaagaagcttcgaactataccacaggatgcggataggctaatgtctgttaccttaggtgctttcttggaggataaatacttaattgcacaattctacaggatgttcgtcttctcgcatagttgtcacgtctgaatagggctgaaggattgccatatatatatatatcgaaaatacactagcgctgtggtgctatacggacactggtcgaataatgattattatgatggacgataaatccttgctactagtgcatgaagcgcaatggtatatagacatgtattttgaggggtatgtatgtacagaacagggaaaagcaacgaagatccattttaaatcggacaattgggctaatgcatgggggcgtaaggtaagggggttcgtccatcaggctatgcaattgaatgacacgaaaagaatggaaataaaggaaaatagaagccaaacattcccaaaccgcttatctaacagttacaggaagtccctgcgggccccttggccgcggctatcatctgcgtcgtacgcagactgatatattagtgcttcctgtggccagtctccgtgttcgtcagacgtgccactgggctggtatgaatcacttcgccgggggaagtcaatgaccggggcgccggtgtttgggttcagggagtatcctgggctggggcggtaggggagagtctctgcggggagagccgactgcgatggagctgtggttgattgaccaaagtctccaaagtcgaaactgaaatcacgcctgtgcccccccgttgcctcattgctcggtgcatg

SEQ ID NO: 5484 - DNA, 6553 bp, Emericella nidulans
aagttccatgggatgcaagcaggattgtgccgccgctttccaggcaggatttgccaagtctgtctacctgtaaatagcgttagtcgacatagatatagcaagaagaaggtcaaattacaaaatcatctctcccagtcctggacctgcaaaccatgaatttatactcctcgccctgcgcgggaagtgtcgtgtcatacttggatgccctcccagacgagaagagcaagtaataccagctcctatgttgaaagataaacgtcgcttcgatacgatgatgccccgttgcattgtaggctagatggctcagtgtatctttggcgacatgcatagcatgcctctcctcctttgaaccttcatcccgtgtaaatgacgatggggcttgaaacagcccatcccattacgacccaaagttcagatatgatacaccatcaatctcgacccagttcccatcaatggcattgtatctgtcctcatttgtagagtaaataactgcgccgtgatccgtccagctctcgggcattaaactgggtgagatgtaagccctatcacgctgttgcgagagccgagtgttgagacggtatagtacatgtggtaggtttttgtggcctgatcgtagtggacatttggagcctataatttagttcgacctggatgatttataatagtgccgctggacagggcatcgcccactgcttttcaagggccagagagggtatcagcgttgtggatctaaatgccagagccggatctaaatgccagagccggttgagaagcggaagtatttttcatcggagatgcgttggtataaacccgggtcatgggcccagcagtctccagagcaggtgttaggggtggggtaggaggtgctggaaaggagggagagaaagaggtataggatgtaggtaaaggtgactttcatgtgggctagcgggagaagagataacgatccactaaggaattgattggagagcagaatatacggtgttggtaactgtaagagggtagactagaggacttaatgtttagactgggatatatggggtgtaagagttcatattctctttctcttggaggcgaaaacagattgaaatgtgacttcatacagagcagcgctagacaccgacgaacttagaatatcacatcgttgagggcaaaagtagattctcaggaactttagcaagcgacagatctgtagccctgcatcctaacactgttatttcagtccgattggtcatctgttagttggttaatggtcagtgcgccgctgtgtatacttcaatatgcaggtaccgcaattctgaaacaggcacttgcaatatttaacgtagggcagtagtctttgaaacgagcctacctacatggcaataaccctgagttcgtcgcagggtgcactgcagcagcctggcaaggacgcgttctgcttcttgcatcaacatgaaaccagcccaattcgacagataaccgaagcaggataatgtttaggccaacatgaaactaagatagaatagtcgcagcctgacatcacagacactagtaagtctctccgctaatggtcggcccagacggtatatgaaacaattaactgatgctccagggatgctggctctacagccgtaagtagtagacctggcaggaaccctcaatagaccaacagaaatggaatgggcatagaatgggcatggaacagtcatgtatgcctgaaacaggcgcagggtttacgagagacatcaaagggacctagaccagagcaagaattcgccgagcacgagcgttggtgctcgggtacagaagcaagccaataatggccagcccagatggttgaaccaacatagctgcggtttataatggatattggctggatatgtttcacctaagcgggtattcttctacaacagttgggtttaagtatatccgaaacaagacaatggataacttggggatgaggtcatgtaggtactaggctaccgccagcagttaactggaagacttgacttacatttacgtgttttaaaaggcagtccgtttggccactgatagcaagaattggcccctaatcttttaagaggtcgccccaaaatcagtttgacgtatatacctgatagggtaaggtttcgtctgcagtgttggcggtgaagaacccgatgatccgaactactatacaattcagagtgctgacaagatcacctatcagatctatagttggtgacagtctaaatgatgagtttgaaccgggaagggaaacaagtataagagtggagaagggggcggaaaggaacgggccggatgcagcacgggatatttttatagatcaggaaccaatggggttggaggtcttggtttgtcttccgagaagcgtgcagcaacttggtggcaatgcactccctgctttgcccctcctgaccttagcgctcagctgttccatatttacgcactcatcttggctagtgctaggcagtgccaacgctggcttcagcaacgaccctgggctgttacccttcgaggtaaggaacaatctaattgtctgcctgcttactctcttgcttctatgagtaaagaactgattgggcgctgaaaaggtggtatggggttagaatctgcttttgatagatagaaaccgtgccgcgggatccgaaatattgcaaggtgaatatttgcgggtaggctgcttttaatcaggtgtatcgatagaaccctgttgaaataaggaaaggcgattgaccgaaggtctaccccatggcaggagttgaggaggatagaccggtctaccagacccgggtatatatgaagtgccattctacgggtgaattcactgctcgtcatttcatgtactgagtctttctacatacatgtcctagttatcttaatcataatacatcatggccggtccctgccaattattctatcttgaagacttgcaggcaaaagacccgcataaggcatctgatgagcaatcacaaatacgagtaccaagcattgatagcaccgtcatcagcatcaacagcccacgcattgaagcaagctctgtcgcctccagtcttactctcgtggacgaaccaacgacaatgggtccaccagcatacggcaagctcttctacggccagaatagagatgaggagttggcgccccggcctctgcgtcctcgaagaagcgtacagtcatccctgccagatgttgagcccccaagctatacgcaactggccaccaaacctcttcctccaaccccgtctctctccagggattcgaggatgcagagaacaactagtccgcctgttgacaggggcaacgtgttcagtcccatctcgccactttcaagattggatatggccatccctgagcttgagagacctcgcaatgtggtggccacaaaccaagccgttgatggacctgggtgtccaactaagccaacgaatagttctactatctgcgttttctgtctcgatgtcgagcagccttctgcaagtggtcggactcatgaatctctggcaaaaagcactcgggaaactgctcgccaggtatcttcaacgccaacagaagctgtcccgttaaccaccttttcttacgaggcgaaggatatcagctctaaagcgagacataacagtgttttgacacgggcatttcagcgcctttggcccgcaaagctaattcgtcaccggaacccggcaatccgtccttcgtcagcctcagctcaccgtccacccactccattcgtgagagtagagccacacactcagaggcaaccacgtccagctggcgcagcacctcccactccaattacccgcatgaagcgggtgctctcagttctgatggacgagaggatgtccctctacctcaacaatcttgtcgctgcagctgtggatgagtccctcatcagagacacccaggttctggtagtagacagcgtccagtcagcgcgcccttcaattcagggatccacctgcgacagatcaccagtggatcatccaagcttgcgccgtccagtttgcagcttgtacgaattggacggtgtgccattgactcctggggacgctacaacgacaccacatcctgggaactcaattttccaccgcattatgcaagaggttgacgacctaccagacttgttctcactagccctagttaacaaggcttcttacctcgcgtttaagtcagatgagcttggtctcatgaagggcacgctaaaaaaatctcccctcccgcatgggagctccgcgagataaaggaggcgggtggtaacaccgagaaaccaggtaaccaagcattcacagccaatctgtatcttcgccactacacccgggatctcatacatctagcgaatattaagttcctgctccaagaccactgtgagccactcctgaataaggacatggtagctggtctccgcgacccgtacgatacccgcgctgaaagagtcgatgcagctatctggcgagtatggatattctgccagttatttggaaaccgaaaagaccgtgaaaacgacttccagggtcaaagccggtggcttcggggacaacgaacaaccggtgctttggagcttccgcaggtttgcaggacttctccagaccctgccgactttaacacagtgctgttttcgcctcctgacggattcgcgcagggaaatccagccactggtctctcgagacagcagcttttggacatggtggatatctgggtagcaatgggacagctgatggaatgcctccggaagcaaactcgtcttgcgcggcaacatggagtattcgactctgcagaaacaccgcctaatactgcgagagaggagctgcgcatgcttcgtaagttgtgtccttggccttatcctgtatagctgtgtactgatccacattcatgatgcaggagcctggctcgacttcatcctcaccttaggaccagctgccgttctagaactggtgccggccggtccaaattcagatccagcgcgggcttttggtcgggcaaaggctaatggatggactcagtggtcaccccctccactcaaggcgcccagatccaacttcctggttggtatagtccgctctttgttgcaaaccatgcctgataacgactttgatggaaatgcgatatgaaacatgaatgcctgactaacaggaacgagagaattccttcctccacgatttgtgtttgtacatcatgaaaccttttcagccgtgtcaataatttagggctagtgagggctggaccctttaaagccctcatttccttgtgttgttatcttggcctttataatttcccagcagctttttgccagcattatgatagctacccattgaaggtatctcacgccacatttatcataaacatgcagcaaattttttagaccctagcacctaaacgcatgtctaccatccaggcctttcccccgtcttgccctaatacccgtcctcggagagaatgacttatatccctaggattagctagattaacgttgtcattgaatcagagacacgaaggaacccggtgcctgatcaggaccattttctagtcgtctcaatgctagacagtgtcacccgaggtaaccgctgtagccctagcccaaggcagaaagatatcatgaatgccgaactcagaaatatgtggcctggccgtgtgtttgtggtgtttcagcatgcttcatgcatacgtgtctcaccacgcggtaacttggtaccttggctctagaaaccggccgtgtctctacaccgcaccctagtttccatcaactagagcgggctgttcctgcctcatacacaacatacaatgcatgcaataagtgtgcataagtacaatgcccattctcatgaaaaggggaatgtcgcgttgcggatccaatagcaaaattgaactagcaagcgtccagggttcgaggaaccaggagctgtagggcagcagccatgtcttgggggcaaagctaataagtgcgccccagaggcacgggccaatcaaggctcttcagggatcaaactgctctgggccgggctggcccgcagaactttacagggctatcagaccaactgcctggttggtagatataggtcggcttggagaacgataactgtataaatgaagcattggcttgtctttgttgctttaattagcgtccacacgcgtccacactcaactaacgttcctaggtctttctggtcagagtcgagtaaaacgagcttgattgtcgcatgcaatttgcaagaatgatttgatgcaaggtttagtttagagaacgacggagtaagggggattgggccttgcctctgtgcacttaaattagaagcggacgttcggcctagacactatcgcaccgtctaaatgattggccataccaagtcctcaattgtgacggcttcgcgaagtgcctaactttggacaacggctgggtacttaaacacactctcgcttggcggcgagagatcccaattgacggtctacaccattgacctgaatcctggacagtggagtccgccacaaccccccccctaacgggtactcgggccgctcttacgaggcctagctccagacatgaacattagattatggccttggtagccactggtggttctcc

SEQ ID NO: 5485 - DNA, 4194 bp, Emericella nidulans
gcgagtgtgatcgaaagcgggttcaacggtggatctgaaagaagaagaacaagaagaagcatctggtgggtaatactcgcgacgagggccttccaaaggactcagagtttcagccatcgcatcctcgtaacttggaggagcttcctcctggaattcgtctgagttgatgggggccagagccgcagttggccttgggggtattggtggtcgctccgtatcttctgtccacggcgagcttggtgtgagaatgggacgcttaggcttatcttgcgtatttgtcgccattgcctctagcaatgctgctggcggggcgactccagaatatactcgaacaggcaccctcagagggaggatgatcagttgtgactgtcgggaagtcagccggatactcctatggggcaagcagacgttgattagggtcacgtactttcaagttccctaccgtgccgtgagctaatccaacccgtacctcaagctcgtagctcctcgagatgttgcacgtttgaaaggatggagcaactgaaggaggtaagggcaagcggttccatagactagagtcaacgctccactcagtgcctgctggatcaccacctctcccaagagacatcgccatattgctacgactcatgatcacccaagagcctgtctctgttcgtttgagatcttgcgcctgaatataggtataagatagcaactcaatctgtagcatctgcaagaagacagtctcaaatgattcagacaactttttgaccagaatacgcattgggatgggctcattgcaggtgagaatcgaagggttcggtagacgtagttcagccgaaacgcggagagatgtcgcttcaagatcccttaaagatgcttttgaactcctgtgaaacagactttttggcgatggtgtcgggccgctagcgaactgatgttgccgtcttgcatacgcttcttccctgggattacccgtccttggcggctcgataggaagaaaagtcaggttagtgatctataaagctaaaggttagctcgtcggtagagcatagtcaaaattagggctggagaagaccccaacgttgctccacttactgctcgaaggttctctttgtagaactgaggacgaacaacggtagctttcacataatactttatttcggccatgcccggaaaacctgacagggatggaggaagagttcgtttcacatgacgattcgcctgcttggccatttcaaccttgagcccagaaatattgagattggtgagcatgctgttgtgcaggttgcacgaattattgaatggaaactgcgaattatcagtctttgatcaaggccaaaagtatatgacctactcaccttgaactggaagggatactcatatctacctggggcgaatgtccaggcagtagtaggagacgattgagtactgaccagcgctgggtctggaaagaggtctgttaccttatacagaagctggcaaaagaggtgagtattttcctcgcataagaagagcataaaatatagtagaaaatagacataccttgtggacttcaagctctgtgcgtttcttgtctgagtgctcattatgcgggtacttgggcccagcaagtcgcgtgcgactctctgcctctaatttgacctggataccggccaccgaagtctcagattgcagagagaggataacctttccagtgaggtagtcgaggttggtgagatgtttgtgcggccggtctaggtggatagcaaccgacatggcgttgttcggagtactggcggaagcggaggatggtccagcctcagagcgatttcattcacgccacaagctcaacacgggcagactatctctcagaaatcctgtgcagtctgctaccaacttcctgtggggtaaaaagatgcggaaagagaaactgttggcaaatcgggacgaactacagaaaatatacggaagaaggaatgacgttaaagctgaaaggccggccgtggggcagaaggacctaagaagatctcggcgggttcggtcgtcggggacgatgctagcaacaatgatctttgggaagggatgattctggttcgcaactatgtctccctatcgtgtagtcattatcttgttatacaattggcaaaatatatcctatttggctgccttctagtgactccaatattcgacttgcaatttaaagtaagccactccgggtgtgcccatggccatgatccagatgcaccgccacccttgacgacccttgtttgtccagtcaacttggttggaaactgcttgttgacgaattgtcacaactgtgaggcaacctaggaagggcgaatcagaaaaggtatgcatgtcgctgtgctggcccgcctcctcgcggacatgtgcatagccgagatacactccatagggcttttctaggcaccaaaatttcatggtccaatatttacacatacatatccgagcccctttatagaccctccttggcaagcatatctgggaaacaagttcagtttagccttgctcgtgcaaatgcatatgacgcaaacagctttacacgtaccagcaatgtccaagtaaaacgcgacggcattgaagctagaaggtccaaaattagccacaagctatgaccagtagtcagcagcacttactttggtctctggccagtgatctcgccggcaagccacttgagtcgattactccaattgatgaggtccaagtgactgacccccataagggtccccttgtaagctccccacttgctgcttgctacgctgactagcccatcattgtacccttcaagttgttgtagaagacggtgggataagcggaagaccgaccaaaatcttggctccatgactgctccataggaataatatctgcgatatcagccttacgaaaactgatccccgaacgaagacataccgaatatcttcgatatttggggtctgagggttgaaagtcttctccatatactcgcacgtgagctgagagaatgcccctgactcgatcctgatcttctcgaggaggtaatagagctgggccaaccgatcatctagaaacaaaccctgttagcacgagacaatgaaggttccttatgagcgcaccgcctatctgctgaagaagataatctgctacggcggagcctgtaagcaattagcaacatttcttgagagcgcagatatctacacacccctatgtggagtagcaatagtcgtcaatgacaagactttgaagttctcgggcttcagatgcgtgatcatatatcgagcatcaagcccgctttatttcccatcaatatgcggtacgagaaatgtgatacggtttgtgattatctcacccctgtgacgctggtcagcgacacgccatattaatggcatcgccgcagcttaccatgctatgtctgtgctctgttaaatgacagtccagtgatcaaagaataaatagacgtacgctactatatttacttctctcccccgtgcagccgacgcaatagtctcggccaatactttggctcgcatctcgattgaggccgacggaggcacacttgcggcaataacctcgacgcctttcagggagaatgcttccttaatgccccgccagtagtgaatcccagggagcaaaggcccggcaagtcgtagctcagaaaacccaagcaaaccgtgtgcgagtattatgggatgttttggggtatctgtcgaatggttatttgagagctccaataaagtctttatggacgtagcttcaaagactgaccataatgctctcggacaagcgcgtactcatctctaatgattttgccgaaatcttcaagacggggatcaggggaggcgcgtccactccgcgatgagaactgtcgtattgtgcggcctaggagactatatcgaaaagaaggacaacagctgatagcgcaagaactctgcagtgcggaggcactgccacaggaggctatcattattttatgattaactttcgaacaatattcaaacagcgtccgcgatgttaaaccgatctagacacgataatacgcagtgacgcaatttatgcctgaggccgtaaccacacgcctacatgccaaggaagtggtcgctggcgatatcaaaagcatgcatttggcatcctttagatagttgagatgctggaaaacacaaagacagaagctatgattccgtacttgaatgcaacggagttcgaacctagcagcgacggcctgtcagaaagttccat

SEQ ID NO: 5486 - DNA, 2772 bp, Emericella nidulans
tatacacggggctaatcaagcgcctgggaatgtcattccacttctgcttttgagcttcgtattgctcatggatctaagagttgtcatattagttccaggcctgccatgaccataacaattggaatgctcttacctctgcgtaactgagtttagccgcgacaagctccttctccatctcggccatttgttcaaccatagcgcgattctcattctgcacctcgacattccgtttcataatgcggtccatttcagtctgtagtttctgttccacctctgcgggctgttgatcaaccacgattttaagctctttcacctgcattcttaaagcatcgttaatatcagaaagctcttcgttctcaaccttcagatggacgacctctgaagcaagctgaacgtgttccttgtcggatgcctctgcttgctcctctagaagacggatgcgagcactttgcgtagctacggtatgcctcagatgattcaattcggcttcacgctctttttcagaacgctccttctcttcccactcagcagtgtatgcatttattgtcgctgggtcaagaggaatatcacaggcgtcctggaccataatgtcggcacggtaaatctccttgtccgcagcacctgatgacccaaagaaccctgattcgaggatggatgacggggtgggctgtttatcgatatatacatcgaacaatcgatccttcaaaaatgccgtcagaggtgccatgtccttcattgccagaagagcatctgaatttcgacgcatgattgcaagggcaaactttagaatagtactttccaagccttcttcgagaataagatcgtatattcgaagaaccagttgcaacggaaatcggtaggcaaataaggtcagaaaccattgagtagcgtagagctgggggtggactccccgccgccgtaaatgacaatacagggcaggctcgaaatcctcaagtagccgttcgaagatgtataagcaacggtgtaagccaggcatatcctggataaacatttccctcaaaccgtactggttcatgagttttaccagtagggtaaaagcttcagcctcgtccatctgtttccaaatcagtcacctggcactgacaattaatagcctagacagagtcgcaatccttacattgaacaagagcggcatgacaatgaagttcatcccttgggcatatcccacagcctcatcatatagagcataagccttacatagcccgaaaaggccttcctggttgccctgcgagacgaagtaacgggagtagctcgtgcgcgcacccagatctcgtcgaatcgctttctcaagtttctggagcttttggagcgctgccgcgttctccttcgcctgcttcttcctagccgtttcctgcgcgacttgttcttttgccaacttctcaggatcctgctcgtggggagtgctgggagatgaattactgttcgatggtgccgcagagatagatcgctctgatcgcgtagacgaacgtgaagaggcggctgagtctctttctgcgcaaccgttggccatgccattagcccgcgacttttccctatccgtaccccgtgcaataagttccttataaacttcttccagctctaggttcctgctgtccgccaggatctgccagatgaccccgcgaatggtctgcggaattcctcgtttgatagcagcattaagctcttcagaatttgtccctttcagaacctgtggtccttcgtttaccagttgctgccaaagctcccagtccacgggtgcagctgcgtcactcgcagatgccgaaaccccagatacggttcccggcgggagattcggattgactgttgaggttggcggtgtagaaggtgaaactgctggaagcgcggccgtaacatcgttctctccttcctcaggaatactgggagggctcgcaactgaatggctgatgctcgcgcggcccgatgtgcgtcccgacgcaacacttgcttcatcagtctccgggccatgcccttcctcacgcatcctgagcaatttgaactggtccttcaagctatttcgctggggctttctggaacctacgcttgagccatccacttctaggtcctgtgatcgaccagcaatgtcaggattgctaccaatcgtggagattgaagcagcagtgttccgtcgccctgactgtacagcatctttgcttcccgtagaagcccgagaaagccaggcaaaagggcttgtgatttttcgagtcggaggcggtgggggtgcggcggggggtgggagcttattttgtggtggaggagcccatggcacggaggggagactgccggataacccctggaggagagagctctgcgtggaggtggagtccctggatggcaaagcaggaggggagcctaactcggtctcctggttggacgggaaatgatcaagagaaccatcattattgaggttgccagtcaaattcacctcgtccagagatgaggtggaaagccgatgtgctgtcaacaagggggacttctgtagtttttgtttgcggggagtagcctcagcctcagactgtccatctgcaccagtttcatgaaattcatcatcagtcttactatcgtcgtcaggggttcgtgggagctgggttgcctctgtgaactgcggtgatgttgcattagaagcgctcggggggctgtccgtcagggatcgagtcgaagcgctctgagggatcgagagggaaaggttattaacggcatttggggcttccgaagagtcatggaaggagtcctaatcatgatataacccggtga

SEQ ID NO: 5487 - DNA, 4478 bp, Emericella nidulans
cacagctggcggcacctcaaagtggaattccacccgagcgcgcctgtctgccgttgggactgtgacggcccgcgaggggaagatccccacgcgacagggttcgacatcacgagagaggagcactaccctaccggccaggaagacgacgacgtgacgcacgaattgatgtccgacaaggaggaagagtactggggagacgcaccggacatttacgacctacgcaaccccaacatgttccggatgcgccccattgcagaacgcatcaaccctttgctcttggcgtttgcctcgtctctgcaacagcaaaagatgcccgcccttcaagatgccgagctgtttacgtggcttacgtggcggccctccaaggagagggcgaaggagtatgaagggagtgatgacgtgcctccaacttcgtatgaggaggagacggttatgttccgatggggggtgagatacgaggcgcctgccgttggaagaaattggaaagaaaaagtgacgtggcaggtcggtgatgactggaggccaaaggacgaagtcatcaaggcgtttgaggatctcgtgggcggagacgaggagaacatggagtggaaagcgtttgagtttgtggaagagagggagcaggatccggaggattatttatgagaaaagaatctctgccattcaaccaaaacgacttccctccctcgaatcgtccattttaccgacattttctattggcactcgcggtcagggaatcttgaattcgatccgatctgccccattaacgcctcagcaagaggaaacttcgggtcttaaacagatcagtctcagaccgtggattcactatcctccggtgtgaaccaacagccagcgacggggacgatctaagcgactctgatagcccattaggaagggggaatatccgttaccaggtcacaaattcctcgacaaacaggatcgtccgccctctttgttcaaataaacacaaacaaggaccagcgggcttagagatcgtccaatatagatccaagctatgtatgtagtgcatcagggagaagaacatatggaggggagatgcgagatacatggctatctaaaatggaacaatcccttgcgaaaatcccgtctctagaaagttatatatgaagtcggtccttctttgatcaagcccattatggacccaatctttcttcgtccggaaatacctgtataagggatcttatcgaggaaacctgcgaaggcattgcgggcaaataagatcaatcggggcattttgcacagttcttagaagagtataaaactgtctttccagctcagacgtattgagaaagcgaggatgaacgatatcagaaaggctgttgaacggtaagatcgaccttcccgcactgtccaagacccaatggggcttcgggatgcttcggcccgagaaattccattaatgtgggatggagggtggtacgtctgcactcaatggatattgcactgaacaattctgctctggtgatattcgacggaatatgtttcattgacagacaaaaacatattcgttcaagcgcaaagataagcaagggctctgcagaatttggtaatatattgtttattagcaaacctttggttcttcactacggaaattgagatactcaattcgttcactatatatgtatctacggagaaagcccgttccgggtgacgaggatatctatttcagggcaactcgcggactgggttgtcgtgggtccgccgaaagggtttttacaaccaagggtaaattgaaaacacctatccaaggggctgctttcttgccttagcaagtgcaagctcacgatgagggctaccaaaccattccatgagcctccctattttccaagatacttccatttcgtgtggattaaataccttcattgacagcatcagccgcacttccaaaggctccctgaggctattggacactcggggaatataagtatctttcgcaatttaccttcgtgttatataaagcttagtgattttaagcttttgacctcgcccaagcaatattctcaacactcgttcattaaagtctattagctctaattactgcggtcttgatcagaaacaggctatcgcagactcaagagcatacgctccggcgactcaataagctccttgaccttgctcgccatccttgccattgttgcaccgtccacaactcgatgatctgcactccaactaaagttcacaacctcgccttttgttacctgcccagcatcatcaaaaacaggaatcgttcttgccctcccgattccaagaatggccagctcgttggggacaagcactggactaacgtaggtgcctccaatgtttccaatattcgagaccgtgatcgtaccgccgctgaggtcggcaggggtgagtttgccttccttcccgagcgcgctaagacgcgagatctcttgggcaacatctaggatggaacgactgccgacatccttaatgttggggactatcaggccctgcggtgtatccattgcaatcccaatattgtgtcttgggcgcatgatgagttgcggcttgtcagcattgctggtgtcgagctttgcgttgagaatggggtagtcgtttagagcaagggacaccgctttgactacaaatgagaggaatgtgatcttcctcggatcgcttttgtcattggcaattttcttccgcagggctgtgatgttgttgatattgagctcgtcggcgtacccgaaatgcggaatcgtaagtgaccgtgtcattgtcttgaacatctgggtttggatgtgtgtcaggttaaccgctgtgtcggcgtcctgtgacagtgatggagttgcgctcggtgcgtcccgcatcgcgacaaaccggtggatatcctccttgagcactcgcccgtccttgcctgttcccttcacatcctcgatgttcacattcaattgtttaagcagcccgcggacagccggagtagcaagcgtagcatatcgtcctttcgcaccattgcttgggatttctgcggctggggaagctggtaacggggtagtcggacgaggtacaggttgcgaatcaatcgttgtccgcgctggtggagaggtctctgcgttcgactccgtgggaggatggtcttcagggtattgtgcatcgtctacttcgatgtcacaaagagcctataaacatgcactgattagcatagccaaaaaaatattgcgaggtagcttcttacccttcctgtggggacggtatcatctgcctgaaaatgtagctttttcacaattccctcatacctcgaagtgatctatatatgtatattagcacgcactaatgcatccagggccaagggaaaccaacatcggcaaccgctttatcagattgatactgacaaagcggcttccactcttcaacccttgctccttcctcaacataccactggatgatctggacctccgttatccctgtgaagcgagtctaatcagcaacaaggcttgagaagcacacaatgtcttgaaaaaggaatgagagaagacaaaggaaataccaactcaccttccccaacatctttcaggacctgagaccgtattccaccaagagccaaagcagcatggaaactccgggttgtaggacctatcgtaggccatgacgatcgaagaacactcaaggccgtacgagattgagaggacgtccaggccttagagaaaccccggctgcagcgtaagagattcatcatcaagcaggagctgtatagggaggaaagtgaaagaggagagaccaccagctgagaggaataaccatcaattaatgaaacccttctttatctccccgcattctgcttcggagcgccgacgataaccaacgttaaccgatgcatagcgtcacgtcacgtgtgggtctctccgcatcgtcgactgctggaccgattggataaatcacgtgcttcgaggaacaatctttgttagggcttgggatttagcagataagaatacggaggagattctatttgcataagtagattttagttaatcattgtcaaccccacccgggtctaggttctaccaggccagagtggctccataccgagagcccctgagcaggtctgatgtaggtattcaccgtgtgggtagtctccgtactcctgtaagtaactaagtagtaggcgggtagcttgtaggtaatctccgctgtaggtaattcccagccctaacatggcaccacgcgggatttactagtttgtaggtatttcccaatataaagaaggggttgctcaagtgtagagagaatattaacagaagtcctattctgtgtccttacattcattgaagagttcctagtagcgttcggccattcttcttaatcatggacgtgttcctcgacgttctagacacattcttcttcgaccgactttatgccctgatcttgccagcaaccaatccagtcgaagatacagtccgagagtctcaaaagcgtctcaaccagaatatcggctgttatgttccctagcccatcccgtacgt

SEQ ID NO: 5488 - DNA, 3258 bp, Emericella nidulans
agctgcattatctactgatattgagaacattctttttgaagcctttgaaaaggcataaatagcctatacagattgtagttagaagattaggaccctcaagaccttcaatgcagtcgctcattaccgatatcaatcacatgatcaaaatcgacgctagcaaccacctccaaagccgacaattatttacaaggccattctgggattgctgggaacgagctggcagacaagcttgcaaagcttgggtcctctatatacagccctaacatccccccatcccctgcatacctacgacgggaggcaaaacagtggcttcgtacagaggcatatacagcatatgctagtaaggcaccccaagcctacaagaccctggatatcagaccccatacaaaggaaagccgcacccgcgagcacaagcttccccgttgggtacttggccgactcgtcgccgcccgtacaggccacggagactttacggcataccaccagcgcttcaaccactcagactacctggagagctgctcttgtggcaagaccaagaccccagtacacttcttcttctgcccatacaccagaaagcgctggaaagatagatggagatgcataagggacggcccgtcaaaaacaatagactggctcttaagtacagctgccggggctgaagaattcagccgcatcgtgcaagaatcatccttcttcaaggatatatgcccgaactgggcccgccggagcgcttgatagtgcgacagtccacacatctacctggataaagggtacggcccctccccccaatctataggtagtcaaaacgggcatctgccctcgaagaccaggccagggtagcgccggatgcttcttccgctcatttccaacatatattgtccatagttgctgcttcaaacctgtatctagctagttttagggagttctgtttagacagcacgtccagatgccccctgggaggccgcagatcacgtgggccccgtgatccgccgagtgacgttaaataataaaaccaaaccaaaccaaaccaaaccaaccgaggtgataattggtcgatctagatattcatttttttaaacgaactatgcaggtcagggaactatgcaagtcagggccggcggaatatacaagcgcagtggcggtgatggtgataatgacgtaacattcatagtttatcttgtacagcgcgctctaaatctaagaagtactaacagtggtaaaagagagaaggctgacgtgggcagatttagaccgaagctttctcgacatgctccgagatctgcttggcctgggcgtccgcctctaattcagccaagccactacccttacgcccagcagcaacgtagcgcacgtctgtgtaatgcacggacggaacaaagcctttagagcgccaggcaacgggaaccttggcgtaaagggcatcgacctcccaaagggtaagacccttggtcttgtagatgcaggtccagacaaatattccagcaatcaagcagaatcctccccagatgaaaaacacctttgactggaggttggcatttcccggaccagagtcgaccatatatggggtggcgtaggcgatcgcccagttaagcagccagttcgcagcagtagtgatagagagacacttggcgcgagccttgagcgggaagagctcaccagtgacaacccacgcgaccggtccccatgaggacgcgaagaagaagatgtaaacgcagacgaaagcgataaggaccttgtttgcgacgccggagtcggtggttgtgccgacaatagccacaatgaactggctgacgcacataccgacggcgccaaaaagtagcagcgggcgacggccccatttctcgaccatccaaagtccgggtagggttgaaactacattgacgatgttcgttatcaaggtaatgacaaagctgttgttaatgccagagtgttggaagaatgtcgttccgtagtaaactgtgactgttagagacattgcgagccttctggttagggataagggtacgaacagatgaagtttacaccagccaactgctgaagtgcctggacagcgcagcctgttgccagacgcttaccaatggacccgcggagtatctcaaggtaactggctttgccaacgctgagctcatattcatggtttgccttaatctcttcaagttcttcgacaacagcgagatcgttgatgtccagacgacgaagacgggcaagagacttgatagcagcctcatggttgtcttgtttgatcaggaatctcggggtttcagggaggatgatcattcccacaaccaggatgatggcccaggcgaattgaaccgcgacgggaatgcggtagcaaccggtgtcattgcggtcttttgtagagttgttgtcaatagcggcaaggagtagaccgatagtgatcgcaagctgataagcaccgacaatagtgccacggatccacttgagagccgtctcagcctggtataaagaatctgttgcggagagcaatccatcgccaaacccggagaagaaacgtccagcatcgaacaagggaatggcggtggctgctgtctgcaagaccactccgaagcaaaatacaaaacagtcgaggatcatggcaatgcggcgaccaaagtaatcagcaactggggcgcccgtgagggcaccgaagaaggtaccggcggacaggagagaaacgatcatcgaggactgggaggaggtgacgtcggggatatggtcgttggggttaacgtagccggtagagaactgcctccgccagtatttcatggcgagaatgccgctgatagtaccagtatcatagctagagcatgttagggagacccaatgttgaccaacggaaggaacaagatactcacccgtacaagacgccaccaaaggccacaaacaggccgatcaggatagcaggggccgcagagcccgctgcatcatcaggcttcctaagcataaagcccatgatgaacgaagacgctaacagataaacaatgatataggccggcggcggggaagaataatggaggggaagcaaaacaagacgatcaacattctctccaccagtgggcacggggtagtcttttatatcccgaccagagatgcggaggaaacagccaggagttgaccatgcccggccgggggtacgatggggaaagctcgacgacgcaaacagaaaccgccaacccgccacaatcgatccagtagtcaagacggaaccggtgagtggcctgtcaatgccaactagcgcacgaaaggaaaaaatgtctc

SEQ ID NO: 5489 - DNA, 4932 bp, Emericella nidulans
tgttaatgcccgctcctgtcacccgtcgcattccgcccgggtcgctgtttcgcgcacctttcgtttgtccctctctccgcggttccgatccagagctctcgcgcatactacactcttgtcgtcttcggttttttgctttttagcaaacaatcttgcgattctcagcactaagtccctggttaaattgattcattgattccattatatcttcacgatgagtgtatgtccgccggcctaatgcgcccctggaaaactccctctgtagcgccgcttaggcgccctgtcgacaacctgctaatctacctcaatagtacggacaaagttacaaccaatatccggcgtacggagagcagcagtccaatccctatgccaacagccagggctacggccagaaccactatggtaaccaagatgttggtaagcgcgccgcctctctacgtggaattctactacacagactaaccacgctgaacgttcagagatgaaccccgtgcagcaccccgtggatcccaattcgctattcaatgacgttcagaagatcaaagagggcattgccacccttcgtaacctaagagagaatcgacttgccgtcgcccagaacgccctgctcgagtcgaactctccgagggaagacgacactgctcgccaggctttgaatgaaattcaggatgaaatctcgattggttatcagaagctaaatgatgacattgcgagggtcaagaagacgcccggatctgccactgtccaatcccagctcgaagttcagggccgtgctattcgcaacgaatttgaacaattccaaaagagtcaggtgtcctttcaaaaacgactgaaggagcaggtgcgtcgacgtgtccagctgaataacactgaggcttctcctgaagaaatcgatcaaactgtggaagctgtgctggctggcagggaacaaaccttccaggtaagaaatccgtgagtggcgtactacaatctatgctcactcatcctcaggttgcaggtgccagactaaagagaggccacgatgtacgggatgccgtagccgcgcgttctgaggaaatcagatcgattgaagcaaagcttgtggaagtgagcaatctggtcactacaatggcccaaatgatcgaacagcaagcaccagctgtagaacagatcgatcagggtgcagagaacgttgctcgggatcttgggaacgcgaacactcagctggggcaagctgttgaaagtgcgcgcaaggcccggaggtggaaatggtacgccttgatcatcgttagtaagtttcgccgcttcgacgcttcgacgcctattttagcaagtctaacaagccaccaagtcattatcattgccattattgtggctattgccgttgctgttacgcagacgagataaaggaaaaaagatctcttggctgggtttacgcctcagtaagcctatggtcaaaaatatccttccgtttgttatctccattgttcgattagttgtcctaccgccttgttcgaaacgaatttgcccctaagttctgggcctggtctggcgattatccgagttgggctgccgtgggagtctgtctgcacgcagggtaagccgaccctaggctcccgcctcgttctgtttcttccttttgttatgttatctggctataccacgtctcgccctgttccgtcctgtcgttgttcgaaaagcactcaatcaaaaccgttgtctgacaatgacctactgatgatcatgtacagttgcatctatgaggcggcttgacggttcctgtcgctgctcattggttaagatgcgcatgttattgtcgctgtatatattagactcttcgcttggtttcccttggcgctagaatttacgtgatagtcatcacctaataatcttaatatctttttgttactgggtatatataatctaatccacgttaacagctccatatcactgcccttgtctttccttctccctttgctcctcctccggtgtttttgtcttcaactgtagcgcatgaatcccaccctcccgactcatctcctctttcaacaaagcgtacaccatccgatgtctcgccggctgcatcttcgactggaacgcggatgatgtgatcgttacactggactaatcagcactgggtcaccgtcgccaggaggtatatatgtactggaaatgcgtctctttcgacgtcgatccttgcattggcgcatgatgcgcgtggagatgcgagtcattgcggattattaaagtggatggggaaaatgccgcagttatctagtacatagtacataattcatcagcaatcgactatggcgtctgatagagaggttgtagaggcagaaaaaagtggtaccttctctctcatgagatcttccatgggtgtagctgatgaggacatccttgggatggttgttgagaagaggcggcgggagaccaggccaagacggacgagaccaggcatttatattctatatgaggagagaaaaggtgaaaatgggaaggaagattgtatggttgctactggacgaggtcgattcaatgcagttttgagagtcatccgatttgatcgggaacggattggagagagcttcgtcgcccttttcggaatggtcggttcgtccccaggctctcaagtagccttctcaaaatccaggtcgttcttcgtgctggcctactctacggagtacgacgatctgtctacattcttctggattgaaggtatcttgaggtcgttagcctcaaccgcagttttatctgatcgcactcgcagcttaggaatcccagcttcatgacatcaacgggtcttttaatccaccgcagggacatgccaatcgtaccttgatcgcgtcgctcaatgcaccaacgcacattaatctccgcctcgaggggccttatctctcgccgcgcttctgcagcatccttcaactgcacatcgtgcccaacgttctttggcttcgctgtccgccgatccctcgcaacacttccgaacctccctcttttccgtgcgctgaaaaaccacgaccccgctcgtctcgcagttgtacataacccgtccttccgatcatttacgtacgggaaccttgtcgcagatgtagtcaaagcacaggatcagctgtggaattcatctggccgtggacgagatgggcttcggggtgaacgaatcgcatttctggcggagaatagctacgactacgtaggtaatgtttctcttggttgccttggttgccttgggtgcttaacgacttgcgcatttgctaataacggatggaccgtacagtgatcttgctttctatacttgcgagcgatgccattgcagtccctctgtcgactgggtttccaattcacgagttgaagtatatcatgaataactcccaggccggaatgttggttgctacggagcggtatgcggatatggcggagaagattatggaaggagagttggatcgacagcctattcttgacatgcgtgggaagattagaaccggtagctccgatgttggggctgtagagttggaaggtctcgatgggaacagtggtgggatgatgctttatacgtctgggacaacgaacaggccggtacgactcctggcggatctagcggatggttagtgactaacatattgcgaccagaaaggtgtggtgatcccgcagtctgcgctcgcgtcgcaggcggcgtcgttgctagaagcatggaagtatagcccgggtgacaggctcctacatctccttcccctgcatcatatccatggaacagtgaacgcaattataacgccagtcctatctgggtcctcgatcgagtttatgttcccatttaatcccaccgcggtgtggaaccgtctcgccgagccatttctaccagagggaacaaaagacaaaatcacattcctcaacgctgtgccaacgatttacaacagactcctatcaacctttcccactctttcacctcaggttcagtcggcatccaaagtcgccatttcccccgaacatctccggctcaacatctccggctccgcggcgctcccaacacctactaaaaaggcctggcaggatctcagcaacggtaacgtcttgcttgaacgctatgggatgacagaggtcgggatggcgcttagttgcggacttgactttacagaccgcgttgacggcagcgttggctggcctctaccatccgttgaagtccgactcgttgacaccgacacaaacaaggtcatccaacctggcgaggaaattgatggtagtggccgcgctcgcgagggagaaatccagcttcgcggccctaccatcttccgcgagtactggggcaacgagaaagcgacgcaagaaacgtttgccccagacgccgacggtaagggaccctggttcaaaacaggcgatgtcgcaacccgccgctctgtggagaccgctgggctagggaagagcggtgaatgggctaagggcccaatgtatttcattcagggtcgacgcagcgtcgacatcatcaaggtcggcggggaaaaggtcagcgcgctggaggttgagcgggaattgctttcgctgtatgtccatcaagttttgccctcttctctacaagaactaattgaggttaccaggccgcaaatcgctgaagcagccgtcgtcggtctcccttctgagcaatggggccaaaaagtcgtggccattgtcgtccttaattctgaggttgctgcgaggacaggccggaatgggaagtcctggggggtcctcgatatgcggtgggcgttgaaggaccgccttgcagcgtataagttgccgtctgagatgaaggttttggagggggcgattccaaggaatgcaatgggaaagggtacagttcttctactcacatcctttacttctttagtcccctgctaacatcggttttgccgtagtcaataagaagatgcttgttaaagaggtttttggtgtttaaagtggtggttgagacgtagggctgat

SEQ ID NO: 5490 - DNA, 4041 bp, Emericella nidulans
tgttcgtggcatgcacagtgcgggtcaagatgacgtggcctgccagagtgtcccatccatcctgaatgggaccgtcctacccagaattgggactgtcctcacaagtgcacagtcatccaagaatgtatttttggccttcttcttactccccttcaatgtgccctgcggtggttggccatccacatggcgctctcggagaaacccattaatccatagtctacgtgcagcaaacattctgccttaggtcccagatcttctataccttctattcggggtgataacctcggtaggtacatgcaaccagagaaggactatgcaaaaagcacagtagcgtgactttggaagccctaagtttctggccggccgaagagagcgcaacggtatgagcatgcggccaaatcttgagcaaataaaactctagtaatgtcaatataatattgtatctaacaaaggtgttattccatggctcttctgattcgaacttccctcctatccttacagtccatcgaggaccgcagctgcgagtgctctcatgttcagctacgctgcctcaacaattctcgtcacttcttatggatttactgagtcttgttgcaatagtacttgagccttaactgcagtgtcatgtaataaaaggccaataagagaagaaaaggagcaccaacaaacaattgaatgccgcgggctgaaagcgcaaggcgagaaatttgaatggtgatgacagagaaatggacgagcggatgtcgaggaggccatgagcgactcaatgtctgtgttgagacaagaaaaatgcaaccactctgacctgatactttgtttcttatgtagaaagtttaaagtttttaggatttacggttcccagggttgtcgggtgtatgcgatggactactctcaatcccccttggataaaatatgattaattagtcaaacagacattatgacagtttaatcccagttagtaccacgagattagaacaggagtagaagccactgcaagttctgctttgggctccctgtgtggctcatgttcagcccagtcctggttacctatacaggacaaaagcaccccgatctgcctcctttgtaccaaaaaggaaattcttgcgggatggtggcttgacggccgttgaattcatccgaattacctgatggggccgatatttagcgtgatttaattattggctagggataaatagacacctattggctccgctctcaatcggttatttatacaggccatggcctgcagcctgttctcatcagcttaagacagggccgtcagaatgttcatgagattcgcaagcaagtgcgcgtctccagcgaaagagagtgagggctaacaaggtggcaggccccaatgaacgccggaccatcagccgtgaggatctcggcttctacaacgccctagtcatcgcaggggtctacgaggtcaccgacaaagagatcgacgtgaaggcagccgcgtcctatatcactcctctgaaacattgtatccaggagtatccatttctaggtgttgtcgtcagagacaagcacactgagaagccattctacgagaaagtaccgagcatagacctcaacaaccacatctcagtcatccataatgaagatatcaacactcaaacagaaatcaaatccatagaggagttcctcctcccaattcttgaccggccttggccagccgatataccgccctggcgcattgtcgtcctccctctccctccacgcgacgagcaaacgacgcgcgtcttcatagccttttcattctcgcataccctgggcgatggcttggtaggacacgccttccaccagacctttctccacgcgttgcaagagcgtattgtggaggaagacagcgcctctctgatcaccccgtcaacccaacagctcccgccacccttcgacatcccctcgagactcccgatctcatggaagtttctcctaagcccgcttctagcagtctatctaccaagatgtctatccacactgctcggccttcgcgcagcggttaccaccatcgatgcaggaacttggaccggctcgcccatgttctttgacccgtcaacgcccaacagtagccgaatccgtctgcttgagattgattcgtcgcttgttcaagcggcgttgagggcctcaagggcacatgggtcgaaactgacgggcctaatacatcaaatgatcatcatggctttaagcagagtcctcccagatgagaaggtcacgaattatgtctcgggaacggcggtcgatttacggaggtctgtgggtattccgcgctgcgcttggggtctttatgtatctggacacaaccagacccatccacgcccgtctgatctgccagagaaagggtctccgtctacattcagcgatggattctggttgtccgccagatccatcaccgaggacctcgccctctgcgcaaccagtctccaggatcaggcaattggactgctccgatatgcgccgagcattaggaactggacggccggaaaggtagggcaacagagggactgttcgtatgaagtgagcaatttgcttgcattcgacagtgctgctcatgaagggggtaaatgcaaaatcaccaagatgatctttgcaaccccggcgaacgtggtcagtggcccgctggtgtttaatattatcagtgtcaagggtgggaactcggtcatcgcggtcaactggcaggttggagctctgggtgtgcctcacgaagaggaggacgattttgttaatgcggtctgtgattctattagatctgattttgagggtttgagcgtgcaatattgagacgtgtgcccgcaaggctcccgtgggatgcggagtttagggctgttgagcaaggtgactggcctgatatagggctgctggcttttccatggtcaagaccccgtcactatttggctctgaagccagcacacactggtaaatgttttccagtaatgcactattaacgcaatgtatagcatatttcgtattccaaaccgtcctgcttgccggcctgctggtatttatcatgttgactccggatgcggcgaggatagtcctataccgtaggcagtgtcttgtgaacccagtgacggcccccaaatcacgcaaccaaggtggaatgctcttcacacaaggaccgccaaactgtgggcagctcgaactcctgctgagtcatatcgcatccgtcgacctgcctacctagttctagtaacatgtggatataccaaattcaggcagcggccgacccagtcaaccctaggctgctctccgccgtcctatgatctttcgtacagccactgctgtgctgcagatcctataccctgtagtgagtagtggcaggagcctgtagatcactgccattagtttgtagacccacttctaggcgcagcctcgtattccgcctcgttaggctacatcgacccctcaaatgccgccagagtataaaaagcaccacaaaccagactctatggagctctggtccgctatctttccctctcttctctgggaagatggccattcgccttcctttgaaaatatacacctgtatattcaagcatctgcttgccgatgagagggatggtcgcaaacatgcattcaagctgcggctggtctcaaagactatccgagctatcattgaccctctactagacaggcaactcgggtctccatcagatcgtgcggtggagatcctctgccacagaatgatcgcacagcctggtctcggtgctcgagttgagcagatttgcctagaagaggacgaaggggcggaaaactcggaagacgagttcgaagacgagttcgaagacgagttcgaagacgaagacgaagacgaagatgaagaggaagacgaatcggaagacgaggacgaagacgacccgggttcagattccaatttaaaggcagaggctcgacggaaggctaaaagggaccgagatgtaataattgcagccgcagaagccatcaaacgcgcattcgagtccgaaacagcctcgaggtattcccaggccctgaagaagtacgatcctagtattctatagtgtcaactaaatcgta

SEQ ID NO: 5491 - DNA, 4722 bp, Emericella nidulans
cccgtgaggttacagagcagataacactaggccacatatggtctagcagctgataggagatctacgacgcaacaagctccagcttccaggttcgtttctccatcatcagtttacaagattatttggcgggggattagggctcgtatggccttgatcagtttctgatttgatagcgtttgaatcatcttttctctacaaatgcctcttcatcttatatcgcgccgtccttctccgaccacggcgtcgttcacggtttccaatgcctccaggcatacgagtaccgccgcaaagctcttcttctacttccaattccttcttcgtgggacagtactcgcgggcgtacttcttatacatgctgcgcggtttcgtcgcgcgttcttcagccatgacggccccattataccttggaccgcagtgtggtctagtccgctgggatccttcgtttgtcgtgttgctgatacctacaactttattggcatcgcccttgttagcatggtcctcatattcggcgtttttaagaaaggctatacaggttcgtctccgtcatgcgcagcttgatgcggtctgcttaccatagctttgaaacagaagaatcccttttggtaatccgcggtttaggcattcaaacatccacatcttctcctacttatctatccaaggctgcgacaaggttcatcccaacgacagaaattcaagacattgtcatacacgaggctttcaaggggttcgaagtgcgcttctatttggcggtgattgttgtaggggagcctgaggtggttgtggtcttcccggtaaatctctcgattatgcgctcctctacagaaaacgcatgtgcttatgctattatgctcagaaactcctgccgaacagggcaaaacttgaagaagtctggagaggctctcggcattgcctgtacgactcaaagccataaagaatccagaaatttgctcttgataacatgctccgaggaacgccgaggctctttcgtgactaaaatttctacaaaggtatgtacaaatcattctgctccaccccctttgtcctttttgtccgttctccgctgctttgccgcgaggtatcttgcgttctggacttcaacagtatccatcttcctcttttgcgcgagagggagatattgccccttagctttgccctcgtttgctccaccaaagactctgtgcaccttattctgtttttcacgctctagattcttgatgtttccggttcgcatagcattctgatcaccttgttgaactactaggtctagcagtgcgccggccagaatttcgtccattttgcgttgccgccaaacagcccagaggtcatcgaccacgccgcccacgccgtatttccccgaccctttggcgtactcgctccttgcctgtctggtatctccagcgtagacccattccagggcatcctctcgcgtctcactgtcctttgctggaaagacgcaattccaaagaactagcggggcatcagatgccatctcgtacatcggtttgcgcgggtttttcgtcacgtcgagcaattcgcgcacgactgatggtgactccagtccttggccaacaagaaagagaatgccaaccatgtgtcttacttgatgccacaaaaaagcggagccttgcagattgaacacatatacctgacatccaggaggcactgagcctgcaggtttctgggtcaaagaatctgtgtcagggtagtttaatgcgctgaattccggccgattcacgtatcccaacgggctgttcctgggatcaagtagctcgatgtcggcacgatatatgattcgctcgaagttttcaatttgcttgcttgtatcaactttacaaaagttgcgaaagtcatgcacgccctcaaaatacttagcagcttcacgcatagcatcgatgtctagccacccctctcgatactttggaggcgcatcacccttccgtggaagaagcccaagagggcccggtgtcggggaaaatgcgggttgcgtgaagaaatacttgtagtgacgctcacgacaggagtaacgcgcatcaaaatcctctggtggatttgggcaccatgccagcacgcgaatatcctctggaagtgctttattcagcaggctgatgtagggtagctcatccgcaatatcatcccagtcctcatccgccaccgtttcacgtgtagtttccgcagtgtcattcgatacttgagcaggctttggctcctttcgcttcggccgagcactgcgaaccttaagcccaataacctggccaaaagcactaactccacgatccgtccttcccgccttggagtactcacacccctcccaactaatgttaaacggctcaatttctttcctttttgcctttcgatcgggaacatcctcatcccccatatccgttgggaaaatcagcctcgtcctcatgagcgccttccacatctcctcctcaatcgtcggcaaagccgttggattgttgttcgcatgctcgagaccctgatatcgctgccccaggtatgcaaattttaatgcgatgaagcggaagttgtactgtgaggggtccattttcttcggttgtttaggaggtcgcacagccggggtgtgcgtaatgtcgtcggggtcatattttcccgtcgcgagccatctagggacttctttttgtttgtctaaatgcgcttgcgtttttgtcggcgtggaggtggacgcggatggcgcgggtttgtattccgcattccgggaatgcagttggcgttctaactctgtaatccgttcaatgaggctggtcgtactccaagttgagtagtccgggttctgctgttcctgaacctcttgtatctgagccggctgctgttgttctttctgcgcttgttgactctggcctgcgagcgggccctgggggggggcattgccggacatgatacctgcacgaagagagtcgagttttgaaaggcccaagtggcgatgtcggcagaatatacggcttggattgacttgagacaagacgaacaggggtttcaactgaaatctccacatcccccggtgttcgtgagggatgtcgggcgtgtcttggtcgggaacctttcgctcgggcagctctgactccgagaaaaatcttgccccagtttgcggtgcattgttactgtagctgtattcgtattattaccgataagataaggcgccgataagataaaagagattttgggaagtgcgaagcctacgcttcaggcttgtgctttaagttgattcccaagctatgtaattgagaacatatatctccttgtgctgcattaaagatacccgtacggctatcccccttgactgttatgagccaaaaatgggtatcgagtaggatattttatccataattcggcgttgaaatcaaatagaaacaatttaatacattcgagatttgggcattagaaactccccaagtgaacggttgaccttgcaggtagtttatgatactcattcggtcactagctataccgctctcgcttttgaggttatgtcgcccagcgatttgcggaaagggcgaggtgctgagcttgtcggcgcggttataatgtaggaaaaatttctcttatttaggatgtccttggcagctggccccggctagttcattaatctaatatctatgcccatattcatacctactgtacgttcctgagcctggttgggagcccgccgcaatatacaaaatatgctagatggggttagtgggccatccttatcagctgtcttagctcagataaagttacctgtggccatgctcgatcctggccgatgtctgcttcaccgagaatttatcgtaaagcagcattctactgtcaatgaaatatagtttgtgaatatttgagaggaagacggattgctgaggatcaccaaaggtccgtgattattacatgccggcaatgacaaacccacaatctagggaggtacttgaaactccaatcacagtcctgttactcggcgacgcagggtgcggcaagtcgacttttctatcgtgcgtatacaccacaagcttccctagcactgagaatgggcattcatctccttcttacacccgggaacgggcataattaacaacccatcgcaggggacttaaaagtattaggaacggaaagacaggcaatgagccaatagacatccttcgtgacagcgaccaaccgttcgtttatgagattaatttctccaagaaatctttcacgctagagatttacgacacggcgagtccgaatcagcattggacgacgctccaaccggacgttgtgctcctcgcttttgatatttcgaatcgggcgacgttggatggtttgaaaagggtgagtttaaaccacaaaccagtccgttgcgtctataaagttatgccaaaaaaaaaaaaaaaattgtagctgatgccgtatcgtgtgttgaattacaggggcggaggacatatccgttcttttaacgggagaggcgaaccctccccttataagatgggtgaagaggatttttcagaaaagaaggtttctttcccacgcgcagttctacttttccaatttttggtccaatctctaataattttataatcatatatcttttcttcaaatttatgctacatctccatttccatttattttttatagtcactataatttccatatcctacctactattgtcttatactatgacttatttgcggtattctcatcatctctactactttatcatattataatatcatatcttaatttttatatata

SEQ ID NO: 5492 - DNA, 3392 bp, Emericella nidulans
taaaggcgcattagaaataagcacgaagctgtacacacatatgcctgggttgggaatagatccatccatcgaaccacctcgacaggacgccggggtagagccaagaaaacacaaagcgtcacgaaatcgaaatcgagtccatttggtttatatgacaaccgagttcgttcgacaaatgttcttggaatggaacgggatggtggggttcattgcacgtaaagtaggaggaaatcaccagctcaaatcgctttcattttcgtcttgacttctatattagatgacctaagcgatctcacgcttgccctccttgcgctccttctgcgcggtcgttagcaggtgttcaagcatttgacgcagttgttcagcctgtgggtggtgtagtccaacgtaccaaagccttagcggtaccgtgaagggcgtgtctgtggttgcgacggaacttggggtcgacacccttgagggaggggtaacggttggtcttgggcttcttgatactgttcggaagtgatattagcgatgcttccgtctaggagtcatgtgcggtgctggcaaaatgaacgttgtcgggtcgcatgtgctgtacgtcgttcaacagcttcacgcaatatccgctttcgccgatcaaggtgcatcatagccaggaggaatagaattgtacgcacccgttacggtgagccttctggctgcggtggtgctgagaggcgttctttgactctaagaggaaacagaaatgttagccactaatctcgatcgttcgggtgcgctgctgggccagttccagagcagagaaaattctcgcataataagggggcaacatactggccatcttgacagtttcgtcgcgactgaaagacggttgacgtgagttggcgggtgaggttatccagcgactgaggaaaaggcagagaggtccaaatgaggttcggctagggctcggcggtcagtttgtgtgggatttcgcttaccgagcatggctagcgtcacaaacaacttcctctacgactctatgtacgtgtctatctacggcggcaaacttgggaatcattctacagaacatggaaatccgaacctgctttatataatagtatcctcgctgtctcaagataatgcgtcaatttgtcctgatgaatgaggaaaagcgacccgaccgggaccacgtgattctacataggcgatctaataggcattttggtatcaacattggatccaaaacaccacaactcttcaaaggagagccgagcgctcaggagaaactttctcgtcgctcaagattgcttgaatgtcatttgagtatttgtcactgaggggactgcccccatggggacattcgcggaggacggaacaacgaataagccgaaaaacagaactgttgacacgggtgtcgttagcagctccagtgatgagtctgaaaaagtcgcaataaggtgaattgcaggcaataacggcggagttcagacgttgtcaggcgtagtcttaaagtattttgtagaactagtaggccggtgtttatgtgctagtcacgtgatctgaacgacgctagggaacaaccggcatccgaacgtcgacctttgcaactcgcaactccaagtcataagtgggagactgtccatcaccacctcttctaacacccatttgcaagatgatgacccctcttcgcttcgcccgctctgccctcagggcccgtcccgctgctttccgcgtgcctcttcagcgcagaggctacgccgaggccgtcaacgacaagatcaagctttcccttgtgctccctcatcaggtactactcgcccactgaattcctaagatatgcttgaggatttgagactgacactggctcttaatagaccattttccggtccaccgacgtgtatgtcactgcactgccccgtagggccagcacacagccggcctcgctcacccttccgcgcccttgctgacgtctatttagcgtccaggtcaacattcccgctgagtctggagagatgggtgttcttgccaaccacgttccctctattgagcagctgaagcccggtctcgtcgagatcgttgaggagggcggtgccagcaagaagtttttccgtacgtccgaccgacgacacaaatcgcgtcccgtctgatatcaattcaattcgagatcacatttacgactagtaatatcgctgacatacttctgcacagtttctggcggtttcgctgttgtccagcccgactcccagctgagcatcaacgctgttgagggtttcccccttgaggacttcagcgccgaggtacgtcttctcacatatgcgcttgattaagtagcaattctaacgagggttttcgcccccagaacgtccgcgcccagcttgctgaggcccagaagatcgccagcggtaacggcagcgagcaggacattgccgaggccaagattgagattgaggtaagtggatgatatatagagacttatgcattgggccaacctcagctaaccggattataggttctggagagcctccaggccgttctgaaatagatatctgatgtacatatccactcgcgcttcccaccttgaacctgtagaattataacaaaaccttacggctttcccgtcacaacgcggttctttcaataatacaataatgcatgtttatgaacgccgattagagggtagcctggcgaggtaagctgggggcagttgcttttatttccggatctgagtcgcaccttcctctatggcatcaatctcatctttcccctaaatcaatgcagttctctccagctctggattctccccgttttaactacttaatagttgacgaccccaattagacagtttgtttctctaggagtccaatctttgctgttttcgccgacacaccggtacgaaacaaccaagtacacattcagcgcaatggctgaagagttgccaaccaaccccccaacctcgttttcgcacgagtttggcttgatgggtgatgagaattaccttaccggttatctccttgaaacccctcggaggtggcatgtgaagaccacactttcagaacgacagggacctacttcgccatctttaattcaaaaccgttcgcgcacgcttgaccgtttcagcgacggtgacgactataagaggttgctctttacattccccatgttatattcggattcaacattggagagggaccctttttttgaccgtcgcgggatgcccttaaacccaaataatcgccaattttccgaaccggtgtcagtcttaaaatggatctatgggaagggacaaccggatttaactctcccctaagaataaaagcaccttatcaaataagtgatcaatccccccggggacaaccctttacgtttattcaacagtcttgaaaggttcaaaccgccaaacgcccaagcacctttttgccaaaaaa

SEQ ID NO: 5493 - DNA, 6398 bp, Emericella nidulans
ttgctcgttctgctgctggagactagcgaccaagcgctggcattgcatgcggccttgcaggtcacatggtagtttgttgcccccacgaaacaattccctgatgatgagcttctggtaatcaataagaataatggcggctttgataatgtgctccttggactgcatcgagtttttcgaagatttccacccggctagctccaaaaagaaatcatgtagcctgtcgtccaacccctggaccaggatactcaggttctttcgtcggtctgcttcggcaacacgatgcttttccctcaagacgtcctcaaatccagcggcgctcaacttccttttccggccacactgctgcagaggccgtttacgggtcctctgttctggtggtgggaataataagctcatgatctcgtcgatggaagcgactgaagggtccggtaacgacctgaatgagatctgcgattcaggcgaatctgaccaggaatccgcagagtatgccggggatggaggagagacagcaggtggcaacaccggtttagcagagaaggcctcatgtgtgctgggtgggctaggcaggaagttcctgttggtaatcggattgaacacgtcccgctgaggcatgttctgcggaagtggaggcaaggacctgcccatggtcatatctactgggctaggctccgaagagattgcgcgcaccccgctacttcaggtcagccatgtatgggctgaagaacgtcaagcacttacggaagagtgtagcgctgagagatatgatctgccataggagccattgcgtcgataaagagtcgatgtttctctgtctctgtagcttagagacaaagcttgtcgagtatatagcctaaacgcaaccttgtctcgtatcagttggggaaatcgtcggtccgtggcatgtacagcggtccggcggcgtggaacctagcagtggatgacagtctctgtaaagttgaacaaaagcagagatacgggcaaattatatgggtcaaggaaggagtggtcaatgagatgagagcaatggagttatccacgagagcttgagtgctagaagaaactcatgttggagtgggatgctacatgctttatatgtgaaatgaactagacgaggcgaggggaaggagggatgggcgagaatagtagactcgatgaaagtggaactagaactggagaccaggtgaggttctggatgtatcactgacagtgccagcaatccatgtcctgcgctctcgactgggaaacacaaccattcccccgattcccagctaattttcctcttcaacaatgacttacagatcgatcgttaggcatcctttcatttctttttgcctcaaccctaattacctttttacgttcattgcgcccgttttttttttcttttcttttcttttttttttcttttcttttcttttttttttctttttatcttagtatcatatcatccctcaccgtgtcctcgccgcggggtttgcagccttcagaacagccgcctcttacctctacaacttcgttcgaaaccaccatcgcctccatcacccccttaaccgaagtcctgctccttccattttcgtgagaaaaagtcccttttcttccatggggcgatccacgcggaaacgccacaaagattccgtcagagttcgacgctcaaagctaatccgttttggcggacgtctggggctcaactctctatcataaaatgcacggacgcgggacaatggcgattcgccaatcaagcgagtgatgatcgcatcatcgacatacccagtaggatgcaaaaccgcagaagcccttgatttgtcacccgtcgttgcggattcgatcttcacggggcgaacgatatgaagttctccttgcatagaagcctctaatactcaatagcaccaacctttttcgggcgccaaacaatatcatccactgcgtcagatctaggtcgattgatgcgtttttatcgtccggctaaacgcccctagatagacgcgacggaacttggacagtgcttccggcgcttaagtatgttcagacgagccaagactgcagatttgcagattcagagtgaagatcgttctctggattgtctatggagcacactgtacgaaacacaattgtcccggtacatctatgggaactcaagattgaggagaaactccagctcgagcaaccaaagctaccaagttgacgtccattggtataacctagaacgcactgttcggagctcgctgcatgggtaaactctccctaccgtgtaccaaagtacagtctgaaggggttccaaattggtccttatgcagaaccttcccgcgcacaggcattcgcaggatcccccagcagatctcgctttcgacagtgtgagatccaggacctaatagcacgaagcaaggcctttttacctccagtgtttcgttgcttggacgccgaaagtacgttgcagagaaaatcagcttcccagttgctcagcctttacggcgtggttgactgatttttttctgaactaattctacctatgtaccgcatctaaattgtacaaacaatggataactcgcgtacatactatgagcttatcaactccatctcctctcccgccgatctccagaatgaaaagcatgttcgaacatcgcatatccgggccgaggcaggcggactgagcctagaacgatcatagtggtggattcagatgtcgagatcgccacagtaacaaaagcctatccatctacttgggtcgtcacgactcgccaggagatcccggtaaccgggatttgccctgtcaatcatgcatttaacccgttctgactgtttcgtccttctgattcagatcccgagacggtccataacagtgctatgggtgtgggtcgcaatgctatttggaatccacgttggacatctccaacagacaggaaacattgccatccgtgcttagccactaccggagacacgagataaagctatgtggtgtgagtagtcatgaacctttgccaatttaggaaattcagcaagctgaactcatgggcgatgggacagatctgtggcggctgcgagaacaatggttcgaatatgcgcaaagtacggcatacgtgttcatctaccgggatgttatccctatgatttgcgcaataatttgttggtttggtgcatgccaccttggaagtggaagtggaggtggtgggccgtatgcattggcggatataacctgtcatctgtgagcagcttgtccccggattcaacgcaaaaaaggcgagaaccaggactctaatagggctaatgtttcccaggacccttcagggcgccacgttttcacctagacagtttctatgtcgatgattgtcatcctcacggccaattatggtttctcggatcttactcctcttactccagggcttccactggcttatgcagtttctgaccaacggtggcttcaaggtggaggtcatcgaactctgggcgtcgctccataagaaatgtgcgtccatgaaacaagccacgataatcgacatcgaatgtttatcttaaagtcggagcatgcgcttcgtaaatcaggcacgaacccatggagtacgattcacaaactctactccgttcgaaatgccgcaggtacactctagtcgaacaacaagtctcgctatgcttgaacagtttacagcggacttgagttggtatttctcaatcatcctcctaggcggcgatgtgcgcttcgaaaatgtctgaatctcttctaactcgccaggtctcgcttattctccgggatactgcatataatggtgtcccaggacgccctcaacgtccagaaaccattggatcagattcgagaggacggctcctgtgggggaaggcccaggccacaaaagaagcccgtaatagaaccgaacataagagtcggataatgtcgcaaaacaattgcaaaccattgctcaattgatttgttgcggagtatgactgatacaatcatcgagaatgagcgattgactgtgcaagactgttcagagcacattatctctgtttggagttggagctaggcccagtctcgaactaagacgagctaagaatagctccaagagtaacaaggctacgaagcgatgcatcagaaagtcaaaaggagcattgatctctctggacatgccacgattatcctcttgcaaaccttgtggatcacttcttcgtcttgtctccacgcgcggagttccagcggctcttactcaagttatctatctacaatgggcccgttcgagattcagcaatccaacagtccaatcactacctatcgtcctgcagactgcaaacccagggataatccatgcgtgcaaaggtggattgtatacaagatccagatgtcgccaagctccacgggtccttaatcgcgtttcttttttttctacctgcatgaagcgctgttcatggcttttttcggcgttttagcacttggcggtccgccctcaagacctggctatagttcctgtaaccaagtaggttttattgcttttgcgcgtatcctaactccacatttccggatactcagtgttcagtttggtcagttcatacacgtacttcaccacgcgtgctctttcttctacaattcgtgggttggcagccggtttagcatatcacagtcccgcacctatgttctaccctctagaataccgtaccacactataggttgaggccgccaatgtgctttgcagacaaaacagtcgttccagcactacccttgtactaggctactcgctgccgccccggccattcgttgtcgttgtttcggattccagccatagggccagggctgctcgtttcttcagcagccgagctgacagctcatgcgttcagaccaatcgatcgcatcccaccattcgatccagccactcattcatgttctctggattcagttcctgtaatggctcacgcagtactcagtccgatcacgatgttaactcgtcaatctatgacaaattgatcatctgttttctccacagccgctggtgtgcttcgcagttcctttctttcctcggctcccagatcagattgaatcgaagcttgctccgtacttcttcagtcgaccccttcccctacttaataaataactaccaggcatattactcgctctttgtatggggtgtttcgcctcaataaacaaaggaattctggatccaagcatttgacttaatagacaaccgggagttgacctcgcttggtagatacgtagtggcacattgaatacgtattcatgacaaatgaaggacattgaccgtggtgaagactacggaggggcgccaacctgcttacccacgattcctccaactcacagtggtgtataagagagcaacatgcacccaagactacagcaagaagatcttgtctatataaccagtccacatacagatcactcgatcttggcctcgaagttctatggcccactgcaccttcgccgcgggccgcgaaccccatcaatgtatggcatatcgcatcccctgcgaaccttggaatcgttccggccttccactgctcctggctgcaaaacgagtaggagacgtaccttataaacctaactatagtcaatagcacactttacattagacgtcaggaacccaccttccgaggcaaggcagtccaaggcgacacatcagcgatctgcaccctactagagatgcaaccgatctgaataatatgcataccttgattcccagtaggtgctctctacgccccctagaagccaaacgcatggaaaactggaaacgggttgagcaagcaaggcatggccatgcacttgttcgcggagaatttacatgtcagaagatgtgtctattgatactgttctcttgcggagacaagccttattggaacccctaatatttcttccatatgagttggccctacgaatatccctagccgctatcgatataatccttcggcgcatctgtagaacagctacagctacaggtacctgccgtcgcagtacagcgccccggcccgaacgcatgcatgagcatcatgcactgcactgaacccggtgtttgaaaaacaggttttgcccgtccataaattcacatcgatatccactctgcagagggttgccccaatagagcgagtggaattgggtatccgcggtctggaagcagagcttggtgacacagggtacgcagttacaggggctatcgtctgcatatttaaaacagaccagttgcatgtttctgttggcctcaccgaactgggatcctagatcactgtttgcggtgtagtctcaacttataagccactatacacataatgagtgaagcggcccacgagaaagttctcaaagccctacttaccatggtaaaaccgggctataccatggacgggtcatgattatagatcttcgggccatccacgtaatatcaacacgtacttcattctggaaccaacaagtcagg

SEQ ID NO: 5494 - DNA, 2593 bp, Emericella nidulans
gactccctactatctcgttttgatttactgttcgttgtgacggacgacattgaagatgccagagacagaatggtgtctgagcatgttcttcgcatgcatcgttatcgccaacccggcacagaggaaggtgcacctgtacgagaacaactcaaccagacattgggcgttggtattgatgatgcagacgactccaatcaaccaactgatgtcttcgagaagttcaatgcaatgcttcatgtcggcattgccaacacaagcagaggacggaagaaggacattgaaatcctcagcatcccattcatcaagaagtacatccaatacgcgaagtcacggatcaagcccatcctcacaaagggcgctgctgaccatattgttgctacatactctgcacttcgaaacgatgagctgtcagcaaatcagcgacgaacatcgccaatcactgcccgtaccctagagacgctgattcgtctttcaacagcacacgccaaagcccgcctgtcaagccgggttgaggagagagatgccaaggtagcggaatctatcctgcgcttcgcgatgttcaaggaaatcgtggaagatgaacgccgcaagagaagaaaggtcaccaccttcgacgacgattctgagtccagcgacgacgactcagatgaggatggcgacgacgaccaaacccctacaaacgcctctgtcactcctcgctctacccggagaaacctacgtacccgagcgccagcagcagcccgttcttcgacaaacgaggacgtggaaatggacgccgacggcgacaatgtctacgtgggtgaagatgatctgcacaatgcctgataccggggggagctggaccagtccagccaatcccaaatgtccggtgtgatgccccggccggcctcacagctcatcggttcccagacagacacttcacaaacacaaaatgcatccgcgtccgcgcccgcatcctcccagacaataacgcccgcgcgtctgacactcttccgacaagcactagggcctttgatgggcaccgcgcttttctcttcatcagacactgccgatcttgaggagcttattggtgccgtgaacgcggctatccgttcttctcgctcactaggcggcgaatcggcggtcttccagcggccggaggcaatccaagctttgaaagctatgaatgagagaaacgaattgatgtaagtggttacctttaccgttctcttcttcaacattcattaacacctgtcttttttatttacaggtacctcgaagacgacgagactgtctacaggatttagacgatactaccttagtacatagtacctaacgaaagccgtcatgtgtttgggaatcagttgatggtggatatactgcatacttggatttccctgtttgttcatgaggtttacgtatattttctcataaacctcaacatctattagttcattctaccaggcgtttttgcggtgtgtgagcggatacgcaatgcaaataagtttcaaccgtttctggcactgagcatgttttactcggaagtctttattttagaaaacaggtatagttcagccagagctcctggcctactggaaaaagaaaggtcggtcatcaatgcaatccactaagccttacgttatatcttaatgctggggctcctggcaagtacttaagacggaaaagaatgatgttggggagacttgaacaacccaagatcccaaatgcaaccgatatttattatgttgggtataatatattaatattaaaaacaaacaagaccagcatactgagcaagtcgtaatggaaatcatcagatatcgtcttctttcttctccttgtttacagccagtcccagcgttgaggctgagtcgtctgacgcaatagacggcgggtatacgccctcccgaatctgtgcttgcgtcaaaggagacaagccacggttcagtgtcttcgatccggtcctttttcgacgtggggactgttcgatgctcgagcccggcgtagatggtgtgaggctacctcgtcggggacggccagagccagatgatctggacggcggccggtcatccgtgtctattggggtggtgctgcgtgagggtgtacgagaatgtgagtcggaacgcgtcgagcgtcgaaggggtgatttcgattcatgggctaacttggaaatgctcgggtgcgaatgatgggcatgacggtggcctttatcgttttcaatggacctatgtagtgtggcggcggcgagccgacgacgtcgcgacgcattcctgccaagtccaatccaccaaaaccatgatccctcctgccgggctatctggcgctctctttgtcgcaatttctcgcgcaactgagcacgtcgttcattttctttatcccaaaagtcggtgcgatagtcatcccagttacctcggaattcgggggagaatagcttcggcagcaacagaagtcggatatggtctcctcccggactgagatcttcttccacaagcccggactccgggtcaatattgtagtaattttggagagagcggccaccgcgcttttcggataccggccggtcgaggtagtggaaatcacctactgcagaggtgaagaagggcgtggagaacgg

SEQ ID NO: 5495 - DNA, 9014 bp, Emericella nidulans
caagggcccagactgctctgactcgggctacgttgagctgggcgggtatacttcgttttttcccctctctctttctagtggagcgggcaaggtcctgcccgaatgagcaaacaaagatgagcgaggctttttttttttttgctttagccaatcgcagtttgggagctgaatctgaagctgacatgaggcggaaatcaaactcaaaatgctgcagatgcagagctgattgtgcaactcggtcgctgaaagtgatccgcccacttctttcactcgatttattcttatatgccgtgttcaaagtttccgcataccccggacgttctccagcgataggcatagcatgatgggcgctctcttgacagctcaatcgttgattggcctactgtgtgcaggtggcaccggcgacaccgagcccttctgaaattccgcatgttagatacttcgtgggaagtgccacttttccactaattagcgccaggctggctcaggggacaaagccggatgtcggaaagtggtccatggaaagaaagaccaccgccagggacagcgcggaggcggatacgtcccatttggtgagtttttaattctgtttcagaacaagcggagatcaaatagtcgaccagaacgcgaaacagtatttgccttgcttgatcctattgctgatgctagtggtttgttccacgaacttcctttagctgcactcttcatctctcaggcgcccgattggtcgaaagctggagaaggccgctggtgtgctgctatagctttttggctcgttgaacctattcggtcgttggttgttggtttcggcttcttcaactcattagtgaagggaatatgatgagaaattcctcagtagcaatcacgagcattctgctcaagtcctttcggcagaatttcagcgcaagcgcattaaggtaactggaacacggctcaaccgtaatcaacagtcagaatgggaacaactgttcatttgggagttagacaggggctccgcgaactgcagatagcgacggacatggtttaaccacatcatgcgtttcctattttgttttttccaattctcgtcccatagggatacttgtgtaagcgagctccttccatcaattgttggacaacgacgcgttcgaaacgctcaatcaaagctatggggttggctgctaggaagacataggaaattgaaatagcttcgacatggactgggttctctcgttcgttgtgtcgattttgaggggcagcaagactgtaaagggagcaatttgctgagttttttcaagcatatgtcaaccgggagcggccccggtcaagtcttcccagcgcgtgaaccatgtctggattaaccggaccccggtatattattgcaatcccagattgtggcgtttcggatatttaagagagccagctcatactccagtctcctcaaatttccttcctattacgtcagagagatctggtgtgacattgaagaagtcgaattctgtctgctgagcatataccaggaggcataatggcgcacttgaatgcttatttcttgcagacaacctcgggttcctggcaggtccatcatcaatcatcgacgataaatcttcagccgagtatgtcattatccagccagccttaaggggcggaaaactccaggttcttcttcatgcgcaggacatcgatatctccgtatgtatggaatcactagctcaattgttcaatgcaggaacaagtgctgacgagaaagttcggccaccaccatttgcattgtagaagctgcagtagatccgtgtgttttggttggcctgcggtaaactatcatatgcacacacgtgcaagaggacttcgatggcaaacggaggactgacaggactggcaagacagtttgacagaagagctcggatcctctgacctctgcacattgctgcttgcgcatgcagtttggaacgcggacgcgaggtgcgcaatgtagccgatctgatgcgtcaagttgtacgagaagattgggtctaacttccgcgcctgtcgggtcggccctctcaaaaggataagacgtgctcctgtccaatgtccaccgtgctcgtggggtggcaatcatcgtcccagaccgatggctaagtatttttgcagaaaaaaaaaatcaatgtatggagttgtgatatatcaaaaccccaagaatgcaccctcacagcaaaggatgcgcaagaatattttctttctttcctaccctcttcttttgtttggcgagaaggagggaccagtggaaagaacaatcgtgcgacgcagggcgctcgatcttttgggacaattgtgtagttctgtccgcctgttcctgttgaccacatctgggaccaaacggtgacagctcgtcgtaatgaatcattctcaggtctccaagtcgcagtcttcggctacgctcctgcaatgttcgggctattaattatgccattgttgctagccattccgggaggtgcatcctgcagtctgactgtcgagggctcgagggtttcccgtctactgggagccactgctgcagatccagatatagaccgaaatggcgcattccaaaaggtcgcacacgtgcattcgttcctggatcctgatggtatatccgatcccaccgccacgcggtaaatgcggccagtcgctgtcgccgggcctcgaggctgagaaggttcgacccgcggaaatactctgcatacgctttaagaggattgcgtgctctggctgaactctctgctggaagctagaacgccctagttgattatctattgttggagtttgacttgcaaattgccagcctggacagagcatagagtaaagcgtaagaagtgtaagcgtctcggcggtccgtggccaggcacagaaacactggcaaggtcgatagccaatgtccacatagtctggtaacaatattaagcctggattctgcactgattcttttcttttcttttcttttttcttctttttccttttccttctggctttcgtagaaagagatgttcttcaggcttgtgtcccgtcagtgcagtgttttagccttccggtctaagcgcggtcgaatcatgtcagtactagggatcacacgggtgccggagaatctaatctctctctcttgtcaaccctttacgacagtctatcagtctatcagtctaataaagaccgagacaaagatcgacaaaatgcagttgtctgtttcagtgacgaatcggtccttcccctccagaaagagaaatgggagtggggaggaggctgagctgaggtctctggagtctctacagcccactagagcctgcgaacggcagatgtgctggaagaatttcccggaataatgatgcttagaccaagcatcgataacggaagcgatcattattgatctaagaagtcgaattacctatcaaaatggcctcaggcagttacgtcgggacgcatttcatccaggcctaccgagattcgctttcaccggagcactgcgcaagaactgatagtattgtactctacagtaatagtttcttcaagcaccaacatcgcgggctaacatgatatttacttgaggtaccgacctgacagtcggacaattagacagtcagattaattaatggattcaccgcaaatcgacgctgcggctacggactcagtgtggagttatctctacgctatcgtcaaatgcaaatgtctgacagtctgcaggtcaacaaggtacgtaacacctcgccctttgccatgacaagatatccttcttactgcatccttgcgaatttggcagctaccgagcatctcgtcgccgcttgatcctgctcgttgcctgagagtcagggctcctgcagttctttcacgcttcccaagatggcagttcgatatctgcgccaagttctgaactgggcttagctcgttccagacgatggagaccaggggtctcgggatcacccttggccacctagtccagcaactagcagtagaggtggtcgtagaaagttgtcctatccagcacgttatctctgcttagtgctagcctcctctagctgcctacagccgaagatcgaccgtttctctctcggttctctttgacaaatgatttcttgtttaattgcgagtggttgaacggagagtcaatgtcttattggtgttataccgccgtcaaaaatagctaggatcgagtctgattggcgggatcgagacaagcaaaacggatgacgagactggacgtgatatattgaccctgaagagctagaaggcgggcgaatcagattcatgaagcagcagtagcacttgcgatgagcatagcctgtgaaagacggactggcgacggaggcaaaccagaaaggcgggacaccggtcatcttttctaaagcacctgtcagcgcattgtcaccgacttgccagtcgtgggcgaagtcagaggggtcgatcggtttgacatgaacaggggtaggcaagagagtataggtcatatcgtactattgacgggagagcgtcgtccaagccaatggggaatcgctctggacgggttaaagaggagccggcaaagaaagcaaaggacaggaaaaagcaaagacatgcaaagacatgcaagcgtcggtccagctttggagagtccacagagcgtatactgcttgcattgagggttctcaacgccacttcagctatcagcatcatcattgttgaacgtgaaccatcagtagctcgaattgagcgggatttcttcgcttacagcaatatatgatcgcctgatgagatcgcagcgcagggatagagatcatgacaggacccgagacaatggagtgtggtactggcggcagcagccaaaaagggtccgtcgacactactgtgtctgcctcgccaatcatgcttctgtcccatcaccgttcattccttgggcagcagatcccaaggcccatcttctctgcgttccccgacggggccggtcgcctgcttggctgcacgagttcgtcctttttattttatctttttattattctagaccccattcgggcaaagcggcatctagtgcattagcgggggccattggtttggttcctttgatcacgtcgctctagatcttgcacggtccctgctcccaaatgttgttaatagttctgtccttctccactcgactcaagatacatatagctgacatgctcgtcttcttctgatctacatttctgttgacccgaaagaagctcacccaggtctccaagtgcatatcgtcgatcgtttcttccaggttatcctcttctgtactctattgcaatcttttatcttagtctacacgttgttacatcatgaagagctctgttcccatttcatctgatgtatgggaggagaagaaagccttgattgctgccctatacaaggacgaagaatggccgctaaagcaagtcatcaagaagatccgctccgagaacttcaatccgaggtgagcctctcatgtccgtcgctcgttgcggtcttctaacgctttcacagtgagacccagttacgaagcaggttgaagaagtggcgtgtcaccaaaccttcccgtcagaccagagaacgcaccaaagagagtgtccgcagccctaagaccacaagttgttccaataataacggctccccaaacgcccaaacgcgttcacggctgccaccaacgacagcagaagtccccgcaacccagtcagagtggaccatgcccaacagagtagacgggcggcacagcttacctacaatgccccttccgtttggtcaacaagacatttccactgtctgggccccagcttcgagtcattcatcacctctaagttcgccaggaaagtcccgcgtggactctcttgcctctatggctatttccacttccagttacgaaccatcacgaacttcatccttggtagatagtgccttgctcgatagcaccccggcaatgactcccacttttgcaaactccccttatgctttggagaacgactcctgcttgcaaacagccgtgccaacaacgaccgcggtcccaccagtccagtgggcaatgccacagtggtatctggtgcccatggagacgggctctcaagccccatcgatgcccttttactcaacgggtcctttgactccgccaattgaccccatgatgctcccaatggccccacagacgccggagtttcatgattgcataaaatcatggaaacgcacattgtcttctccctatgacccagatcttgtttcagcaaagcttcagcaaccaccaaaatctcttgagcgaaaagtatcgcattcttcaaccataagcactagccagtacccaagtgggatggttaccccaacatctccttactgtcatgggcaatacccttctgtatgctcaccgggctacccctattctggttctgaatctcttgtgcatcggtcgagcattgatctctgagccctagactgtcacagcgtctatttatcgttacattattactgttgttatgtatctttttatccttttcttatgtctggtaccttttcttccgtggacatacggtcttgccaggttgcctggaattgctttttagagcctgcggtcgtgggccacgggtttctgccatgggccgcttttcttttcttttcctctttttggctactaggagttacaggatggtgcatgtgcggtaggctgggcgatgtgtgcattaaatggctacggacatattgaatgggattcaggctcgtttattgtacatagattccagggagagcattatataacatttttctagaactttgatacgggtcaattttgtccacataggcgctgacgtgctttgctcgggatttaattccgcctcgcagcgtgagctgtatatatgcgacatttttgtccgcctattttcgcggtcaggccatagcggagtccatagaatgtttatctttttatcgatgaattacggcagagtcaatttaccccatatccaaattgtgagtggtggcgacagatctggggttgtagcagtagatctgatccttaccgacaacctcggtatcttcccatcttggtttcgccttgcggggactcgtggagtagggacataccccgtaaatctgcggaagctcttccttaactttcttcagctcatcttgtatacaaaccagctcatttttcatacttgggtagtaatctagttactcccatctctgtctcaaaatgcgcgctatccaggttaaagaatacgtcaaggtgggcacttgtctagatatccccagtcattccttacgcagattcacattgctaatcaagaatagggtccactcgacctcacagtttccacccttccaactccgtccccctccccgtccgcctacctaattgaaatccactcggcagggacaaacttctttgacctgcttcaaatccgaggcaaataccagcaccagcctccgctcccatggatcagcggctctgagttcgcaggcacgattgccgccgtcccaacaacaagcgggccatggaaatacaaagtcggggaccgggtgttcggtgccacgcagggcgcgtatgccacgcatgtcctggcacccgagtcggctctgctccctgtaccgcagggttggagctttgaggatgcggcaggactgttcgttacggcgccaacatcgtatggtggactggtgcatcgggcaaatgtgcagcctggggagtgggtacttgttcatgcggctgctggaggtgttgggcttgcggcggtgcagattgccaaggcgcgcggagcgacagtgattgcgacggcggggaccgagagaaagagggaggttgcgaaagctttcggggcagactacgtgatcgattaccgggacaaggcctggccagagaaggtgaaggcgttgtgcgcagagcatcggagcgggaatggtaaggccggcgtagatgttgtttacgaccccgtcggcatgattgatctgagtttgaagtgtgtggcgtggaatgcgcggctgctggttattggatttgcggcaggaagtatagagaaggttgcgctgaaccgggtcttgttgaagaatgttagcattgtcggactgcactggggccagtatgcgaagtttgaaaccgagacggtgggcgccgtgtggaagggcatctttgatctgatcgcgcagggcaagttcaggggcacggctttcagggacgaaagctttgttgggttggagagtgtgcccagggcactgcaggcgctcggtggaagggagacatggggaaaggtcgtcgttcgaattatcgacgacaagggtagtaagtcgtaactacgttgatgatatccatggtaaatacactgtccataacgctggttatctgaatcagctcaattgatacaagtctatgtaggtgcgcaaggagtcatgctctcgtaggaatagaagaacatgaactatgaaggccctgaattcgtctagcaacttgaacatagttcgggaccagaaggtccagcaatccaactccgttcaggcacagccacaagacgtggcacatgtcgaccgtcctctgcaagagtccgtttctgcgtctgctgccacgcgtcaaggacacatggcaagctaacagggacagttggatagctcagttgcgtgaaggcagcttgaccatcgacaagttggtcagcagtcacatatgtagttggtcttcgtagaaacttgagaaaatatggcttacacagcctgtcactacatcatgaatagggacaggcactgtaagttacataagtgtatgtaataaccacatgataggttcgtgcaagtcattgttctgggtgctgtttgagttgaaatattgacaggaaaatttcacttcaagtagtggatgtatcttgcgctaaatgattagtcattatttcacgtgatattatggcaccatactcggaataagttgcggacgtgatagggaaagagacagttcagcgtctatgcatggctgagtgctctttttgcactagagatactcgcgctttgatcaggaaatccgaactaaggcggaataggggccgttttcgatacggtaactattttgacagggctgataatatacattt

SEQ ID NO: 5496 - DNA, 4605 bp, Emericella nidulans
catgatacgacacgccaatcccagccaacggtgccacgccctgtcccgactcctccggatgacgaacagcgcaaaccccgcccatcgtctgtggcctatgaggagagatagttgtccgagatagtggcgtccgagtggaaacgatttcacctagatcgctggctgaggtgccaccgaaaacccaacggcctctctcggaaaacgtccaatacaagtcctttgcaacttcaataacaccaccacccgatacgccgccgacgacgaccgccatggctcttcaaagcttcccttcaggcgctccattacatcctttgcccaaccctccagccgaaagacagcatagccctccttcatccaccatgaaagagtccgcaagtgtgaaacaaacaacctccacaagacaatcgcccgctgaaccgcaatccagcacatccgggtatgtgtctgactcagctgccgctcgctctagtcatgtttctccggctttgagccgcagctcaaaccgtgaaagcgacacgccttcttctccgggaccaagcgttgccgagagactggaagaaaagctaaagcttcgtcgggagcaacgcgacgttcctcagaattctctggctcagttcaacgttaagcagccgataaactcgaactcttcaacctcccagagcccagaacggaaggctccgccaggcgcctggccctcagacctgcgttctgagtcgtcttccagcagcctcaccgagtttcctgctctcgagcagtcgtctgtagaaacgagacagcatactaagacagcacctctgaagtcggcgatgagatctcagtctttggaccgaaaccaaccagcatctaccaaggtagctcgcagacggacagtcgcctttgccgagaacccactagaaccaccttctcaggccctagtaaaggtcgaccgtgaaacggctctgactcgaatacaatcccgggaagacggccccgcccattcgagccgctcgtcgtcaccaaacacatgccttaccctcgcgccctgccccaggtccatcccagttgcaggataccaggactggcacacaattgaagggctgcctcatctcgatatttgcccatcctgcataaagcagatgcgcaagtccaagttccgtgaccgcctcgtcctaagcccccccaaaccccgcgaagaaccagcccgctgctccatgagcgagccctggacccgtctcgcctgggtgcagactctcaagaagaagtatgaaaccctagacctccttcttgaaatcacccgtccgtcaaacacgcaaggcacgaagtcctgcactggccgcataatcaatgaacaacattggtaccgcatcatagacccagagacaggtctctacctaccgcaattcaacgtctgctccgcttgcgtccgcaacatccgcctccttatgcccgcccaccgcgataccttccagcgcagcacaacccctcaagaacgtgtctgcgacttcgtcactgatagccctcgcttcatccggtacatcgacgccctagaccttgcgtccaaccgtgcggagcaggatgacgcaccccctgacctgaaggaattcctctcctacgcccgccgcaaggtcgtcctgcgagactgccgccgcagccgcctcatattcaatacgtggcactacatgccgcaacttcctgagttcacggtctgcgaggactgctacgatgatattatatggccgcttgctaaggctaggtaccccatcgccagggagttctcgtctattatgcgccttcttccaaccgatacagggtctggaacccgagaggcgagctgtcaattatattcgccgcgaattcgggctaagtttattgacgctgtgcgacgggatgaccttccttttattaagtggatggcgttaacgaggtacgaggctgagaggcggtttcgggctcgccaagatgagttgttggagaatcaacgtcgggggtatgaatgctctggagaactacgaaaaaatttggaggattggaaacggtacgagtgatgttgctgtctatcttttcattttgttcccttttcttcactttcagtttctcttcgctttggcgcgtcatttaccaaagcgttacggctcttcgattcatgccaatcattgttaaggtgttgtggtgtatgtcttgtctattcctgttagtctatctgcattgcattgcgttgccttttccacctgtatccctcaatatcgtacaatatctcgccggttatgtacatagatagacctgtacagtatatgaaacaccggatatcaaccattaacaataaaaaagaagtgataataatagaaaaaaaagaaaaaaaaaagataaaaaaaagtgcagaagactatgcagtcatggaagccccctccttcagcaagtccgatacagtcccaaccctataacccctcctcttcagttcaggtagaacagtagccagcatcggcgccgtccagggcctccgatcgtgcacaatgataatactccccggtctgaccatactcaagacatgcgcagcgttcacccacggtacactgatttgcgggtcgtgcggatacacactccccagcacaagtcggaacccctgccgctgtacgagcgccctcattcgatctgtgaatagcccagagcctggtcggaaataccgtcccggtccgcccgcaccagcaggtatactctctccaacctcactcagtccctgcccttccgcattctcaacgccgcgggattgcttggacgacgatcgggtaccggccccagcaaaaagtgagtcctgctcggaatcatccagtttcacctcatcatgcgcctcagcctgtcttccagccattgcatagatccgctgaatccgactctgtaccgcctggatctgcgctgccagttcttgatcacttagatccttgctcggctcgtcgtgccatcgatggttcggaagttcgtgcccctgttcacagcatccctcataagaccctctcgccccgggatatggtcaccgataaggaagaatgtagccctcgcatcgttctcgcggagcagccgaaggatctccggcgtataatctgaaggtgcgtcatcgattgtgagagcgacgatgggttgcgcgccgggcttcaatttcgcacatgccagagaatatcggggtatttgcgtgcgaaataagagaccagaagatgagggggcttgtagatgatgtagaaggggagagttagtgtgaggagcgcaatgatggggagggcgagggttaggaggcgttggcgttttcggcgggagtggcggtaagagcggtagcagaacattctctttctagactctcttcccctatgtctctatatcccgtgcggcctctgctttagattggaagttgggagtttaggggagggagagatgtatgaaaataggtgaggagtgatgtaagagggaaagagagggacggaaaagggtcatggtggaggttccgaatccatttgaggatactcgggctcgagtgggaaggagacaacgaggacaagcattaatgctcaattgcaagcaaaaggtggatcaggttattgttctatcgcggcgatcttgaccctcatggtctcttctgagtttctgcacccctgagcctaaaactgggtcccaagcagctttaaaccggtttgggactggaagctgtggagtgccgcgcccatcttcatctttctgacacttcattggcatgcgttaatttagatttggttggcgtcgtaagaagttacgtaggttgcttgctgaaccgggatttccgaccataacgacgacaatatcctatgtattgagcagtttgtatcattattttatgattatctaccctaccagccctacaacttccgccggccatttcttaccccagatgatcgctcgtgagggaacccggccccccaccggcgcaaggaccctgatcttcccacgttcgctatcgacgtcagcgacgtaaaggaaccccatggtgctcgcgtcccggatctcagatgggctgctggtgggagaggcatgcgtaatagcaagaagagtgttggccagtgcagagggcgcagggcccgggacctttttcagcggcacgagtgcgccagcggcggcagcggcgctggcattggctgccgaattgaggccgggaagagaggatgcgctctctgcctcgttgtttcccgggaggaaggagtccgtcgtcaattgggcgggatcatagtcgtcctcgtcgttttggtcctcctctgccgacgaggtggtgtagttgtagagggctatagcgtcaaagtctagctgctgtgcgtgtggcgatagtgtaacatttgttgttgaagaggaggatatagacaatgccgatgaagccgtggtagggaccgggttgccgaagaagtatgttcgaatctgggactcgcgcactgccttcataaacgcagcgtcacgatcaacgcacccaccggattttgagagcttcactaccgagatacgctcatctgatgccgcagaagatgcacttgacgatggcttattatcgtagcttttcatcataagactgtacaaccgttccgagcctataaccagaatcgtcgtaactggcatcgt

SEQ ID NO: 5497 - DNA, 5146 bp, Emericella nidulans
tcagtgttcctcgcctctccgctgctcgtgtagcttcaccatcaagttgcccgcctttggtctcgtcccacgatggagatcaggcgtctttctactttggacacccctgttaagtcgcccgctggcgagatcaacttccttgctcgcgatcgagccgcatcggcatgccttaattccgccttcgccgaatgaaattcattctaacggcccctagtgaactagtgggactttgccattacggagaagtctcaccaaagctggcttggagaggtggcgcatcatctggacagctgaacctgtctgcaactgaatctcccttttactttcttgggacccagtgcccctctccgatggcgttcccgtgggctcgactcgctgcataagctatcgtggctgataacgtagcagctggacttgggggtctcctcaccctacgggattcagattgacaaacatgagttgcaaataaggtagagctaggccctgtggtcgtggcctgcatcggagtttcttcttgcatcaactacaaaaggtggacagacggcctgttcggtcaagtctttatactgtcccgatttcttcttgatcagagccactgcacctaggctgccctctcactattcatatcctggacatttttacagtctttcgctgcatttctcgcccttcgttcgaacttgacacttaaatcaaggcccaaccttttattcaaagtgtgaatcaagtgcacgacaactgtcttgggcacagaatatctacggctgccgtcataaagtacatcacgtctactcaaaatcgcgccgacgacatcaataggccggtcgaggattacgggtgaccactttctaaacagaggtggcattctgaattggcaatgcgcagtgagaatgatcatccgaaccttttcaaggattctggcaattctcgacttggaatagtctacccaatcatctgcataatttgcgccctcctgcttgctcggcgtatcagacatcgacaacgaacaaagtacattctaccgagggggcaaatggacacgccatccgagaaacatggtggcaaacagtcgcccggtctatcagacccggagctttcttactctacgcgtgacattcaccaccgtttgccgctgccttccgcttgcgatatcctgcatcctctgtcccattcaacgtcattgccttcgagtggctacctagccgctgtcttgatcgaagatcgaaaacagaagatggatcaggcctatcagcttgagggcgaatgcacttcaccgacaagtcccgattgcacgactgttggtgagtctgcattagtgggtttgcgaacggactgcaacctgctttctgggactgtgaaccctcctacgccgactgatgattcgtcccaagctacatctctcccaacaagacggagcacagatgtggctgatcggcaacatcccaattctctggactttggtgcatcttggtccgtccaaaagcgaggggaacatgtcgaattcttacgcgatgtggacgaagagggtgcccggacatggagacggtgtgtgattgaatacagctaacctatctctctgatgctgcatggatagcgtgccacaggtggtgttgggttttgtgtatttcattgcattttcctgtttggttattgcttggtctagtctgctttcctctcggttaatccgttccctctgaaaagatttccctttttcagctcctttctttttgcgtttgccacattgatgcaggtctcgagaagcggcgatttttgcctgggacccgccatgagttacggctttagttacgatgaatactagcaaaatgacacagacttcgctattgaactcccactctacgaaggcacaacatgtgtcaaggatatcttacatatgtacaaacatataaggccaatcgatataattagtcgcttgccctaggtactgcttagtcattggccgggtcccagcgggaccatagtgataggctgctgaaaccaacagcggacctggctgcagctacacggcagacaaggaacaacacggcagtctacctatgcacgagtgaatgcccaacttctcgtaaacgcccctcctcagcccctcttgctatcgcggcgaaaaaattaccgagaggcaaatcccagacgactcttccaaggacacttcggctttctccgtcgtcaccgaagagctctaacgagatgaccctaaccacctacccagctaccaccgacccctccgatctcgccgcgctgaacctctcccgcctcgtcgatcgtcttgagtttaatatcctttcaccaaatgcagatctgaaatccttgcggcgctcggagtaccagcggatcagagtgggcgtggtatgttcgacccagacagacattacaatcccaatcttacctatctatacgcaaccccgggtggatccgcatccatttccatatccatgagaggggctctagttaacattaccattcaagaacatagagtacgctcgcgccacccttcaggccctcgaacgcagcctaccccagatcaaacctgttgaccgacggcacgagctccagtctagtctttcgcgcaaccggcagacactcaagcaagtccagaacgtcctcgacgagatccaggctgaggaggagtcccgggtgtcggcacgcggagatgagtgggatcttggtgaagacgaggacgatgaggatgcagactcagagggagatgatctcctaaggacgccagacacggctggtgaggctacgccggaagatagttttgaggcgccggaggctgctagggagaaatccgatatagatgtcccagctaccaccatagtcgacgcaggttcatcaccatcacctacatcaacagcacccgtgcctggtcctgcactccgaaacagacatcagaacattgcaaccgcttcatcaccaacatcaaatctcaaaccaacagcaaccgcaacgggcacctccttgcacgacgctgcgaaaacttcagaacctcagactgcggatactgaagaggctctcgcaaccgaccgcctcgaacaagaaaacctcacctcctcccttctcgacctcgcgacacaactcaaaacctcctcccaacaattccaggcatctcttgaagccgaaaaatcggtcctcgctcgtgcagcggagggccttgatcgcaccacgggaaacctcgctgctgcagagcggcgaatgggcatgttgcgccggatgacggaagggaaggggtggtgggggcggatgatgctttatgcatggatttttgcgctgtgggtggttgcgatattgattgtgtttgtcggacccaaattgaggttttaaagagaaaacccaagggtcttggtcttgtcgtactttttttggactggttaatcatcactacttagatttacttttagcgtagcgaggtttctaggtgttttgggcgttcctagcctactcaaggctatcaattctccattttactctggtggtagttaagagcatagattatggctttgaattgttgaatagtcatcgcctgctatataaccactgagcaaccggagcgtgacacaggaaaagaaagaatcacgatactgaatgtatgaacctgccagcagtaaggttcgtccaacttagcacttataccgatacaccaaggacacgacgtttaacttcggaaaggatctagagaaggttgaccaagaatgcgtgacatataatagtttgcatacattgtttttgccttgtcgaatacatcaaaacgagtaggtagatgtgggatatatcattatccgattcgcaagcagacaaaaaagggaacaggagagaaggacaagggccatcccaggcaaagacatggcatggtagcaggcacctcgagtgacacggctagtgagggatagcctcatgctgtagataggaaagaaaagaaaagaaaaccccccctgctctgtgtcatgtggatatcggtaatgctgaaacaaagagctggctagatatcatctcaagacaatggaagacaaaggaaaagactgaggggaaaaatggggaaaaaaaaaaaaaagaaaataattataaaaagtatgaaagtctcaacgccaattgaaagatctttcgaaagaaatgtgcaacatggtatgacaataaaagcaaaatacagttcacatagcgtccggtctaaacgtcgagacaatcctcactcgatcattctataccgatcattaaatcagaccacagagtctcaggttctcttggataataatatctaccgagagcattagcgaaggaagaaccaactgtgaaggataatagcttaccatttacagctgccatgacaaatcggatctgtgtcgtgtctgtggcgcatgtgaaatgtgtgtagatctgcttctgctctgcttggttcagagagacgaagcggttgagtatgtagtcgcaggcagcggcgtagtcagcaccaccctcgtagtcggggaagtagttcttcatggggctgacagggagcttctccttaaagcggtcgatcttgttaaggaagagaataatcgaggtcttgacgaaccagcgggagttgcaaatggagtcgaacagagtgagagcttcctgcatacggtttacagtctcatcttcgaaaagcagctggtcgtattcggaaatggcgaccaggaaaagaatggtggtgacgttcttgaagcagtgaatccacttttttcgctcagaacgctgaccaccaacgtcgaacattcgataggtcagatcgccgctatgaaggtcgtttggcgattccaggggtctgtaacgtgagcgtatgacattctggttcgggggagggtcgtacctctggtcaatacgctcgatagagtcacacttccttggggttggccactcggccctttattattgaaaccttcataaatacttatggcggtctgttgtgtggtattacggtctcttgaaaagttccttatcaggctcttctagggacttctggttacccattctgaggcagtcgccctttactggcgttgattaaccgtttattttttttttcgtcctttttgctttttaactttgtttcccctatcatcactgagtgtgctttattcttataactctctattggtgctccctcgctctatttcttacttat

SEQ ID NO: 5498 - DNA, 6225 bp, Emericella nidulans
gcatgagagtgtgtctcttacaaccggcattacttctcagggaggatctgaaagaaggatgtggtggcctgttgtggcctgccggcatggtcctggccaaatatatgcttcgtcagcaccgtttcagtctggctgataagacaatgtctgtcgcctccacatattgctagacaacaagtccgactgactatcgacagtcttgagcttggagctggaggcgggcttgttgggttagcggttgcctctggatgcgaagttggcccacctcaaatatatattaccgaccaagtgccaatgcttccccttatgaaatcgaatatcgcgcttaataacctctcccggaaagtgaaagccgcggtcttagattggggcactaccctttcagacgagatcccccggcgtcccgatgttatcctcgccgctgattgtgtgtattttgagcctgcctttccactcttgatatcgacactgcgcgatcttttgggtcctgattccgtctgctatttctgtttcaagaaacgtagaagggcagaccttcggttcttaaagctagcaaagagagcatttcaggtcaccgagatcgatgatgaccctgaagccggaacatacaagcgcgaaaatatcaacctgtacacaatacgatcaaagcccggtacagggcatcattgtatcgacgggcgcgacactgcttaaatccaaatgacatgataaaatatttgtggatgagagaaaagtcagaagttgctgaatttctctaatgaacaaatatcagatatggtagaaatctagagttttatcgcatgggccccattcctatcaactgtcccaacaatcttactcccattaatgttcatcatgtcgccttctttcccaatcaatttgaccccggccttcttcaggtccgaaacaatctgctgcttttcaagtgctttcctagaccgtggctgattggaattagcagacgcctgagccatcttcttctgccggcgtctgaatctcgccttgtcttctcgggtcatttcctctttggttacgggcaccccgtctctcatcacgatctcaccagtggctctcgtggtctcgctcggtgcataaatctcctgaggagcgagtgctgccgatgcgcgtatagcaccaccggcagtgggttgagcatcctccatagtaattgttgccacgtccgtaaccacattgatgcttgcctgcggcgccttaggtttgtaatgccagttggagagcgtatctagttgagaactgatctccttccagaggttggtgatttcagtatgctctttcaggagcttctggtgcttcgggtcaacgtaatttgaatccgttgtccgaatatggtctgtttcgtagagctccgcaaggccctgctgcggtttgctgtcttcaatttcaacccgagccttttgggtaagttgtcggtctaacagcccgggacggcggcgtatgacttcgtcaaattctttggctatgattcgccgcttgatcaattcctctatactttcagacagttccgtggttaccacaggcacaggctttccaaccctctcaaaatccaagtcttcttctatgagtgagttgacaggcctctccgctgcccgagcttcgccggataccatccattctttcttagccacattagcagcttctaagcgtcgaatctcatctgcaatgcgcgcgcgctgcttctcgtgcgtcgattggtgggtacgaccaacaccaggctcattgtcactatcttgaactgatgcctcatcatcatcaaacaagtcacgtcgaacatccgccattgcacggtcaatgtcattgtcagtaatgcgtggctgcgtttgggtaacgggcgtgactttttggctgacgctttgcgaggtggaggtgcaaagaagtcagcgtacatgatatcacttgtattggagaaacccgccccagctgcagcagtaacatcctcgtcttcagaatctaactcagccatattatcaaaagtaggaccctcttcttcactagcgtcatcatcactttcactcaaatcatcatcaaccccgacagctttctcctgtttttgagaaagagtactagggcctcgtgcgtcaaggggattcgcatgccagttgatatcttcctcatcactttcgtcctccacgtcaccccgagcatctctttgctcgaatagctcagtttgtttattgaagtcatcgatggagaaaaagccgtcgttcaatccaaatcgatcttcaatgtatgtgccaaggttttcatcctcttcgtcgtacgggtcttcctctgtttgatgaactccatcctcgctctcctccaagtcgctctgagacgagtcttcagcctcaccgtctcgttcgccgccctgctcgttgtcatcgctgaaatcctccaagatatcctcaggctcatcagaagcatctctcaaggagttgataccatcttcagatgggctttcttctgaagaaccaggctgtcggttgttggcgcagacagtataatcgcgctgtatttcttgatcggcggaattaaagatacgtagagcttgctcccacacttggtctgaagtaaatccgtccacatataattgcctgagccgcaaaatggaggccgcgtgatgatcatcgtcaggccgcttccgttttttggagtttcgctgacgagtattttgagaatcgcagacagaactagcaagggaatccaagaatatttttgcagtatctaggacctcagtgcgcagcttttttgtcggccgaagaaagtcccagggagatagaagagccgagttaagcggcaaaggcgccaaatttgaggtaccaggtccatgtcggtcttgagttgcgctcattgctcaataaagcacgagaaaaagtcctattgtacgtggcggcgaattgatatgaaagaacggcctctgcgagcgcaagtataggaatcataagtattcgtaacgttgggtcaaaaaaaaaaaaaaaaaagtcaggtacggctgcctctctgcaaggatgctgacatttgatgggaaaaaaaaagtgcccagcggaagatctgaaattcgggactagccacttccggaaaagtgaccgccctagagcctggaagaataaatatacctagtatcaatagcggcacaaacaaagaccagcatgacaatgataatattgttgctgataacctgagtgctctgcagaatttaaggggtccttctaaaggggtccttctaatggggtcctaactttatcgcagtataatttttccacatacttgacttgcggtccatggcatattagccctctaactgacatgattagaaggagcgccaatattgatcaaatagcgctcactaaaaacccagttgtacaaaactttgcaaagtagtctaatgtcacatcgccagtaatcctcaggatcaacggcacatctactgagaaaaactgagattcaacgccggtaccacatgcgagttatcctcgtgtgcctcatcttcttctgaagttggaatatgccgtacattaatgcctcggatgtgggtggaccttggtacagttaatgatacagttaatgaacagaaggaagaaagagtcaacatacagccggggacatagacatcgacaggaacaatcctatcacaaccacggacgaccgagtaactgtagtggtaatagccaccaccgtttgcacaacttcccatgctaataacccagcgggggtcgggcatctgatcgtaaacctgtcggagagccggagccatcttattcgtcaaagtaccagcgacaatcatgacatccgactgtcgcggtgaagctctgaaaatgattccgaggcgatcttgatcatatctgggcgtggacaggtgcatcatttcgacggcacaacatgcgagtccaaaggtcataggccacagcgaactttgccgtgcccaatttgccacttggtcaagcgtcgtccttgcgttgttagcgaacgtacagtagagatacgggtaacatacaggacatattgcattgcaccctccttcttctcctgactcggcaaaggtacctctctccgcacttggccagacgcagtcagcgattgcccggcattgccttgtcgctcaagagccgttgccgccttgatagcggacgtcgaaagcaattccacccgctggtattgaggagcaaacgagcctcgattcgggcgcactgccagtggtcagtacgagtagggagataatgacaaacatcaaatatgtaccatgaagagtgcgtacgaacgcacgacctgatagcgaaaacatgtcctggttcctttattatcaggaaattgaagaagatgagtgagttgggtagttgtcgaagttatggagtttggccactcatcagtgaaattcattcagtatcagtggctattgaggtttgacccggatacaatctgcactaatggctccagcaggctgccgaacccggtccgttgtggccaagagcactctcgggacacaatattaattacaaaacctaagacctcattgggttaactattacacattacatgcataactaaatctgtgaactacagataccaggctgttctgtaactatatgtaaactctataccaaaagctacgatttgcaacccctggaaatgaactgaaaattagaatacaagggcgttgaaatcatttgcagaagacgccctgtcaaattcgtgaatttgtaatatttggagcactcagtatctacagttcgcctaccctgtgctcttcatgggtagcaatgctgtgaaacatctatcagcagctttaaggcttatagctcagtcgcaattggcattgtggattgactgagaactaggccgtgcccaggccttacgcctcagagcggctggtcctgttatctgcattgctgcttcctcgtaggcggtcagcaccttcactgtatccacaagggcactcactggccaaattgtgcttgccatgaacctggctcagctacctgtgcgcaggccggggtgcatagaccgtgaacatttcaacaggcaaaggattgtttcaccatcgcaaacccaaaactcttcgaagccaatgccagttgagtggtttctcaacgccctcggctagccagaaataccatcttcggatatttctcggtcgtaccttatatccgtcgaagtggctcccaaaatacatactgcacagctaattcgattagctacaaagcaagtctttgcctgtcagaatgccagggccaaagatagcctgtattggtgtgattggaaaagctgtaagatctccgactattttggtagtacagtctgaccgattgaaggataaccctttgcatatatcgctttttccaccataccttggatcagcgattgatttctcgttcctactgaactcctctctcgatatatttgaaatacgccagaagcaaacatctgttgatcaggaccttgggttattgcaggcggtcgatgagagactagcatcctatggctggatcacaacaaccgggttaaagttccttattatagttgatttaattggggatcagacctcatcagtcgtcaacgaggtccggggaagcgtacgtgctggcgttcgagaagctgacctcaaacccgtaagtactaccgattcttgagataacgtttactaattgtaacaggcttttagagcccttcaggcggcctatatacgattactccaaaaccccttctactcgccagatgaccatgccataatcaacggtgctgtgcaaggtacaaggccatcacagatcacagaccagagatttatcgctgaagtcaaccgtattggtaactcgtggggagctgtcaccagtaatgtatgatgccgtgaattgctactactactatctaatgcgtgatgaacacacctcccgacgttaactatcttcccaattttaagggagtaagcacctagctacacgatcaggtttctcaaagtcttggttctagcacgttggatgtattaaatacaagacttatgccatcacgacatggttttgctaaactcatgcactataggaaggtctctgggacagttcgaccactagtgaagccaaagcacacagtcaccgaggacgcatggacaattaggaatataccacagtaccgaacagtttaatcttatatgtctttgtccgtatcttccagtgcaataagtgtttcgttcacatcacgcggatcgcaaatggcccaaactccacctcccttagc

SEQ ID NO: 5499 - DNA, 7687 bp, Emericella nidulans
acgatttaggtgacactatagaatactaggatcacgccctgtattcccatatacttatttgtgacaaaagagtgtcgttatatttgtctcacataccctgtttggctgccatggctagcactcacggcatgatatccacttgcatcaatggctcagtcaggcccggactgacaaggtcagccgcagatgggagtgccggttttttttttcttatcaaaaatagccaatcatgcgcacctactgactgtttttgcaccttctagacatgcattatccagctgaaaatgttgctgtgtgactataaggtgtaagtccctgcttcaacaggctatatctacatattggggttgaccgatttattcgggttggattggtattacatattttaagcagcgggcagtttaggcatggtcagaaacccgccccaacccccgctttaccaagtgtaacagcaagacgtcctacaaacatatgctaagataaatatgttcatagaaatatcgtctagatcagatgctccttggcttgtgtggttgctctctttccctctactagaccagtatagttttggctatacccaaaacgtcaacctctgtgatagctcaggacagctcagggcaaggctgcaaaatgattacactgtattcatcaagacatgatattcccttatttaaaggttgtttcatgcactggcaacccacacctatctataaatgttaacaatcaattcaattataatattttctgattagcagtattaatcatttaattatttttctcgctctcgtaacctccctcccctcttctcctttgcagttgggagtaaccaattcaggaaaatactgcagggtcggcagcgggatctgccgaggtgaaatgcatccaaaaaaagccgtggattctggggaacaccaagtgtggtggacagtgagtgggacgaactgcccgtgcgtcgggtccgtgcagcattgttaggcaggaagatctgtagtaaatactttccatcacatctttgttctactgtcagaattgagcaactgagcaaatgctacaggctagcttcattgttgtcattttctccccaataaaacgctgtaaccatctcctatatcagacctgcatgcagacctcatgcaggggtactgccatagttagctagccatcactgcagcaaataggtccgacgccttctcactaaacgagaggcagagattgcgccacgtcagctccattgcgtcctttgcgcgcgtatatgccgtccgctcataagcactcaaggcgccctccagtttatcggcgaatatcgctgcaggcgtcgacgcagatgaagacacagtcaccaagtggagacgttccagttcctcagcaaggtccaggctatctgccatggccacattgacgcctctaccggcaaacggggtcatcagactggccgcgtctccgacgagcgcgatcccgcgctgatgtgcgtacggatacggcaccagaggcagcatgtacattggccttgtgatgatttcggcgtccgccacctgggactcaaaggctatcctcaacaggcgcttgatatcttctgaccagcttgcaaagaaatcgtcgtgcgtcaagaggagctcttgtagcgttttgggattggatgggagagaatttatcaggtcgtccgggttgaggagaggacacggtccagtgttatggttgtgcatggacgctagtagctcctttcgtactgcagccaggcatttggaatgcagaaacagacagacccgcaaggtaccgtggattgcccgctgcgcaagaagcagcttgttgtccccaaccacggcaaacgtgccactgcctatcatattgtccatgtccggatactgctctcgcgagatacggagatacattgtcatatagcagacgccactgtagattggcttgggggcgtttggaatcgcagcgcgaatccgtgaccaggcaccgtctgcgccaacgatcagatcgtatatctcttctgatatcggggtggtggcaatgctcgtgtcagtgaaccggagacactcttttcctttactcctgctgcaatttgctggtgtgatgtcgagcaccttggtgttccaccggatgcgctcctccgggatagactcgagaagaagctgaatgagcgcgttccgcgatatctccggccgttctccgtcgcctgtagtgtcagagagtacggtgccggttatgtctaggatcctggtttgctcggtgcatgcactctggacctccaggaactgagggtagagaccgcagcctttgatggcacgaagacctagctctcggtgcaaatccaggtttgcgcagggcacagagacctgagatggatcggggcttatcccgccgctcaaagacagtgaagtcgaaggaatgcgagctggccgtgagccgggaggctaaagtaagcccggctggaccggcaccgacgatggcaatcttgaagtcggactggcgtagcatcgtggttagtcaacgtaactcagttaaggtacaaagtcttcaggcttgtctagctttcatcatatatgatttctaccatagtagcctttgcatgagtcatacaggacggttggaagtgaattcccggattggccgtcaaggtcatgcagcgtaccacaggaatagagaggctgtgtgtattgcagagacatgtggtcgctatgtggttatatgagacaaaaagcaaatgggttacagtgtgacaaatgtgtagacacacgcgccggccagtggcagcatcgatcttgcctccagagcttgcgccggctcgacttggtgtgacaggctgcgctgcaaagtagggttggtgtcggtatccgccagttctagcgtatgcctagagttatctggtgacggcaccgttatgctcgatgtcttagcttgtgaagaagcaatggaggagtgttccacgtattaggggtcgcgaccattgcacaaaattatttgcgagctagagcattattatactatatcacctccagttctgctttgggtcaccattgtcctctcacttcgtagttcggtccgagaatgactttgactccattgatggaaagcttccatatcctcgcagtgctcctcagtagccagaaatgtctaatggtgcacctttcccccttgattaccgcggcactcgcaactacgggcctcgttttatacctgatcgctactcgacttttgtttcatccgctcgcaaaagtccccggaccccgcctggcggctctgaccaagtggtacgagttctactacgatgtagtctgtgatggagagtatgtgaagcatatcgagaagctccacataatatatggtatgcgagctttttctggtagttcacgtacaaatactgacccttcgcatgatcttccatcatccgaactggccccaaccaggtgcacgtcaacgatgctggggtctacaagagaacttttgccgttgcatcgccctttcctaagtccgagtttttctactcatctgtcggagtcggggacgcgattggagccatgacagacacgaagaaacatcgcgtccgccggtcaattctgggtccgcggttacgagccaaggcaattgccccttatacaccaagtttgcaaaagttggtcatcgcctgtatggatatcatggctggcaaggcgcgccagggcaaggtgatcaatctgttgcggtacacgcgtgccctaacggtagatgtgatttccgatttcacatttggacgcccgatgggtgtcgtcaatgaagcagaggaaatgccagacctgctaaatgatttggaggtgtttgggcggcacttccacatcctgaagcattttccgataagtcgcaagttgctagatatcatccctgaatcatttgcgcgcaagttgatgccactgccgggattcttcgagcttcgtgaggtattccccatgttttttctccaagccattgcaactgataaacacagaaagccaccactgccgtcaacgaagccgtggtagagagacaagctggcaagaccataagcaacaacaccgatggggcaagctttctagacctgcttcttaaccagatcgacgagaatcccagcgtgctggtcgatgaaggttgtgcattcatcaccggcgggagcgacaccacgggcttcaccatggagaacgcaacgtatcttatcctgagccatccacatattttgcagagtcttctccaggaactcgacactagcccacatatcagagatacctttgacctcgaccacatcctacgcctcccgtttctgactgctatcattaaagaaaccctccgtttatacactccggccccaagcccgttgccgcgcaccgtgcctgcagagggcatcgatgttcatggccacttcctccccggcggtgtgagttcgccctgacctgttttccagacaatagaacatatatatatatatattgaaatcaatatcgtaacgcgtcaggtgtattgtagacaatcctcacccactccctctacctaatccaccataacccggtgctcttcgcggacccgaaaagcttcaaaccagagcgatggctcgggacgcagggtaaggtgctggagcagtactatgtaccgtttagcaagggttcgcgttcgtgtattggcatggcgcttgcatatcacgaggtttacacctacctttcgcttctgttctcgcgattcgagatggagatcttcgagacaagtcagtcggacatggactggcgggaacatttttttgtcaagcgcaacgggcaactgaggattcggattgtgcgggatagatggactggcgaggctttcccaacaagggcagttgaggctgatttgagataatgtccatatcgctttggggatagttttcagttgtgcaggatccgccgtagacgggatattggtgtccttacttgggtacctatggtaataacccgtttctctggaccatggtaggtaccgtcctcgcgttattgtcgtccaagataacgggcagcagcccgtttattcactgggctgataagtatatgttaatgcaattcgcggatccctatataacccgccatgaatttatacacgctgcatacttatccgaagtacggttactgagcatgattgtcccatatacattctgctggtacttagctaggaccccaagcctgggaaatgtaagagaaataaagtgtctaccggaaagaatctttattgacaggcgtctccatcttgcacgcgctcgaaagtgggcatattcttccgactaatgtcttgtatcctccccatagcttccactccgctttaggattgttaaacgccgatgtgattggcaacaaaaagctaggtcctggccgtacaactaatgcaaaattcccacggtctcgattccgtgcaataatagtctcaagtactacttatccaattccaatagtctgggagatctgccccccgacaccgacactgacagtctctgcgcgatcatcaaaattctgttcgctagaaacagggccttctcggcgcccatcacattgctcgatgataggacctgtatacaggcttgctgctcgtctgtgatcgccgagcgaaccagaatctggttgccaggattgattgtcacatttgtcgagtcgtacgagaccggtgaatctaacaaagtaagagaaaatgtttctagtgctgtctctgccgggagatgagttacaaaagcaatacggccaacatcaacacccaaagacgcccaggatgtgcagttctcaacgacgtcacggaaccccaagtgaccgtgtccagaaacctgggcttggttgtcgcgtaagttacggcagaagtctagggctgttgagtcagggttcgagtcgtcgggcactttgacacgaagcagacagcgattgacgcatggtccgacgacagactcggccaactcggcgagaacaccacgagaggtcatgacgcaggcaaagataacatcgttgcgctggaccagacgggcaagcgccaacgcaatggcagcattgacaagggtagagaatgtgatgtcgactgtggacggcagactaacctcgcctattgcttcttgctgtatgatctccagaggtttctcgtttgtcgcgttcacctcctccggacggggcacctcagtcaagacggcatctcgcaggtatgctttccaaaaggccagtgcatctgggcgagttgaacgacacatatgcaggtggtgagaaaatggtactgcgttactcaatggtgacgccgagttcccataggcgcgagcaatatcgtaaaggatggcggacaacgagaccccgtcgaactgggcgtggcatagttgtagagtcagcctatgctcgcttggagacctagaaactaggataaacctcgttgataacgtcccgaggacattaccatccgtgcagagtggattgcagtcaagatgttcagcatcctcttgcacaaacggcgcgtcaatgcctttacatacagcctgaaccagttgggtttgaaactcggtgaacacagtccgtaaaggagggtgatgtctcactacagcctgacaggcggcgcgtaacctatcaacatccagcactccatggataatgaacgagtgcgaaaccaagctccagcattgaagaaaccaggcttgacactctgttaccggggtgacatcaactatatcagcctctggaggtaggcgcacttcagacggatcgtacggtctgtcaagcaaggagaaaggtgcgtagacggtgacagctcgggtttcaagggcccccaagccctgaaggtgctgcgcgagaccagaaacggtcggatatcggaagagctcactcactgacagggcagaagagagccgcttgttaatcctggacaccaacctgatagccatcagggagtgcccgccgttacggaaaaagctgtctgctacgccaacctcccttcccagaacaccagtgaattcttcccacactgcacgctcaatctcgcttgtgaatgcaggctctatttcccttcgaaacaaggattcagattcagatattgtagctgacgtgatggcagccctttgtgcgagaacatgtctgtcgaccttgccgatgttgttaattggcatcttgtccagcacatgtatcagctttggcaccatgtacgtaggaagcttggtgctcatgtactccagtaggtgcttttcaagtagccgattccgctgcggtgatagtggatcgttactgcatgcacccgggatgtaggggtcaaccggaaatcggaagagcacccgtgggccttgtcgatgaaagacggcatccagaccgccgcgctgcgaccgttgtcgggcccaactgatctcaatgtcccatcctgtctttttggccacgtcgaataggtcgattggcgccaatgctctcttgggtccgcgggcatttgaactccagctgacagaccggtgttttaggcagctcttggagaaacgtacatgtcccgtcgcaatcgtttctttaatggatattctcacggccagactgggagcatcgtgattttagcatttgcaaaggagtgagtccacccctttgctgaaggagccctgtattcttgaccttgaaaaacaggctgttagacgttgcggcaaacagcggacgtaaacgctatcgtgtgctatctttagccaatgctgcacatccgattttttgacaggaaagtg

SEQ ID NO: 5500 - DNA, 7044 bp, Emericella nidulans
  unsure (1)..(7044): unsure at all n locations
atacccccttccgggtaaaaaaacgagggaaagtatcaggggaaccacgcttcaagggaattcgctcgcgtaaaatgtggtacagcccttccaactgggcaaaaaccgacagcccaacttaagattgtcgcccgttgggacgttgtcaaagcaaggttcgtcctgcttgggatgtacctggcgaagttcaccttaacatttggaagatcgattttgccagcaaagttctcacatctggtctggaactggtcctgcacgaggaccgccgactgcnccgcagagcccaccgttaagacgggcaataggtggcgcagaagagccatcccggtagtatttggatactctgtatgaatcttggccacaaggttagtagataggcacagccggactaggagaattccacagtcggacggccggagttcttatatcactcggttctcctcgggaagaaccaacggccgtacccagagatcagcctaatcatgattcgtgatttattttgcaaattaatcccgctccatatttgacaccagcattgtgaagcatttatccgaagatgtaccgcacagcagtggagcgcattgcacaagcgatggtgcggtgcatcgatgacgcatgcgggaaagccagattgcttagctgttgcaattattggacaggagaatagcacgggatttccggttgatcaatcgtatggagtcgtacctaggcattgtaagcgatcggcggtctgcttacgacctaggtcatatgtgagggctaacgggttccagccggagttagtgccagtcagtagtatggggattggagtcattttggagatcgtcaacctgtttctccgcatatgtactccgcgctaactaccatagcggggaactcacggagtatgcctgaccctgcagctgccgggctcgaatctggagtcggcaattgcataggcgtaacggtttgtcttgccggtaagcgtactgtaacgaaacctgtgaggggatggcaaatgacctatgagcactcgtcagtagtaggtttcagtgttgcgcagaagatgaatgaaccaaagataggccgaggccagcctcgaaccgtccccagaccaggcttactctgccgattctcagtcccgtcgaagctttggcatcacggacgggccgcgcgaataacgcttatggtgcacatagagaacgctaaccattcacatggtctctgaaacttaaggaaatcaaaggcacagtagatcaaatcctgttcggttcagaataagggctgtaggcccgaaaaattagattcgtttagtacaatcattcataacgcacggcggccaacgatctggttcaatgcacatagttgctgcctggggaaagcgattgaatcaataaaatcaatgaacagaaagcaagagcgagcacgcacggtgcacttgatgggaggcaatgctggggtatcatatgcattactataaaagtcatagacgggaaacttgcgcgtagaatcaaatcatcagaatcttgtcagaggcatgatgaggcgtgctagtaagatggcccatgtttgcagcatccgaagactcgggaacggcgatttcgtaataggtaacgcaggaagaggcaggtcagaacagtcccttgaccgaagagaaaccagaatatgcgcttgtttgcccagcccaaacaggtacagagtgggcttagcaaactggagatgtagtgtcttattgcttcagcagtatcagctgtttcggcgatcattgcttgcacgtttgctgtcgtagacatctgctgatctaggattcctttaaagatcngcatattctcttccaacacctgctgtgcttgcgcctgggctactgcgatctcgtattggcgctgctggactttgtcaagattgtcagcccgttgctgaaactccgcgagcgacgattctatgcctcgaaggcgcttttgagattagcctatatatattttttttgcaacccccagacaagagcaaacctcggaaacgcttgcttcttcctcgtatatccgtactattcttgcgtagagccactcctagttgtattagagccaggacattaaatagacaagatatcgacttactagggaagaatctatattttccacgccctgtctgagttcggtaatatcatctttagtgattgacttcagcttagactgtagagacaacgcgagctcattatgcttctcggcattctgttgctgtgttaacgcaatctgctcgctccttaggagagattcatcgtgtatgtattgtaacatgtgtcttaaggattcagccgagtgcgatgaattctgaatgtcctgctcacattagacgcacacgcacggggatagcgaggctttgactgaccccttcgaggctcgataacccgagccgaaatcggtgaagtgttgaggatatgacctcggtaagtaggccaaggcgagtctccaggttatggaacatcctttcaagcagagtggacgtagactcttgcatttcccgcaacatttctttcctgagcagctcggttgattgcaaaaaggccctactcctggtggattcctcagcggctgttctaagcgcttcatgaaggccatcgctcagcttagcagagctgtggaggatggagttataggtttctaggatgtcttccttgtctatctcaatcctcgatgcttgacagatgattactgcattctgcttgctgttgctataagatgtccaccattggggccgtgactctaacaccctgatacatggctcaaagtctgatttcggcatattgtcgatgtcggttacgaagctgttcctggggtgccggccccaaagccctcttctaggtggctgaaaatgatccactgaacggcaagctgagggagtaggtatccccgcttcacgaagctcacatattgccagtctcgcggcgtaaagagaacgaacacgttccagagtgaggtaagtgtcagagccgcctgtactttccgcatttcgacctatagatttgcacgacgagacgagctttgtggcggcaagcttattgcaggacgaagacgaattgagcgtttcgagcagctgaagagcttttgtaaagagttcattgtgtttttgagttctcgagtcgagaaaggtgaccaggtcgacgtcctcaattgaattgagtatctgaaatggagccactagatccactgtgaacagggtgctgattttgatccttgaggaccttaccttccaaagtaacatctgcacgactgataactggaaaaagcaaggtatataggaagaaaatataaggggaaagtctaagcagggagactaagcgagcctccatcctaactcagaaccggtctttgagtagaaggagtgatagcggaaataatagtgatagtagtggtaagttcaaagggcaagtgactattggatgcaatggataaacgatggacagggatgttaacgaattaagcaaggaaacgctaagaagacaagagcaagacttgagtgattgtgacggatgtttgtctttgagaaggaaatataacgggcagaagacgggaatctcgattcaataacattcttgaatcacattaaaatcatcaaaatacctagcgccattatgaatcagagcatcatcagcaagcgttcaaatatcataagcttattcttcaacaggttgcttcaagaaatcgtcgccttggagcgtatatacaagcaagtcacgtgcacgatgaattgtggaactaaccatctttggctcaggacaaaatccgcggcgtgcgcagcggagatcagaagtactctccaacaaaaaagcacatcatccaataccatgacgagtttcctgccacagacctgcttcaggcagctagcacgcggctatctgccaaagagaagcccggctttccctgcgcctttgtcacgctcccaaccaacacgatgtttctcaactacactacgggcccagtctcgagtcggcggcgccccagtctcagtaccccccgaggtctctttaaaatttatcgatctgcctcaagtgcaaggccggggagcgggtaaagaccaacctaaggttgcagttgaagttaatgggccattgggtgggttgcgtcttgttttctcttttcgaggacgggctaacttgactgtcgcggcaggtcaattaacgttgaacatcccttcctttgtcaatattgcacacgatgagaaccttcggaaagcgtccctaactgtcgctgatcccgctgttccgcaccagcgtgctatgtggggtgtgtcctttccctgcccctagtaagatatatgtttgtctaacggggcggccgcatatggaaccacccgagcccacttgcagaactacatccttggagtgtcggaaggccatatttgcatcctgagtctggttggtgtcggatacagagctagcattgagccaacagcgaccaccgtcgagcccgagtaccccggtcagcaatttgtctccctcaaggctggatattcacacccgattgagctcggcattccagaaggcgttcaagcgagtacaccccagcctactcgtatccttctgcagggcagcgataagcaggtggtcacgcagtttgcggcggagatccgggaatggcgcaagcccgaaccgtacaagggcaagggtattttcatcaacggagagacaatcaagctgaaggcgaaaaagattcggtaaacgcgtctacagactggggagaatgtcggttattatctgtatatttatatccgagcgcctttctttttgtcggcgaaggttttattttatgtacttttaaaggtctccattatatgcatccatcaaagacattccggattgccataatatcgccaccttgagggtatccttcagagtttcaagactttcttgacagcgctgattacttcgtcctggatggccttgggagcggcaacgactcccttgttggcagccaaagtcctccccttgctgaaatccagagtttgtccatagatatcggtcacctggccaccggcctcgcgaacaatgagatcaccagcagcgtggtcccagatcttctcctggtagtccttcttgacgggaagtctgaggtagatatcccccgctccccgcgcaattgagcagtactttgcctgtgagtccaaccgcacactgggggaggtaatcccaaggagctgggcaacggcagcgttgtcgccctgagcagagtgtccagcctccacaccctcgcagaaaacagcctgagcgatatcaggaaccgggcgcatagagattgatttgctttcggcccgagcaccgctcgttagaggcctgctaactgatccagcacccttgatggcagagaacagcactccgttgcccgcgccgctgttctgatcgacaccgatagaggaagagatggtagcagcgtcatcgactgggaggttaggacagccgatggctcccaccttgacgtcgccatcttcaagaagaccgaggcagacagcgtactgtccaccccggagaaagcccttggtgccgtcgatcggatccaaagcccaaatgcggcccttgggaccaccggcactctttccttcatcgatgatatcaagcatggcctcttcactggggagggaaccaccgagaagctcgttgctctccgcatcttctagcttgatgtccttgaccagtctccagatctcggcgctcaaggctttatcctcacgaagagtgctagcttcttcttcggcaacgatttcatcattaggaaaattcttgcggatggcttgaatgatcagagcctgggccccaaaatcaccaatggtgacaggcgacttatcatccttcgagacggtgcctttggccttctcattgaacaccttctgcgtgaggatggttgcgcgctggacggcaagctcggcgatgtagcgttcgcgttcgtaagacatgtttgcgatatgagaatatggttgtgagaagatagattgatgaagaggaaggaagttataagtaaaacggggtcgagatttcagaagtacgctgacccccaacacaatagtggagcagagtacgacgcccgcgaagagtgagagacggggctggtgagtggaggaaggatctgcttggtctgcggaccaaaaccgcattgaagcccagaaaaggattcgctggaggatcaattaccggtagaaaaggcgcagcagcactatcgcccgcgaattaagcctttgatagccgccagcaatgttcaagtgagccaaaggaacttctggcttcttgtgagctgtaacagtacatccccgcactaagccgaattgggcaaccatcgaggggcgccgtcggcgcatttgagtgccggtcacgagccatgacgtgggaggcagacgggtcctgcttctttgtgatattatcgtcccccacggatgaaggaacctcttgacaggtcggttcagttaccttgtctcctgccgcttgtcgcagtctgcagggcaagaccagatcattctcacctcggctggttgggagtcaggccatacctactccagatccgcagtggaactctccgcgtgaacgttgcctgttgtgatacttggagggttttaacagtggaagagaccgcaaacattttaaccagactgcgcaactggctctatccgctctgccggaagacagtcttcgcctgggtttgcgatcaggatactctacttctgcccagttactaaagtcgtcgggtcaatatcagatacctacccagcggggataccatcatgttccactcaacggtgagtgccttaagtacccgcacaaaaatccccatacgcgcggggttcacgcattgacggcgtaccgttttaaccttttgatttgctcggaatcgaaacatgcctccctttaaaaccgttttggcgtcccgccaaaaaaggtcttacacgaccatttaggcaaaatggatggttgtgattatgaggcttccatcaaccaaggctatggcggttttttggaaaatgcatttggcatgttttgcaaatttcattttagaacgaactctcccaatgggcaaaatttttttt

SEQ ID NO: 5501 - DNA, 3014 bp, Emericella nidulans
gtcctgctcgcagatcgacggtgcttgcggcgtatgggatacagggactggagctgcagtgggagtcttctgcggggagaataaggcccttctcttcagggagttccggggtaggggggtcggggtggtaggtcctgagggggggtcagagttttcacccaggagcggatgtcgccggacgggttccgcctgggggggagatatccacctccatggggtggaggggatgagcaatgagccaagtgtaagagatcagttattagagcagtaggggtgctgttttcccctcgtcgtgtcgctgtgatgcctgccattcgaaggaatattggggcttagccggcagggagatgctggcagtcaattatcacgtgagcgcgcataatactgcagccgtctggataccctccagaggatgctcaaagaatacaaaggccctttcaagggtacctatgtgatggcgcatgttattacttgcattattgtcaatgcgttgcgccctagccaggtatggactgcccaagccccttttgccctaatttggtccactggtgttcagatgaacctcagatagaatctaatattgaatactcccaactatgagcgattcaacgcagcgtttgctattaatgaatgacttgattcgccgacaccaactggctgagcataaaagaaggaacctaccaggacaagcgaggacactgtcatatatagtttccgcagatttgtggagtatatagttccctactgagtactactactagcaacgatagtttttttcgtcaactgcctaagaatatactttcttggtacaagccctaatctgaagaccgggaagtaaagtaaatatatgaggaccaatctaagcatattattagtggagaggaccaaagagctggaaccacatgtagagtcagataacaagagttgaaacattcctagaatgaggagcaggtagtgtacactcaagaaactgcatgtagatatgacaatgcggattttagtcggggtgtgacgatacctaggctttcacatttgttgtagaagcgctagcctggaaagcggggagtttgccaaggcttcactcgtatatattcgtgcaggatttagtaccaagtatatattgtataaaatctccatgagtaaacaaatccagcagtccataataataggtatttcatgcccttacaaacccaggtcatcaccttcagataacattcatatatcgaattttccagcctacgctaagcccttcaactcagtctcatgcacactcctccgtcgcttcgtctgctcagcaaagactttcctgaagtttcctcgggccaagttcccacacgtctctttaacacctgcccagttctcacgcacaatatccatggtgggcctcgaaaacacctcctcaatctcctcaagcgttttgtctttggtctcgggcataaagaacacctgatacacccagccgacggccgcaatgccaccgtagaatcccagactcagacccgtcttgcccatggcttcttgcatggccgtgaagttgtatgtcacgatgaaggacataaggaagaggagggcgtcagaggttgtcatcccgtagctgcggaggtatgttgggtatacttccgatggaacgacccaggtgagacaggcgtagcagccgaaaaatccctggtagacgatgagaccggtaagatagagggcttcgacggtcataaggtccgtcttgaggtcgacctgataactagcgccaatgagaacaagaccgatgaagaatccggggagcgtaacaatggcccaaaagcggcggccgaaagactccatgaggaaaatggcggggatcgttccgagcaacaaggagccgccaccaacgagggacatatagtttgcattttcctcgttgaaaccgatttggttcataagcacactcatgtagtacatgatggcattgatacccgtcatctgcccaaggataatcatgatattggcgtaaatgagggagcggcgggcgcgcgggacgctgtagacatgtcagtatggtgcgaatcaggacggttatggtgggcggaaagagcgccaagggccgacggaggtgcttacgtgaagaaatccatccaggggaagcgcttgttgtgggcgccttcatggacctcattctcttcctgacggacggaagccgtcatgacgaagaactcgtcgcgggcttcaacggtctgaataccgcgaatccgcttccagactttgtatgcgtcgagggttttgccttgatggacgaggaaacggggactctcggggagaaagagcattctacgagacaaggggtcagcaagacttcgtatgaatttgcagatatggttcgacgtacccaacaaacatgatagtagagaagacaagcgatgagccaaggatataccgccagttaccaggaacgcgcaggaacatggcagagatggcatatccgaggacctctccgagcgcgatgttgaactggtacagcgaaaccagattaccgcgaatgcggcgctcgacggtctccgcaacatagacggggacagtaccgccctcgagaccgacaccgacgccgaggataacacgagcagcgaccatcatgcctaggtaagccccgtcagccagccgtcatataggaccagagatgaaaatcaaacccaccatagttaattgaccccgcctcgagcgcagcaccaatagtatatagaatcaacgagataataatcgaccattttcgtccaaggtactcgttgcaaggcgacagaatcaaagcaccaccaacagcgcccagcggcatccctgagttgaccagactgttctgccttgcatccaagtgcaggtctttaggaaggtacaagttcgctccggaaatggtactctggtcgatgcctgaaagcagaccacccatactggcgaaggaacaagtaaccaggtgaagtgtttagggtccttgaactggatctggaagaagccagtctcgaggccgccggtggctcagcttttgtccatct

SEQ ID NO: 5502 - DNA, 6210 bp, Emericella nidulans
gtcaatagggctatgaaacgacacactcggcacctcagtgggcccagtagtagtatttgttatggcgatatgtcaatgttttgcttgtcttccatgagaacgcacctgtattgcttacaccgccaaggaagcaggcgaagtgcttagagataaaaggaaatcttcaatgtgcaaccaagcagattgcgtaataggttgtgaaatgacattttattcaattcggatagatgtgcgccacctgggtcgcgatgtccgctcttgaggttgtcgtacgaacaaggccaagtttgtagcaagtctgcctacaaatgtaatagctaaccataaacatgattaaaagccttctccaaagttgccagtctgactaaacacagcttacacccagatataccgatgaaggagtatctaaagaggataccgaaacgacttattctccctatcggtcaagtcctccaacccgtgttcctgcgtcggcgggccatacttgctattcctccttttattctgcgccaacatgagcgctctaaatacctgggcgagaacaaagcagatggcaaagcagatgaccgtggcacggaaccctgggtcgtagcggggggcatcgttgctgttgttttcacgaagcatgttagagtcgcgcaggagcaaaaggtatttggttgcatgtggtcaataaaaccgggacgacttacgcatcaaaggtgagaggcccgacgatatttcctagggagtagcccatgaacgtcgccgcagccatggtggctttctttgtatggccggctacattcgacgttcccatggcgatacattgcacccaggctgaggagaagaagttaatgaggtaaaagcctataatgcgggcggcacgctgggaggagggtagttgccatctaaagaagtcaacagtgaacatcgcccctgtatctcttcaaggaaaggaaaatatacatcaaacagctcccaataataaccggcacacaagcaccactcacgatataaagccgcgaattgggcaccttgcgtccgatatacccagatcccagaacgcagataaaggccaaggcaccgataggcatattcagtagtagagattgaaaggtcgaaaaccccatcccgttaaagatgatcgagccgaatgtcgttactgcaccccttccaatgctcgagagaagcgagaggacgaatacgaaccaaaattgatatgatagaagcgcctcgcgcacttggtaccatttgaaatgccggttctcagcaccggcgttgttagaccggacgcgttcaagaaccatgattcgttcttccgcgctgaatcccttggctatgtgaggacttccggggaagacgaaccagaggatgatggaccaaaggagtgtggcaagtccggcaatcaagtacatgtattgccaggggtgaaggacgccaccggtgatgtggctgaggccgtaattgattagtggggagacaatgttagagccgccgatgaacgagtaccagagcgatgaccggaagacttgttcagagtgggtgtaccacatgcctgtgcagagcatgaaggctggcgagacgccgctctcgatcaaccctagcatgaaccggtttacgagcatcccggtgtagtttgtgcaggcaggggtggtgaggactaccacggcccagagaaagcagattatagggcagactttgccgacggtgaatttctgtgatagccaggatatctagcagatgtcagagcacagacaagtccagttacaggggacgctgacgcacagggtagcaaccagcgatatagccaaagtagaagatcaatgagacccacgagtacttaagtccgtcttcgatgccgagatctgttctcagtccaaagattgcagcctggctgagcagggccttgtcgtagtattggagtgcataggtgaagcacatctgtggtcgtgagcgtcgcctatcaggagcacaatcaagggcgagtgatcttacaacaggcatcaaatgcatatcaatcttccgaagcaactttcggttcttctcatcgtcaaggacaggggcgcgaggcgacattccagcacagctctccacagagccatccttgacagacatgtcaacgcattcggaatgctcggcagtaactttagggtcggacgacatagtgactctggcgcatcagatctctgacgggttgcatccctcagggctttatagtcaaatgtcccccacaagacgttgtgtaggcggaataagaatgtggagaaggagatctatccgtctagggtcgaagatggcggatttccgctttgggaatctccgcacccgctttgagctaggccgatgccaacataaaggctctcagtgcgcgtctagcctgtaaccatgaacgaataactaaaatgcggttgtcagctgagatccgtcatgctgtgcgctctctctctagggcagccaaccagcgccgcttgcaatggtgtcgcaattccgtccggaacgttcatactcagggtgtccaatcaggcactgttggatattcaaactatcgatctagcttgtggtcctatgcggtacttgaagctggcatgacaggccttggactgatatcctggccactcggaccacggacgtcagtccagagtgaggagcagccgatcaagtacgccgacagaacaactatgctcgaggtaagcaggttaacccagtactctgcaataagtgctaatcactttcttgaattgctgctagggtgttcaagctatagcggacgttctcgggccagacgcagtgaccatggacgaagacgacattgatatgcattcatacacagaggtttcgacatcccattgcgcaacaagaccagtggcggttgtgaggcccaaaaacactgaggaagtctccagcattgcacgtatatgctcagagtataagatcccgatgagtatgcctccgcgagagcgattttataacaggcaggaattgacaagcactgcaatgcatagttccatttggcggcggatccagcgtcgagggccatttcacggctccgtattccggactaagtatcgatttctcccagatgaatcagatagttgccttccacgaggacgagtacggcatcctagagatggattgtacgcttgctgatacttgatagcatggatgtggtcgtccagccgggcgtaaactggatggatctcaatagagagatcaaggacagtggcctattcctgcctatggatccgagtccaacggtaagctcgcttacctttcattgtgagtattactcacatggctccaggcacttattggaggcatggttgctacgaactgcaggtatcttttaccgccagagctaaaggaaacccagatcagagctgataccatgtccgtagtggaaccaacgcagtccgatacggtacaatgaaggactgggtaatcaacctaacagtggtcctggccgatggctctatcatcaaaactcgccaccgagcccggtatgtagcccagatcccttgactttgttcaccatgaacggaactgtttatctaataagcccagaaaatcatccgctggctacaacctcaccggcctgttcaccggttcagaaggtacattggggatgatcacagagataacactcaaactggcaccaattcctgagaagcagagtgttgctgtagctaccttccagtctattcgggaggcggtagcctgcgcttcaaagatcatacgccagggtatccccattgccgccttggaacttatggacgaagtacaaatgcaagttttgaatcggaatggtggtgctggtggtagaatgtggcgggaggagcccacattattgttgaagtaggtacatttctgcaattccctcgtcacagcgaactcctataactcactttgtatgattagatttgcaggcaccagtcaatctatagacgcagacatcggacgagttcagagaataatcccggaggaaggggggaagagctttgaatttgcgcggacggaagcagaaaaaggtaatctctgggctgctcgcaaagaagctgtttgggcgatgttggcgcaaagacccgaaggtacgcagctatggtctactgatgttgctgtgccgttgtcgaggacgccggagattattggtaggtggcaagtccttgcctacctcagtggttctatgctgtactaagacctgagttcctgagttcagatctatcaaagaaagagtgcgagggtcttgggctattctctagtattttgggacatgtccgcgatgggaactttcatcaagctgtcgtgtatgaccctagtagcccgactcagacccagatagtgcaggaatgtgttaggaaaatggtgcataaggcggtagagatggaggggacggtttcggtttgtcccctcgaagtactatactagcggatcactaatttagctggcgtatcccagggcgaacatggaattgggctaggcaagaaggagtgtctgcttgaagaactcggcctagaaacagttgctttaatgcggacgttcaaacgaagtgtagatcccaagtgagttacttgtaccaggatcacaggggctacaactgatgatgtctagttgtcttatgaacccggggaaaatatttgagccttgagacgaaccacgcctttatttacttggggtcgtagatccgagcggtggccatattggaatgagattccagggaggattcttggctggtggcctaattcgtccagaatcgacccatagattacaccaggattgccttaatctcctggtggggtggtaagtagcagtagaggctgcctgagaagagagatgatactatcagatgagctgcagggtgggccttaagattacctttacatgtgcatagggcacaagatgcaactgaccaaatgattggttgtcttgcgccgtttcgtagagcagtcgggcaaactagcgatagatagacctgcctgtaacctagtgataataatataccattttaacctaatacctaccagctatatacaatgtgccatacttctgctagaaatagatgaactgggaaaattcaccatcctatatccatattcgacttctgagcctcaataagtcctgaatgtgtctcgaaaatctcgctggcctggttatcatgagatattctgagagcatttacttatccatttctcggtccagaaaaggtcacactggtcagagaccatgacctggtctgtccaggtcgcgcatatatagctggcccgcccgtggcagtcattaagatcagtacgaaggtctgatagcttgcttatgacaaataaatcaagtttgagaccttaacgattgattagaaggtagtttcaaagaccttttaatggctgagagttcgtggcccaatactgtcctgcgatctagattgtgtaaaacactgagatttccagacgttgtaatttataccgttcatggtattgcggatatgccccgctagcgccattacatgacggtttgcataacctaaaaaataaacgacattggttcagcctcacctatcatagaaccgaagccctgatctatttcaatgcactccaagaacccgactaccatgctgcaaccatttagggcaaggccccacagcaaagcccttccagtgcggctgagatgtctgctgcgttggcacaggcgtcgccgttgaggtttctgcgggcatataaggggtgtcagcccgccctgtggctttttgatctgcaccctgaatccgtatacgtcacgattttgatatggttcgcatcgttgaaatcatggcagacgaagatacgcgcaacaccagcatgctggagctgaacgagactgtaaagctgaacgaaggcgagaatggagaaacaaatggccctgtacacccacggaaaggaatgccggagtggaaatggaagggcacccttgcggtcatcttgctgcagactattattagcggtatgtgtgtcattatcctgcccccctcaaccttactcatttaacatgtgctagggtacgatgttagcaatgtcgcgaatatccaagctcgcctgtatgagacctttggaaatatcgagcttctgccctgggtgggtctgtcgtacagtttggccaactttgcgcttatctcgctgtcccgcaagatcttgtttgtttgcaacatgcgctgggtatacattgctagcgtggtgatattcatggtcggtgctgcagtggggggcg

SEQ ID NO: 5503 - DNA, 4589 bp, Emericella nidulans
aggatattggtgtctccagtcttcagcagcttcacgaaggcgttaacaacggcactgtccgctttgaggtgcgtagtgcgagcgccatggccgagggtaacgtccatggcctgcacagctacgacaagaagctctactcttaagtgtaacatcttgagtagttggctttcttttcgtttcttgtgtcccaattcttgcttttcattaatcatgacgacatgttatttccatgaactcgaaaagtatggcatgaggttttaggagttagacggaatatatatctgcttgttcttcgatcatcataggtttttgcttttgttcacatagacataacaacgcagaaaaacacccatatataaagcccctgcgtcttactactctactgtactgcgggcccgaagcaacttgatctttcacttcctcctgcctcgtagcgatataacacgtcgatcctgcgtctacccgaagctctccaatctggtcctgcgtctggaaaataggctcggcttcgcagctctgactttgtgcgaggattcgaaactttgaggaagataaaaccgcggctttgattcttttgcttttaatgaaagtgataaatagtgatatggtcagcgtaatttcttggagaaagaacttagtctcctgtgcctcaacgtcgttagcagagatcacgcagtaaaaagtagagacaactcattaacttcaccaaacgctttcttataagtcaaggtcccaggcaaacgcactgaaaaggttgaagcaagaacaatgtagaaagtattcatcacgatgccccttggatattacaaagtaagagaaaaaaggagtccgaggagatgcaaatgtaatgggagaagagagaaagagggatttaatagatgaggagagcaagatttggcgttatgatcacctgccttgacttcaggatactatcacgatccgtattcctcccgtcagcaaatgctctttggaatagtgagagtctctctatcggtaaaaatagcttcttgaataaggtgctgttgttggaacgctatattgactcgcagtcttaactccgaccctgccttaagattattcaagccatgtcgccatacaacttcttgcattcagagatataacaactggaatgaatcctgacgagtgaacagtcatggcgctttttagacacaggctatagacgctcgtcaggtctgaggttaaattgcaagcaaaaactagggctgatttcaggtggggtacatgggtgtcagagccaacgcctgctcagtcttagcttatcgacaagtacgtcaatgtatttcccgcatttctgatcgtgctagacctaatcactactcgatgcctattctagacctggattcgaacatcatctggcgcaaatccggtaaacgcggggttaccgaggttccgcttcggcagcgagagctgatcctcccaacacgacgtggcaatcgagatccatcgacccttcaagactcctgacggccccccaacatgcatctcgcgttccatgtgcctcgctcagttacccagctaatcagttgccagcttgagcttgcccgtggtctcctggcttcgaatacaagacgactccggccaactacaccttcctgcttcaacatcacgccaacctgtttctcaaggtcgaactcatctacggtacaataccagccgtctacatctcggaacatgtcgcccaagcagaaaaaacaaccggctgatccaaggcccagttcgaggtagatggcggattttcttataccgcaacgagtgtctgacttgatgaatcgctgacactcgccagcgtggtattaatttcaccaaagaacgagatacttctacttcatcgcgtaaagacatccacatctttcgcatcggcccacgtctttcccggaggaaatctatctctccaggacgggaggtgtccaccacctggagatccaaagaggcatgaagatgcgtcctggtatcgcagcgccgctattcgcgaattgtttgaggagagcggtatcctccttgccaaggaccaaggctcaggaaaaatgctcgcagtgggggaagacgagcgcgagagaggccgacgtgaaatccaccagaaacaaactacgttttctgaatggttgaagaagcagaatgcttctgctgttccagatataggttggacgccggtttctcctctttccatcgcaaaccggctgatgtaatgcagacaacctaattccgttcacacgatggataacccccataaatgtccccaagcgctacactacccagatgtacctctactttctacctctgcctctggagtcggaaaagtccttattaagcgagatccccgcggagggcgaacgagaggagatccaaatcccaacgagcgatgggggtgtcgaaattgcagaagcacagttcctacctgcatctgagtggcttaggaaagcggcgcgaggcgagatcatccttttcccgccgcagttcgtcctgttgagcctggctgcgcagttcctagacaaggagccccggcagatagcgcctgatgagctgcagcggaggcgcgagcaactaatagagtttgtctattctggaagccctccatggactgaaaaatgcatctctcctaaagttggcaaatttgccgaagatggacgtgctgttctgacactggaacatcctggtccagagctggaggggacagatcgccgaggggaatcggaacgggcagtccttgtgcgatttaagaatggaagtgctcgcgagctcagtcttgcttggaagaaggacatctttcctggaagaaagagcagcctatgatagaatagatgttgccaatgccaagataattttattccgtacccgctaaaacgcagcgatgaggcagtacagtagccacagttccgtgccacagtcggggtcccactaaccctcgacaaagatcacatgacccacacaaccggctgcccgaaatcgcggcaggccaaaagttcgacaacgaccgtccagcccaacccgcagcgcaccctcgtctatcaccgttcgtcgtcgacctcagacaacagacaaccgccaaaatggagaacgagaagggagaaatcgtcgatctgtacgtacacattttgcggtttttgctttgccgctttgccgagatgtctgcaatctggaaaagggcgagatgggatagcatggagatgggcaatacagacattgatgggaggttgcttcctgattaaatatctgaagcgaaaaaattcgtctgaattctcattctccagctgttgcatctcgctctcatttctcttgagcgagcaaaggccactccagttaaatgtgcacaagagctatcaccactaacctttctctctagctacgtcccccgcaagtgcagcgccaccaaccgcatcattaaggccaacgaccacgcctcggtccagatctccatcggcaaggtcgacgagaacggccgctacaccggcgagaaccagacctacgctctgtgcggcttcatccgtgcccgcggcgagagcgacgactcgctcaaccgtcttacccagcgcgacggctacatccgtaacgtgtggactgctagccgccagcggtaaattcgctgaaggatggttggtttgggtgtgggtggtgagttcgtctgttgtcggggaaagagtactggagtgatttttttgttggaacgaaggctaatgttttattttgtgtaggaatgaaatgagatgagttatctgattgtggcctactcatttgtgggtggtcggatcatacgctacggctacgtcttcgtctgatatgatgttaagctcagtctaaagaatcaaaaatttctaatccattccatttccaccctgctttatccacctctatttcttgtattttctgtgccgcagatgttgttttataactgccttgtggtaaaggcctcataccggcacttgatccctccccacactgaaccagattgaatgttcttgcaacatacatctgtctcttgatgagcgaggaggtagagtcataatctattgtacacatgccgaagattacctcaccgcctgctgaagagccactgctgcagtgatgtgcgctggggcacagatacgggtgggacattgcgtttagatactgagtgtaattgataacctcgtagatgagaggcgttcaggaagagggacaggttccatgttcttggtatgtccatgggatagtttatgactagaaagggtatatcatgcttgattcttcaaaatctctatgttcgccatggtagtaagtataaaatgcacatcccgtcttttctctcttgaatcaaatctaatccttttctaatctgactgccggatttgtctcgatgaagttgagatcaaccttgtggccgagcagttctcgaatgttgctcacgccatacctatatagagtcagtcgaaagcgtttacttgttttaattttcaacaagcacttacttgatcatggtcggcctctcaagactgagaccccaaccatacacccgcatgtccttgggaagacccataggttccaacatctccggccggaacataccgctgtttccaatttccacccacttgcct

SEQ ID NO: 5504 - DNA, 5286 bp, Emericella nidulans
atactcgttggctgcatcagcctagggctcccgttcttgtccacgttagtcttagcactggactctaggaattctgtagcatgagttatgtcgctatcagggcacttccctagagcactgatgatcggtcgggcagcaccaatgttaccaaacctgggattccgtgaacaataatctttggttgtgatttcctctgggtgagtagcacagaggtttagattgagtgaactagacaatgcaaaagcctctgaatggccacggcaggcggaactgcgtctcttgggaggcggctggtgaatttcgaacctatctgccgccgttgtagcatcccctctgtagcagtgagagagactcggtgtagactctttcatggacgggctcgagtagtaagccttcggagttgattccgtggatagtggctctacagacgagcttgaggcaagagagggggcctctcgaacgctttcgtgctcttctccatcttctgctccagacatagcttctccctttctgagaattcgattatgctcgccggggccttgcgatgaaccaaatcggctttcatctgaggaattgccggagtataacctgacaggatacaactcgtcgccagagataccttcctggctcatggccgatgtccaggagtctattacatcttgcttgtcgcatttgcattgctgctgctctacagttgatttgcaacagtcaggctcattttgcatctcatgagattcggtaacatcttcgattccatgttcgttatcacaagataactgttcgttcgcgtttatatcgttatggtgttgattcggggtatcactttctcgcaacgccgcaatcagcttttctgcgactgattggcccctgcctggagtgtttccatgtagatgctgaccctccctcaaactagtctcaaacatagattgcctgttggagttattggaattctgaggcaaggaagatttgaataccccggtgcttatgtcctccgttttgcaagcttgcgacgagttattggctccagccagactctctgaagccaggctccttgagatcccattgcatatgtcatgcttgcctgctgcggtactacaatctggctctttctcagaactgcttgaatttgggctgcactggttattgccgttcctggacctcatgtgttgtgttaataaatgtttggctttgttgttcacgcgccttctaggtttcatcttgcttccagtgccagattgtctcctaatcttcgtggcttgtttctttctggcagagcttgtccaagaacctgtggaacttttattgaaggtatagcgagcaccgctggatgaaggagaagagacagaagtaaaatcggcatcttcctggggttgtggctcaagcgaaccatcacttgctcggagatcttcgtcccaatcaactaccttcgttcttagtgcagtgtatagcttgcctttggaacgacgcctggagaatatgagagattcttgtgtattatgcggaacaggccttagcacactacctctagtgaccgacttgctcctttgagaggactttgagcgagtattactggctggcccattctcgggtaagtccttgtcatcctgagatatcgctctttcaacaggccttgctttcttattccgctgaatttctgtctgggattttgggctagtcgaacgaaaactgtctccatccttagacgatgaggttccgtgcaaggaaggggtccgggtaagatctgttagactgctctctgtagcgctgtcaggagcagtccctggtatatattcactttgttctagcatggttgttaaatatttcacccgagcaggaggcgaagcccagtcagctgctgttcgagaagccgccacagatggttggaagaagccggcaatcatctcgtcttctgtatccatcgatatcactactgacgatgaccttcgacggcttggacttgtcctagaccctattgtttgacactggatgccgatagcctcgaatctttttaaaatcccagttgagtcatactcggatctgataccgaagtttatggtatgcgaatcacactgctggtcgttcatcttaattaaatcatgtccatgaatattcacagatagcagccgcttctgtcctgcgcgttcactagagaaggtgcacctaatttgtgtagggcaggtgagccggatcgccatgtaattcagtttatggccagaggtgtccctgccgtagtgtatcaaatcgattctgtcagcacaaaagactagaagaactttaccttgcggcagtcctttcgcatgtgctccgtctgattcaacgagatagcatatgggcaaagcgctgttggcgctgccacttctggcttcaccacttatgctgaaattatgctgtttcactgcgcagatgtaggagtaaaatcgctcgacggcattcccccgagtctgtaggtggctcaatattcgcgaatatggctcatccgactcccaatcattgaatgatatggatttggatagggcttggagtataatgcttgatagaaaggacaatataacgtccataccgcacattatgtcaataatatgcctggatatgcaatgctcagtaaattccacgaagggccggatgccaattggtttactttacgtattcattaccatctaactccttcagcatttggcaatgctcgtcagagtcgctcactatctccgccagcactttaccagcctatttccgtcagcctgggcgttctatttccagcctctcgaagtataccatcctccgcattctagcatcacctgaaacatctgtgaattttgcgtaagtcttctccaaaagtctctgttggatgagcggcataagggtcgccgactctgagacgatcacctgagatcgcaaggagtcaggactcgcagtgtactctggctcgtcctatgagggataagtcagcaataacctacaagtccaagggcaagaggcgcactgtcaagaggtatagtcccagctcgaagccttcattttcaggtagctttagtaggtaggctgagaaacactgcaatgagattgtctccaaggtgtgtgctatctcgactcgatgctgattggcaaaaacaagcacttcacctgaatcatgggatgagtccaaatccgctaccagaagggctttgagcagcggatttgataaggtgcacaatgggggattggaaagaaggaggatgtaatgaggactagggagaggttctccagctgctgtgagggcatcatgaaggagcagagagagctttgctatgctttcaaccccttgcactcctccacctccattggaatatgaacttgacattgagacctaagtgctcataatttgctgaaaagatatggaagcctcgtgttgtgaagaagagctagctccagtccttgaaacccgcaggagaaggaaaagcgaccatcatgtgacaagccaatagtgttcatagcttctcagacggtcacaatttttctggatatgagtattttcctgcataatagactttagccaaagcctcttgattcgacgagatatatcgtcatctagataactgctttggctgcgggatcgcgccatagttctcttggagagcctggtgctattgggtagcggcgatccaggtacgtggtgctgatctcgtatgttccgctaaggaccataatctggggtataacttcattccatcttcctagaaaccgcagactattgtcgcgaagagcgttgaccgtggtatgtcccaaacgatgctaacctaaagggcagatactgactaatagtggcagtctttaactagctaactaatacacggtcttcggcgtccgctccctccgactagcttgttaatcgtaccgagatccgactgtcattttctcggaaatttgcattgttccttgatccgactccagtcagaggctgtgacgttgatttatcatctttttattccggcgtaccatgacaggtttagcgccaaacccggtacggtcgaagacatgtttcgaagtcttgacaacggcctgtgccctcaaggcactccttatttcactcactgtgattgccatcgaagatcatcgcaaatggaaaaggctaagggtgaagctcaacggctggaggaggccagcaaggctcctttcatagccttatcgcaatcatacaccctccaacagacaaaggaagatctccttccattcgaatatcaagatggcctgacagctcgcgacgttccggagacaacgctcacccgtcagcaagcctcgaactcagtacaatcaatcgaccagaatgaatatctcccggcaagactttctcggattcacgaaggcgccgacgacagcgctctctgtgctcagaaatccgtcctgtacctagcctatgggtcgaacctcgcatcccaaacctttctgggcatgcgcggcatcaggcccctctcacagctcaacgttcttgtcccagatctaagattaacgtttgatctgccgggaattccatacttcgagccatgcttcgcgggaactcattttcgggatacatccgctaccaatggcggggaggctgaagaaaagcgcgccctaataaacacgccagacaccgaccaagaccgctacaagggtcccctcattggcgtcgtttatgaagtcacattatccgactacgccaaaatcatagccacagaaggaggtggccgtggttacaaagacatcgtagtgacttgctacccgttcccaaacggctatgaccccgccgatccaataccggagcgaccagagacacggcctttgaaggcgcacacgctgctctcgccggccgggatgcaggagctgctgctgcctcaaacgaggtcaagaatcaggaccccacgaaatgcacgctacactcaaccctctgcacgttatcttagcttgatcaccactggtgcagcagagcataaccttcctctggcgtaccaggcctacttgaatcaactgcagccgtactgcatcacgtcattccggcagagagttggcatggtagtgttcctggtcatatggggtccctggatccttctgttgctgggtttgccgagagtttttgctcggccggatggccgtagtcctgagtgggtgggccgactcaatgacttgctgatggctggggtatggagtagttatgacaatgtatttgtgcatatattcggagatggtgaaaagactattgagcgctgagactcaatattcacgccatggacaagcgtgtgtataaaagtagcagatgcaaataagtcttaatgg

SEQ ID NO: 5505 - DNA, 8061 bp, Emericella nidulans
  unsure (1)..(8061): unsure at all n locations
gcctcgtatgtttttgcctggctgccacgtacattccgcggtcctctagcctgcaagtcctccttcaaccacttgagaacaatctctccgagttggctgttttccgacgtttcaggtgcctcctccttgaatttctcaatagcgccccactgccttacattgccgagatgcatatgcaccaaatgtgtcggccaatgcgccagattatccaagatatgcgtcgcgtacacaatcgtgcagggcctggtctctgtctccctcttcaagaacgaaaggaagttgctccgcgacagcaggtccaagtcgacggtgatttcgtccaggagaagcacctgccacggccggagaagacccatggctagctggacgcgacggcgctctccgtccgaaactgcatgcatgcgccatcgcaggtcaatgtcaagaatttcaacgagctcgtcacggcgttcggggtaggcgttgccgccaacggaggcgaggagcgtggggacgtcgatgtctgtccggacgatgctgttgagcacccattctacgccgagataggtgacgccctcgagaccttccttgaaaggatccttatttgcgatggagattgtgttgctgggtgctaggcgttttcccgagagaaggcgcaagagcgtggtcttaccggctccattggctgaacaaacagtattagtatgatcaactataggggtatatgggctgcgaggaatgacgtgcctccaatcagtaatgttcggcttcctgctggcaatcccaaagtgacgtctgttaagccggaggagccgtctgggaacttgtaggagaggttctgcacttggatgtctggcgagtcggacatggtggctttggatactgatgaactcagtttaattaggaacagcccaagtcataaatcagtagagtgtgactcacattatttctatctaaaagcacgcgatgtaactatcaactgtccagatttaggtgattgataaggtggggttagccaagggaaaatatccagggaatcactttttcttttccaactatttccatccctacatcactcgcagctgaaaaagaaccaagattcctcgggattgggaccgtaggggacgctctttcagctttctcatgctcagaaacctctcttcgttttctctgcctagacgccaatccgcaatgcgttccctcatagccgttgtcggcgccacgggcacgggaaaatcaaaggcaaatgacccctcggttgcccttggctttttgacacaagcgggaaacagacgctgacagacacagatagcttgcagttgatattgcttctcggtttaatggcgaagtcattaatggcgacgcgatgcagatgtatcgcggcctcccaatcataacgaatcagatccccgtcgaagaacgccacggagtaccgcatcatttgataagctgtatagacttggaagagaacccatggcgaatatcgatgtttcgaagggaatgtctacgcctgatcaatgatatccatgcacgaggaaaactagccgtcttggttggcggcacccattattacacacaatcagtgttgtttcaagatcaactagtgtcgaaagagttggaatcatcagacgaagagtctgattcatgtccggcaggagatgttgactcagcggtcaagtggcctatcctcaatgcagagccggagttggtattacagaagttacgtgaggtggacccaataatggcagatcattggcatccgaaagacacgcgcaagattcgtcgctcattagaaatattttttcagacggggaaaccggcgtcacaggtgtatgctgagcagcggcagtcgaaacaagccaacgcaaacaatgataatggatcagattgggggcaactgcgctttgacactgcgatattctgggtgcattctgaaaaggctattttggaagagaggttgttcaagcgtgtggatgttatggttgaacaaggattgttgtccgaagcaagccgcatgtcagactatcttcaagagcaaaaggcccaaggtataactgtcgatcagacccgaggtgtatggatctcgattgggttcaaagagttagcgccttatttcaacgcgcttagagaagactctaggaccgagaaagagctagaaacactcaagcagtcatgcatcgggtcagtcaaaattgcaactcgtcagtatgccatgtcccagcttaagtggattcgcaacaagctttggactgggcttgcaaaaggggctatgaccggtcgcttgtatattctggatagtacgaaagtcgaagactggacgaagaacgtcacagagccatccgagcgcattgttgaagcccacattggaaaaaaaccgttaccggatcctaaatctatctctgagcttgcgaagacaacctttgaagctctggaggccaaatcgttatctaccgaccccagcccatcacaatgtattacctgtgatatctgtcggaagacattgacaaacaaggagcagtggcaaatacacattaatggaagtgtccataaaagagttttgaagagtcttgcaaagaagcgagagcgggatgcatatctacgaaagcggcaagagaatttagggaacaccctagagtaggtgttggaaagtaccgaagagctggactcgggagcactatctagggaaagtgttgacagtgacaatgtatagaggtttggtccgtcagatttagagtaattcgccgatgtgttgctatacaacggtcaacgtagcgaaggtcacaagctgcctctgtgtcgtccaagctgatcagcaagggtggtagatagactatctctgaaacgaagcgtagaattctagcccaaagagggaacatagcttgcccttacttgacgaccgtttcactaatcgccaagccgatttcgccagcagtggagtctgaaaagtagcacttagggctctcgacgtaggatgtacgggtatataaaggtagatagataaactcatactcgaagaggtgttaattaaggtcatgttgttgagcgccaggacaagaaagcttgcgaaaggatatcgccagtgccgctttcttcgacttggtatacctcaattacagaagatttctctgcttttcgaagcctccatgttcctccctctttgattaccgatttaagccctaatatataagatgaatgagtatatacttcagacaaaacgtgcggagacggaacaacatacactccagaaaagtagccgcgaagttgatacagatattcccgtcccatgttccacgacctgatttcctcactctgtttgggatgttggctgtctcgagttcttccaagcgtcgtagaatcccacctggtcacggaatcccacgactattttggggacaccgaggaggaaggactgcgcccagaatttcaggagttccgctcgaatttgaccatgtcccaatcctttctgatctcggcagaggtcttgagctccacccagttgattgggtcttccttgcgctctggtttactgtcccagactgccggattgcggtcagagacttctctctttagccatttgagaaatggagatataacttactggcatcgacttctcccccgaggacaagtttcgtccgtccgataccagtgcgcacaactgagcagtattgcgcattattattcaccacaagattctcccggccttcaatctcttccctgcttgcttcatcccatgtcttgtcgagaacagatatggtttcaaacttgtagcctatgaggtgttatggaaagcggcactgttgttgagaacgaatatggtaacaaaccccaataagccatcaagtcttgagaggccatcccgggtggcattctttgttgacgctggagctgtttctgcttatttttgtaggcattattttcctcaatgaatctaagcaaggaatacgagtcagattatgatttgctgactctgtgaagtatgggaacatacgcacatagttccctaagagaacagtcagttctgggcaaagttttcggcactaggctgagcttacctggaagcaagttgcgttcatctcaaatctatacgcataacattagcgacgagcagtattcagaactaccatacgcacccattcatatcgtcaaatggcgcagtgagaatctgtttgccacattatcagcttcaaagtgccattcagtaataaagaagctacagcatatagcagcgtatatcgaccttggtcatcatccctcgccaagtgatgatatcggcttcgcatcgctttccagtctctttttccatagcggcaatggtatctagcaacgcatctatatgttcatccgctgcatcgtccagcttctgaaaggtgtcgaagccgcgattcagatccgccgacanctaaggcgggtagtagtatcgcaggaataagtctccaagatgaaatttgtgttggtcttcataggaatatcacgcaatttcatgtgtttaggttgtcaggaacttaaaaagtatgggtgggaatatgtttatagaagctacccttgtccgggtaatggcagtattagatccatagaatcgaaagatggtgtgaatgttgaaagtctaccgattcataattccttttagtgatatttcttttgatgatttggattgggtagtaatatgtcagtccatgtagtttcttgtaacgcatatgtttttggtggttgaacgggatgatgtcgaagtgtttgtagtaatcttagcggcccttctgtataggtccgaatcgatcgtggctctcaaagtgtccccaccgaaagctgttcagcgcaacaccttcacttctccaggaaaccggccaatttcgttgctctcccactgaacataatctacccacatagtcagggccgttcttcattgtcgctacctatttcccaaactccgttatatgcggatttatcaccagacacaatgacctcacggattgacaagacgattgctcgacagcgagagaagtgagttgagactgcctccgagggtcctgaaacgttaagaaaaacgtacatctaacgcgcgcttgtattccttcaggatcgcatccggagcttattacgaagctcaccaacaactacgggtcattgccgcacggtacattaaacagaacaattatgatgctgcggcagagatattggctggcggcgctactgccctccttagggctggatcgcaacaaggagcttcagccagcggaggtgacctagctatcatgttggtgactgaggtatatgtcaaagcaggctgggagattgtggggggtgatgatgatgcggaggggcgtgctcgtaagagtgagttcgaagctgtttcacatagtgattagtctccgttaggagccagaatgtgcaatgctaacagcgtgcgatccacagagcgtttgattgaacttctacgtgaatttccgtcagaggagcctacacgaaagaggtttatccaggaagcgattgggtggagtggaaggttcggatcagtggagcgaggagaccccgagttgcaccatgctgtcggatctgtatacgcggaaggtatggcgggcatcgcgccttgaaaatgggaaatgacattctctaacgatgaatccagaccaagagccctatgaagctgaaaagcatcttgtgctgggcacctccgagtcagctgagacgttggcgaaacttgagtacgagtggtatacgagcgacgagccgcatacagcaggcatttatgcagcacgtgcagtaatcccttttctactaattggcaacctgcgcagtgccaacaaggcgttcttaatctttacgtcccgcctcagctccgcaaacccgagccttggagtgcaagatgtcagcagtgccacctctgatgttcgggttttccctgcgctcccattattaaactttctcaacatgctgctgctcgctattcaacgaggaacagcggatttgttcaagcagttgaccgcgcactatgctacgcatatcaaagaggccgggatcctcgatgatgcgcttccccaaatcggcgagcagtacttcgggatcaatatccctaggcagggaaatccgctgttggatatgatgggcagcatgttgtttggaggtggacaggatagcggtagaaggtcggcttcaggaaggggtcagtcaagaaaagtcgaagcaccgccatcaaatatggaacttgactagacagcccggtgcacggtgaatacaattagggcattagcagtatccatgtggtaaatgggttgtcatgtgccgttgacacatattgtcgctatacacgcgtatcggcttcgggctcgtacatccagttgtcttcatccagtgcggcgaccttatttctaagactctggtaaatgagattcagaatttctgtcaatgtcagcaccatggcatcgggcctctcgcaaaacgtgtaaagaaagctcaccttgtggttcactactcgtttgtctgttccggttcctgtacatgatttccataagacccgcttcaaactctatattctaagacttagatttgctggtctgtcccgtaaacaaaagacgttgacatactctctttctgtcgtccgctcattccgccctgtcccgtggcttcagctccggtagcagccgtagattctccgccagtgccttcagtttcaatgccttccatctcgtcctcatcttcacccacaatgggtggcaagacgggtatatccagcgaaaagctgccatttttgtctttcacaacaatttcaccatcatccatgagaccgacagagttggacgagtttgactcgggcacattggactgcaatacttgagaagaaagccctgatgtccgggtattcggtgcagggttcgagattgggcggctgctaagatggttctggaaaaggttccggcgaacagacgttgttcccattgtgatggacaatatgttcaaggagcgaatagtactgcgaaggatgtaacaatttgtgggtaaagataaggcgcccttaggtaatttttttctagttggtcgcacgatgtcatcgttggaaggatattgtcacgtccagacaatatataaatgtggtaaagcgagggcaaggttttagccttctagaaatgcggcttgacgctgcctttatatatcggtggttgaggtatgcagagcacatttgtaggaaggccagtatagatgcaaacgaagcaaacatggtgaccaaaagcggtaaaatagctacgcgtctgcgggctgaactcgcgtcttccacactgtgagctttgttctacttgtcctaaccgtacatataagtataacattttagcgaattgcaaccatgactcaggctgaatcttcagctagtgctactcgcaatgccctgaaagctaatactgctggggctcccccagactatgagctgccttggtacgctgcattatggaagcaccagagcttcgaaagttgacaacctactttagggtcgaaaaataccgcccagtatttcttgacgacgttgtcggcaatacggaaacggtagagcgtctaaagatcatcgccaaagatggaaatatgcctcatgtgattatttcgggcatgcctggtattggaaagacaacttcaattctctgcctggcacggcagttgctgggtgactcttataaagaggctgttttggagttgaacgctagtgatgagagaggtatagccgcccctaagttggcaataatagtgttttaactcgtcggtttatgaaggtatcgacgtggtgcggaatcgtatcaaagggtttgctcagaagaaagtaacgctgcctcctggtcgtcacaaaattgttatacttgatgaagccgataggtacgtgtacgcacatgtgttctaaacttgccacttacggggtttctagtatgacatccggcgctcagcaggcgttgcggcggacgatggaaatctactcctctacaacacgattcgcatttgcgtgcaaccaatcaaacaagataattgaaccgttacaatcccgatgtgctatccttcggtacgccagattaactgatgcacagattgtgaacgattgaagcaggtttg

SEQ ID NO: 5506 - DNA, 3144 bp, Emericella nidulans
ctactcagagttagggaagcgcattatagacggttagaacgacgaacctgaaggttccagcgggtagtggaaccctgcctgagcaaggctagtgactgtgtttgcatcgtcgatgccatcaaatgcagccatggtcttggggtcatagaaggcaattgaactatcgtcgtaagaaaccgccagaacattgccatattccgtctgatcgacggaaataacatgacgccccgaagtaatatcgtcgaggcgacgcagtacagtttttggctgacctcatgttagctgatgctagctaatgctaacgggcaaacaatgacgcataccttgacctgtccattacccttcttggagggcacatcatcgaatcttgggtgaagagtcatgagactagtttccaactgccaccggacaatcacgctagccggtatttgtggctgcggatgaggaaggattgcgtgagtggggatcgagaaaacagccacaatccaaggatttggcgtcgatcctgctgaattatcggacgcaggaagtattatatgtagagaggtaaggcagtagagagagcttgtgaaggggagctgctcatctgggttctcgcctgcatcacggttgctgcttggaatattatatggcacttcaactttcatatgaacaaggcgaaagctcggggtaggaaattgctgggagccctgcttctgctgcgtgggatcccactgggaaggggtccactgaatgctgactcggtaaagggatattctctgacacgctgaatgcgttgcatccaaaatgccagcttgggttgtcactagggatgcgtgagtaagaagcctgtcggaaccgcttgtgtggttcaattccgtcgttatctcggcccatcgaccatctgggttctggtagagaagcttcatcactccagacctggtaatacagagtaatgctcctttatgagctggatgaaaagtgccgatcggacgccgtctgaatggcgagtatgcccagcggccctgtaccttggccgcttggtagaatgaatgcacctggatacgttagcctgcgaaaatcctcaacgctcgaaggggcatattcaccgaacggtattgactcaaccacatcatcccaactatctgagccccatcatcatcagggtcaaatgccgcttgacgggtcacgttcacgctgttcagggcgataggaatggagtagatagacactcgaccggacgaatcggccacagcaagttccgtacctgaatcgttccagcacagatgaacgagggcatgaccggcatgaacctctgacacttgattcaatggtgtctcgtcactcagcagccatttcccatcagactgctggcactggaggtggcggacgttcactctggttgagtcctgtgaaatggatgcaatgcatccgagtcttgaccatgcaattttcctggtaaaatcagtatgacagaagccaagtagcattcctaggatcatactggcagcatccgactaatctcatctcatccagccgttgagctaggcctttcgtagaggcagtcggagtactcgtaggcaaacccagctcgagtgaggtggattcaccgaacaaatcgtccacattgatcccgtcctccatgatcaagggcatgctgatgcttgttaaaagatagggggattctgcacgatggtaatgtatagagcctatggatgggtgaggctataacacccagatatcatagtgggtgcgatccacaaagcgggatggatcacggacgccaatggaagaataggaagtcaacgtggggttggatgtctaggagcatcgaagctgcacgataacaagttcaatcagtcccaggacaacaggcttgaatcccctgatacctacctgtcttcgcagatcaaggcatttcctgggtttcataaatatgagcggactgaggctaacagcatgtggagccgcagatccgctttctgattacctaagcatctaccgagtcatttgtctgctatcaccgggtcaaccagatctcgattttcgccgacttattttaatactccttactttacggccagacacgagagatactgtacgcaaccgagttcatccttataactcatcactaaactttaattttatataaatatatatatatatattgtttaagaagtagtgttagtgatattacaagtatacggactagctggggggtctctgtttatggtgcaacaaagaggttggggcccttagaggctaaacctgattagggctctaactgcaggtccgtcgctggcagagcaatcgagccaatcacagcccgagaactctgcgaccgaaaacaacctcttcagtgctgagctggagggccagcatcagttgatccccatatatacagacgagagtcgcggaaatcttgccggtcctggttacgtcaggagtatatatactataataccacgtcaacgctttgacatcggggcagcatagtctaatctttgatcatttctttataccttctgctccgctcctccgtgtcccctccagttccattcccttgtcttcagtcttcggtctgaatatccaggaatcccgtgggtcaaaataaacagtgtcggctgcaagcgagaaccgtcagagccaacatctggtcctgtggtctgccctcctctctcgtatccctcacttcccctccccttctcgccccgtcaattttgcagtgcactctggaggtcggaccccatcacagtcacggggttcccgtttttgagactgtcgctcgactcttgagtcgctctctatccgaccccatctggtctctccgtcttcccgccaacgggtcgaagaatcttcgactctgagcccctggaaaattccctcttctctcccagtcaattgatgtcggctttgtgattgattccccatgatttccatccaaagggctttctagtctttagcgactctttgtcaggctttgttttatcgctttctttctgcttgctctagtactctactctcgcgtcatcccgaccggcgtcatcatggcacctcgcaaaaccaagcccgctaccaaacccgcagccaaacccacacctgcgtctacggctactactcttcttgtccgtctcgaagagctttcaatccaatggaggtcgatga

SEQ ID NO: 5507 - DNA, 7069 bp, Emericella nidulans
gccgttgaggttctcggtatcgagcagggccgcaagtggaacgttggatctcttaacgagttccgaaagttcttcggtttgaagaattacgagaccttcgaggagatcaactccgaccctgaggtcgccgagtcacttcgagctttgtacggtcaccctgactacgtcgagctgtacccaggtattgtctctgaggaggccaaggaacccatgatccccggcgtcggcatcgcccctacttataccatctcccgcgcggttctgtccgatgcggttgcgctcgtgcgcggtgacagacactacactgtaggttcctagcctctctgcggagaattgtgtttctaaactagacaggtcgactacaacccccgcaacctgaccaactggggttacaacgaggtccgctacgatcttaacatcaaccaaggctgtgtcttttacaagctcgccactcgcgcgttccccaactggttcaaacccgactctatctacgcccactaccctatgaccattcccagcgagaacaaggtcatcatgaagaatctcggccgagaggctgattactcctgggaccggccgcagtaccaggctcctcgcgctagcttgacctcctactctaatgtcaagctcattcttgaccagcagaaggacttccgtgtggtctggggcgactgcactccgctccactctggcaagggcggcgaagacttctggagcaagacgttaagtgaccctcagttcaagaagagcatcaaggagttctacgagaaaacgactctggagcttttcgcggacaagtcggtcaacctagccggaaggaagcaaattgacattgtcaaagagtaagttgtgccattcacaaatcagcgtgcccgctaattattcgatagcgttggcaacatcgtgcccgctcgatttgcgtcgaagcttctctctcttcctctgaggagcaaggagaactccaagggcgtcttcaccgaccacgagattttcatggctttggctgtgatttataatgccatctttttcgacgttgacaccacaaagtcattccctcttcgcaaagctgcagacgctgtttccaaggaactcggcaagcacgtcgagagccacgtcaagtccgtcagctctccaggcttcctttccagagtcattgacaacttccgtgatgaccacaacgctctcaaggatcttggtgaccagctcattaagcgcttggcagagggtggtctcagcgtctcggacatcacctacggccagatcctgccgacagctgtggaactggtccacggccaggctcagatgttcacccgagttgttgagtactatctcaacgagggcaagcagcacctacctgagcttagcctccttgccaagcaggactctgccgagacggatgcgaactgacccgctacgctctggaggctattcgcctgaatgccggctcgggagcttaccgcaaggccgagaccaacttctatttcaaggagggggacgcagatatcaacctcaaacctggggacgagatcttcatcagctcggtgagtttcctacacgccactacgaccactaatgaagctagagctaatacctgccagacccaagcaaaccgtgacccaacggccttccctgaccctgatgaagtgcgccttgaccgacccgatgagtcctacctcaactacggcatcggttctcaaatcggcctcggcaaggacgccacactgaccgcagtcactgccatggtacgcgccgccttcagcttggagggtctccgtccggctcctggtgtacagggagtcctgaagaaggttgtccgccctgaaggctacaccctctacatgcgggaggaccacggtgctttttcgcctttcccgacgagtaagttgtctggcactaggactcgaaggaatactgctaaccaggtcacagctttccgtgtgcacttcgacggagaagttgtcactcctaagaagcagattgattctgcttgatttactgtaatgactggatgacgaggtcatattctgtgactttttaggagacgtctcgttgttctctgatctaatgttgtatagttctgatacgtatatgccatgtaatgtctaggttggcttgttgcatttgcagcacgtgtgtttctgatatatcttgacctggtttagaagttgcctattctggaaggcgactataccatgtttagcatctctacattccttcataacgtagcaggggttcaagggccgcaaatgtgccctggcatgttccaaagtctaccgtatacctaacgctgtgggacttggccgtctcgttcccaccggatcccaacctgatttcccttaaccattgaagtaaagctgggcacccagcctccagctgcccccttcttttctcacatcccaccccaaccgtctttaccatcgaaccccaattctttgaaggttgtgatatgcattcatacaccacacctgacattcagcattgttaagtgacctcctgggtcatgtggtctgcaccgctcattgtaactggctaaggcggcttagccaggcaacgcatgtataaaaagagagtcttgacaaccacgatatctctagactaagtagaaagtgaaatttctactcgcgcacaatcctggtcacaggcattcatctcagctcagtaaatgccacaactccaccaaccttcggtagtggccacggtgctcagcctcttcccagtcttttcagtctaccgtctcagatcatacatatctcatatcaatatgaaccgtcattcgcgcggtaatcactgaaaaacgggtaagagatttgatattggctgaatttaacttggatgatgcaagcatcttcatgctggcttgtattgtttgactggtattgactgtctgcaaatcatgatatgtataactcccagaacaagagaaagtccgtgacgaaaatctaggtaaaacgatgtattatccagctctttgaagcctgttctggaggcatataagtttcccttcaagcaaattgccacgtagttaagccgtccgaacgtagatgaaaccctaagctctgccaacataagatgatcaaggccctcgacgacgttatcatacttggactaacgtgcaaccgtctcaaactgttcgacctcatgcttctcgttgccaactaataccaactccttattcatatttctgtttccatccccatgcctatttatgcgcgcgcaggcaggtcaccttccaccatgcctcgggctcagagaagagactatccatctcttctagggagcgaccttttgtctctgggcaaaagaagtataccatgatcgaggcggagacgccgattactgcataaacaatatagtaccggtacttgatcgttgtgaaggcaacgggggtgatttctgcgatcacaaagttgaaaagccaatgcgctgccgtgccgacagcggcaagatgcacacgcagatcctgtggtgcaatctcactaccgaggaggaagtttgcgcctaggaagccaagggggaagaaggtcatgaacaggaagaggaagaaggtcgctgcgacagatgcgccgagcgtagatcccggtcggttctcgatcgcccagacggtcccagccagaccagccatggagagacccatccctagacaggcggtgataaagaggggcttgcggccaaagcgatcaacggataagtatgccgatatcgcagcgaagatcttccaggtcaggacgcccgcgttgaggagcgatgccttgtcacccgagaggcccagggagtcgcggaaaatggtcttgccgtagtaggagatgacattagcgccggtcatctgagcacagaagttgataccgacagcgagacagagcctgtaaaagagacgttggggtcctggtatgagcagatccatgaaaccccgttcctgggtgggcgtttgttgtaggacgcgttccaactcttgcatctcagcagtggactcctcgcgcccggtgagcgcccatatggcagcatgagcttcctccctgcgcccgttgctgatgagccatcgaggtgactcgggaaaggtcatggtcagagtcatgagtgggagcgtgaagaggattggtatggccagaggcaaacgccatgccacctcgctttcttccagataggaaagccctacattaacccagccggccgccgctataccactggcaataaacacaccgacgatgaccacgttcttgccgcggcttttcggctgggtgcactcgctctgccagacggggacgatcgcattgacgccgccattacctgcgccagagacgagccgaccaacaacgagttggcccaggctgtatgatgaagcttgtatgaccaggcccactgtagctacaactgctgacacgatgagggatttgcgacgaccgatccggttgccgagttgagtgacccccagggagccaacaagacagccgagggtgtagacagcgacgatagtgcctagagaagacgcggttggtaagtaactgaatgtggatagggctgcgagcaaacataaaagcaaacgtaagaggagaataggagactgatattgattaccttggacagtggcattgtggtctttgactgctcccttggtgttgctcgtatcgatgctggggaagttccgggtgaaggagggataatccagcacgccccctaggttggactggttgtagccgaataggaggaaggctggaatgaggatcatgcaaattcgagccgtggccaaagatgaaccaaccaggcccataaaagtcatcttcgtgagaggctggtaaggtatagcacttatcacggggttagggcaagaaaagtaccaacttcgaaggtgaatgtaacgtagaaccaggtccaggagccaaccatgatatttatggtgagttcatctccggtttagctatgactgctaaatatcatacaaccctacacccctgacgctacggactacgtaggcagccaaacagaccgccgtgggcatcaatctcgaacgctcgcttcccccggattggcgcgctggcgtaaaagtttggggtttgcatgcggggtagaccatgaaatataattggcaaggagagcttggaaaaatcttgacttaatgtcctgggccttggagccttggagaacagctgctgctagggctatcgtatgaggatcagcatcaccgccagaacaatcagcctaaacattgcgccgcgcaccaaatgtttgtgtttaaccgacaaccattgcagatgtatttaattacacatggacaaatgaacgaggacgaccctgcaagactttacatgactagaactccaacaaggtctgtgatcagccaaccaccgtcatgcagtcaactaaacccttggtgctcttcttcaatccggtcaagttcgcccgccccttctacgagcagctccagaaagtggcgcatacagaggttgtgaccagtcgaaatcggacagaattcttccaagacttgcaggacaagtacaggaatatctttgccatttaccgcacttcctccagcggcgctgtatgtccacctgaacccacctgcacctgcaccttgacatccagaccgatcacaagaggccctggctccaggctcacctaatccctatggtgatattgaactgtggagctcattacgttttcttaggttgccggcaagttcgatacagagttcatcaaccgactacccccgagctgcaaatatatctgtcacaacggcgctggtacgcgagatcccatattttttcccttcctgcagagccatagctaattgagacgagcggagaaggatacgacccaattgacacagacgcctgcgccaagagaggcatcgtggtcaccaatgcgccagatcccgttaccgatgccacggccgacttggccgtcttcatgctcctggagccactgcgtcagttcaatcccgccatgaactcgctgcgagttggcatattcaagacaggtgtcgccgtcggcaatgacccgcagggtaaggtgctcggcatcctaggcatgggacgcattggccgtgcgatcaagaaacggtgcgatcccttcggtttgaagacagtctaccacaaccgaactgtattggcaccggagcaagctgcaggtgcggaatatgtctcgtttgacaaattactggccgaaagtgatattatcagcgtgaatgtgccgctgacggggcagacgaagcaactcattggcgcggcggagctggcgaagatgaagcgcggcgttatcatcgtgaacacggccagaggtgcgattctcgatgaggcggcgttggcagatgccctagagagcgggcatgttggggccgcaggactggacgtctatgagcgggaaccggaggtgaatgaaaagctccttaagcaagagagggccctgatggtgccccatgtcggcacgcacacggcagagaccctggcaaagatggagacttgggcaatggagaatgcgcggcgggcaatcactggagaggccctcttgtcgccggtccctgagcaccaggggctagcactgcaggcgcgaagtagagcctaggatagattctaaatatggtagaaactgatagactgttgacacaggggttctttagaaagtgcaatccctccttgccacagccggcatggagggttagctataggactgcaaaataggattctgggtgtatctgtaatgcgcctctctgatccctcatttcactatagttggcttaatgcatgatacattgacttgttcttccataccacaggcaatgactacttttttattcgctagtcgaatggtgaaccttaacacatctaattctcctttctcatgccttttcctggatcgtatatcttcatcccagggggttactcggtgaccccatattcccactttacgtctcttgtctccccgggggaccacccgaaaagcaacctcctcccccctaatcctaaatttcttccccctccctcttattccctattcttccttatccctcgtctatctctatacatatctctttttcttctaattacatctctttacatatcttttctattctcttttc

SEQ ID NO: 5508 - DNA, 3851 bp, Emericella nidulans
gattcatgaaacgatcttgcactggtagactctccttcataggaagaaccacgcgacctctttaagccgttgctaggatttacacaactacgaggcatttctcctatcagaccacggaatcatcctcaaatccagatccagcagccacccgacgatgtacaagacagatgaatagacaaatctccggatacactgtcccacccagataacctatgagcagatcgtgaaaccacctttttcttattactataaaccttataccaagttgtctatgagcgtcgcgttcaagaatcccgacaacctctgatggctgaaacatgcgtggcttggagtttgcgcggctcgattatatatatatccagtcccgatcccaatgtttcaattagtactataaacagaatcgtcatacaacaagcaacatctccactgacaattctagaacattaccatcagcggtgcatcacgggaaaggcgtatatcagagtggctctctggactactaccccatcaagctttaagcgatgcgaacttaggatactttatcctgaaggctctcggagcgtctccgaggctcggcagcggagcgggatctgttgcaaaaaaaatccactggcatgcaaatgactcagtgcaacacatacagtaatcccatatccactgtaaactccgtccttcataataccatccagaccgaatgaaagcatcatggcccccaaactcatcatcttcgacttcgatggaactctctttgactccctatcggcaattaccacctccgttcaactgaccttcaacgccctcctcccctcctacaccccaacaccatccgatatccaccggttggtctccagaggcgcaccaccagaaatcactttcatggccctgcaaccccagtctccagtatccgttgatggagtggacgcctttgacgaagagacctgggttcgcacataccgccaaatatattctgtccacggccacccactaacgaagccgtatcccggcgctaaagaggtcctgctctcgctgcgggaaaaagggattccgcttgcaatcatcagtaataaggccgttgctgctgtgaaaagcgcgctggagagccatggtcttggcgggatcatcaatgaagagctgattatcggtgagccgatgtttgcgagtgggaagagaaagccgcatccggaggggttcacggaggtgttgctccctaggctgaaaagtgtgtatgggactgtggggtatgacgagggagaggtgcttatggttggggatacgatcacggatatcctctttgcgaagaatatcggcgcaaaggcttgctggtgccggtttgggcagggcaaccgggaggagtgtgagaaggagagtccggagtctgggattgatgagttgatagacgtccttggggttgtcgatgagctgtgacgggcattgtatagatttgaccatatatccgtatatacaggcctagaggcatagattatgacgtagacttgcgataaagacatataatccgccttagctaggataataacatggataggactatatcttttccgttgtctagatgctacctaggacgattcttgccactaactatgacatgcttatgtctcatgtgcacttgccaaaagaagtcaatcgttcgaattgtaccttgagagtacgaacgtcgccgctatctttatgtttgctagactttgaaagagactagttcggttgatgttgaaaaggacccgattctgtacatgacccaggcgcggtttctcatcttgaaagccagctttctgagtgccctcgatatctacagctattgcgatgcgccagagttgtatccaccgcaagttccgtacttactcgctaacagactgactatctaatctgccgtattactccacggacaccaatcatgaattatgtataaaaaaaataagggcatcagccgcatattgtggaggccgattgtctccggactggccgttccccgctgtcatagacatggagcatgctgcagtcagaattggtatgtgcaaagccgtggatgagaacatagcatcacctccaattgaaatggagttgacatgaacagccattgagaccggtacactggggaaggaacccattagaatatttctgtaaagatatgtcgactataggtttctgaattttggatatgagtgtcgtccgatatatttaccctcaatggcggcatagggtaatagttggtggagtatagttgcataatacggcttttcccgctcttagcaatttcagactcatggggcaaagagctctggttgcagaatatcaaggtctcttaatgctccaattcccaagctcctaatcgaatgctcacgagcagaaaggagcgtcctatctgagaggactgcatatataaccaactagcagttcgcggatgggaggccagaatgtgatcaagcatgactggatgcaatgttccctctatagattagtcagccctatcgcggtagtgtagaaatatctggggcccacgcagtcacctgtatgtatggaagggattaatatatcgaggcatgactaagttgtgactcgatggcgaaaacaccctgaccgagatgtagcgactgcgtttgttcaagagaagggctggactagacttgcatacgggcaactgagacaactctgaccgctgatcggtaagcttgctgcagaacaaggcttcattttggagaaaaattatacacatttcaaggtgactatacagagataatattgtgccaagtagctggaaatagacgcagtcgccaccaacacctccacagcgatgcctttcgtataataaacagccctgagagtaacggacaggacttagataactcacatgccgccgagccattccacttggaccggtgtttcgggctgttgcttggttgcgcggcgctggctgatttgcgcgcaaacgaggttgccacgaacggtagatgactgtcgccaattctttgcagatgaaaagagattgaccactcattaatgagtttgagtaatgagttccccgaaactttgtcatgagtttgtcttgttcccactcgcacgttgttgttcttgatacagggcagtatagtacccagcataataccatgccatcataaggtttttcaacccttcatcttgggctaagacaaaattagcaacgcacaaccatataaacgctcaaacagttctcaacttactctgagggaaggcgggataaggcatggtcggtgcttgtgcttgaggcccagttgcagctgcggtctcttgctcttgtttcacctgctcagacccagccgcctcttgtgtctgtagccgagccttgtcagttacagtaattaggagataaccaagtgcgagatagtcatacctgcatgccctgcgtctcagctggagcggcagccggctgaactgaatccgcggcgttcacgtcagccatgtcgtcatccttctcgacctgagcccaagacattgatggtccagtctccgcctcagcagcagcttcggcctccctcaggacatcttcaacattctcgcctttggcagcgatgctgtggtagagctgtagcgcgattagctgtactgaagtcacgtgccatgaaggtaacgcaccttgtattcctcgacggcttcatcccagctttgaacgagtgcgaagtcatcccagatctcttcctgcgtcagggcccgagaggcacccttgttcttccccatgacatctgcagttgccaaacacgagttattaggacttgtgttatgcgggtggagatggcaggcaaggcggaggaaagttcacgcctggcgttctgcgacccaaaaaataattttcagcaaaaagt

SEQ ID NO: 5509 - DNA, 5431 bp, Emericella nidulans
  unsure (1)..(5431): unsure at all n locations
gagaattttggctcattctttgacatgctacagaaaaagtctcagtttcaggtgatttccatattttacgactctggcctcgctctatatagttgggcttttgggcatacatatattacgctaaatctcatatgcaaatatgtctagatattgaatgcgttcccaggcggttggtttacctgtttcatagtctaagtaagtaaactaatgaatgctcaggtccagtgcattaacaccatcagcaacgctggctctgactccttaaccctcctgaaccatttcagatatctggacagacaagttcctttctccgattagtcttttacatactctagcagcccccagaaatttagatccagtcccatccccgtagcagaggcagcaagctcgcgcttctctgtctcctcttgcgtgtagtgagtagcccgcttccatgcatctcgcccgttacccttccttgcgcgcctatcacaagttcatcagttagtatcaagtgctcaaaacaatggatcagcgcggtgaagaagggaagaaagatatcactcaccgaaccccaattcccatctccacacccctttccgccttctcgagctcctctatcccaactgtcatatacctatagctgtccttaccaaaaatcttccactgctcaagtttctcgttctccaacaatatcagcatacccagctgctccactaagggagaagtaccattgcgcgcaagcgtcttcttgatgtcacaatctttacgaacccagtcgtgtaatttctaaaacatagctcgcacagaactgaacagcaatgatctctttacgctgcgcactggcagttttgtgggaactcgcacggcggagagcagggtccggatttgtttccgggttgcgactggcccatgagcaggggtagtagaattcgtcgtagaggcaggaacagagatatttcgttatccaaaagaggcacatcttgttcttattttgattgtaatttgagggatacaatagagtatagaggataggagatggtcggtattattcgtgttgagggacattgctgcgtttacgagaacagggtttatataggctggaaagggggtaggatgaagtcatagtcaaaggggggaaacaaaagtttgatccaaaagactccaaaatatggtacgcgtattatgatagaagcccttcctagagaaagtagagtaggtttgtgaagaccattgtttattgcagtgacgccacaaacacatgtttgttttgatagggctttatggtcacatgatcattgctactgctgacgactgcgagcaactcaatttatggaaattagaatagtgaagcgtgcacccaacagactgagtattcggcactgccagtgcatatatcagttttgcttttccgacggtagcctcttgttctcagtgttgtgagaatgacaaaaaacgtgaatatattctgctgaactgacaactacttgcctaaaccatcccaatttcatatggtacttaagcggagggcaaacaggcttgtccctccaccagctgtatggtctgcatggccactgtgcctaactctttcttccaatgaaaggactcttagcgttcaagatgatctagcccaaattcacgcataaaaacaattcggccctaaacctcttccatactgcagccacggggactttgtgggcattttccagggcagtgtgattagcctgccaataatgctgccattgtggagtgtcgtttaatatagtcataatttaagaaagcggcatatagcttttttccgcaacgggcatatccaaaggcatggcgaacataccttgtcgactcattcggtcgtcgtgagtgggactaaaagcctcctagtggagtggtcggccaggtttgcaaattaggaagactactgcggcgaaggatgcgagaggagaggagaaaaaaaaaaaaaaaaaggggggggggggagggggagaggaatgacgtggcttggaaatgtccttgatagggcacaggaaagaacgagggaaaagggtgaacggaaaggtttccgtactagtacactgcgtcggaagtaattaaagtacgtagagaacttttgtactgttgcgcacgtacgcaaataaaagtggaagggaacgacatccatcgcactctgctgtgaggtgaccgtagtgttgggcggttgtttcgaagatgagtcgacaaaccatgccttacatccctaccgatgaaagtataccattggaatgagaatggaggaatgcggactccgcaatccccacgagtaacacctcgtgagagtagatcagattttgtcattgctcagcaaatctatcctcaaaagacaattcatgaacagagcgtctccattccaagacacatcacccatattatatcggaagcacaagatcagacaagggtattgagccgcgccaagcgcgcagttatcgattcgatgactgcagatctaaaaaattggttagcaatgtttgaaaagaggtgcgtaggaaacgaactctcgctccaccatcttcatggcatcggcaattttggccctctggaggcgctgaggaacgcggggctgcgcgctggtaggagatgtcggagtgctaggctctgttgtagtgaaaattctagcggcaacagacttggcttctgtgatcagttcagatgcgatatcctttacctacacctctgtcagcatggtgtccttgatagcaacagggatcggtgacatacagcatctagccgcttggcaatatgctgtgcggattcctccttccgctctttatcaaacgactgcgaaagtgcttcaacttcagcgatccatgacgactccttttcacttagcggccgtccgccagatttaagaactttgttccggatggcctcgtatcgccagaccagttctgactgtctatctttggcggccttcaacctcgcgttcaatgctgcagtgctccgggatccctccttcctctgcccatcctcgcctatttcactcgagacacccttgatccgatcagctacatcagctatctgccctaactgatcgcgcaattcaccctgtaacctctcgcatcgacgaaaaagatctgaggcagcacgttcaagagcatttgtgtgggcagacaagattcggtgcgctgcggctacaaggtctagagtggctggtgacagaagcaccggttccttgaggctactccggtagcgatgaggaacatgcttatcaacgaagaactccaagggagaatcagagtagagaatggacgggacctggtaagggggacgatgggggggaatcgtaggagaatcggtcggctggacgtcagattcgagagaaaacgttgggaagaaagtgggcttctcaagaatagccgcatatggattagatgcatgcgaggtgagcaatagatagcctaaatcgtagtcatagtagactaaagacgccgggaggtgaaagggttgactgctcgaagtgccagcatcgtctacctggatgatcgattccagaacagatgcattgccttggcaaaggacttgaaggcggaagcccgagcccgatgtatcctcagactgtaattcgtcctccaagcgctgtatccacgaagagagcgagatgaaaactacgccgtgagacgttgtcacaaagaagctataccgggagtgagcatcgggcgtgaacataggccacgtaggcaacgttctatgctcttccttagtggtattgatgacttccactagtagcaagtcacttgactccgattcaggcactcgaaaagcgttcttcctcgcctttggcagccattgtccctccactccaacgatttcaaggcagatatacactcgaccgctcagggaagatagacagattacggtcgctgacaatttgtcgccgccgctatccagtgtcaattcatcctcttcgcccatcatcagagcgtcagtatcagccttggccgcgatgactagcatgtcgcaaagatcaagatcatcagcatcatccccgatgtcgacgcgaaaaggaccttggagcttaggaatcgcgctaagatttgagggtcgcataaggatttcagactcgggttcggtcgcggagccaggaattatctgtaggggttcctggttatcgatttccgctagccactcccactgttgccgacaggccgccaattgatcctcatgatcaagaggatcctcttccaaggcggacagctttggtacgattgcagcagacaatgaaggaatagcagcagaaggcgctctccacttagaaggtaagagcggacagagcgcgtaaaggtcaccaggcttcatagcaatccaaagcgtcattgcggcccaggcatcctccttttcgcttccaacaccaccaaagcgagccgacgcaacctccatatcgacataatcagaggaaaagcccttgttctttccgaagcccgacggcgcaaagtcctggtccgaagaagtcccatcgattagcttcctaaggtcgacggccaaagtcggacggtcaaatgaccaatgattgttccggtccaactcccatacgcgcaccactgcatcttcagttactgtcacaaggcaccctccgagattgctgtagactccgagcggatgccacaacgccgacaccaccggagattccggaatgacatgtgtcgtcggaccaagttggtatgttttcacacgtatcggagaggagtctgcggtagccaggtgcgcggaatcaggaagcactgcgatgaagacggtgtggtctgcgacaattgccaagaaagcgccgttcggggagggtatgatctgtcggatttggtcgtacactggaaccatcaagacctaatcagcatcagtaaaagatatattcgtaatagcaacaatgtgctggacgtacccggtagggagcgccggcatccgcatcgggcttctggctcttcgacctagcgcgctgctgccagtcgtccttcaatcgcgtgaggcttgaccaacgaatttgattgtcaacaaccgtaaatacttcatttcctcgccgagccagtgtccgcgaaggaccaagatagggagtatcttttgtgcttttagagcttgctgggtccttgggtgctggactggaaaacaaggcggcaccggggaaagggcgcgagagccagggaggagtataactgatgactttcggcatcgtcaagatgattattccatgaagctgccttgatgaaatgatgattgttgccgggcactaattgccgaccgcaggcccgttgagcttcacaagaaattttcggtagacttgttgaagaatggccggacgaagcaaaagctgaggcgccaagacaaacccaactaagctctcctgcgctcatccctncgctttcctctcaacgatctcaactacaacaacagcaccagcgacaagcggaagtcttaatcctccagcttaatc

SEQ ID NO: 5510 - DNA, 5267 bp, Emericella nidulans
tcattgaagcattttaataaaggatttaggggacaaaggaacactaggaaaaacagcgaaacaaggacgagaaatagtccacaggttttaccctctccagtcggaccttaagaaacttacctcccttactgatggccagttctccgctcccacgttttgcgcatcaccccccataagctcagcacccatcccttcctacacctcttcaagcgcggccgattctgcttcgttgcaggcctcctcgccgcgcaactgtacctgggcaaccaatgtctttgcgccccgcttcaactgtggaagggtggtatgctgcgctcaatgctgcacgcgggcctccacaaatgtccgttccggtacagggagctttcagcctctgccacttcgccacaccgccaatctccgcaagcgcattttctggtctgcgtacgcgctcgatcgctacttaagccaggcgctgggtttaccgctgggtgtccaggactcggacattgatgtctgtccgccgggggctcctgaggtgcatagaccgttacagcacctacccgttgcgggcgcaaacatgatagggctctcggaagaagaggcagcagccgaagctgagcgaacgagaagggaaacgccctttgcgagctacgtccagtctggcaaattaacaggcgaagccctcgagctcttccataaatcgatctatgtgcgctcggtatcccagacatccgtcctgctcttgacgacatccgtccataaatggtggaatggccttgacttaccaccgccaccgcccccggcaccaccatccttattggaaacgagagagactgaagaagcccccttcaactacaccccctttttcaccatcctctaccaccaccttctcctcctcctgcaccgccctgccctttccctcccaaatggaacgcccgagttcctctccgcacttcaatcatgcatctcagccgcgcggcacatcctctccgcgctcaacacgcaaaaggacgcaggccaagcgttcttctggcctggattcctgagcgcggcatggatggcaggcttggtactcgctttcgcgtgtcagttaggacagtatgtgctgcccaagggttgtgcagaaattgagaattgtcttgagatcttggggattatggccgggcagtgggagccggccagacactgccagcgcgctttgagggtgcttcttaaggctgtttctggtgggtctagtgtaactgctagtaatggcactgcaggcatagagaattcgaatgaaatggccactatcggccacggtgcacaacagcatctacatactatctcagtcggtgaggacgcatcgtcggtagcaaccgcacagccggtctcagctacgaatggtcgcaagaagcggaagttggagttgtcttctgcggagactcaattgcaggattctacagttgatcaggaaactatcacggagtctggcgtaactggaggaagcgaaccgattacgccgggagagataggcgggcatgatgtcgggtggcttcacgccctggcaccggactataacacggtacatgctactgcccgagggcaatttcgacagtctgatggatttgtttgggcagcagtatccgactttctaggataactactttgtgatacacataaaagctacatgcgtggtttacagctttagaaaccatgaggaagtcataagtctatattacactcgtgtcatcgatataaacgagcaggtaagaagctaaagacatcacaacttcctccctctcgccacgaaaagaaaaaagccatggaatccgaacaacttttctcccgcccttcataagaacgtcgggaaccgaacccagggatatcaggaccaggagggaaaaaaaaaaagtggaagataaaggaaataggagaatggggttagaagaagaaggaataagggagggcggatagaaggaggtgaatcgttaattcaatgggtaggtcatgtcatcaaaaatagaacgtgagacagaattccgacttgctgggagaaagcacatttaagccttgttctcctcagcaggagcctcctgagcagcctccttgggcttctcggcagcaggctcgtcggacttgttcttcatgtactcgtcataaacgctaagggcttcgtcgaccttggcgcgcaaagcctcgtcatcctcgagactgtatactcattagcactgcacaatataaaggggatgactgggaggataaaaaacttacaggccaagcagttcagtgttgtccatctccagaagcataccagtaatcttaccagcaagctcgggctgagtggcctggatcttagggtagagagcctcgccgagcatctgcttctgttgctgaggaggagcggcggagagagcttgggcagtgagaacaccgacgggagtttcgggtccgggctgaccgacggcttgaccgcgaccgccctggccggggcgcatctgtccgccaagaggaacgccaccacggccgccactgtagccaccacgcataggaccacccattccggggacctgaccacggccacggccaccaccaaactgaccctgaaccatggggtagcccatgccgttagggataccagggccctgcatggcgcccatggggagaccttggaagttgggggggatctgctggttggggccaacgccacgtccaccctgctggccagggaaaggaccggggtactgaccagggcgaccgggcatgcccatcatcataccgggctggggagggaacatgccgccacgttgagcaccagggatgaaaccctgctggccggggccgtagaaaacggcgggagccatgtaagcctggcccataccggctgcagcggcagcctgctgctggcggatgttgttgcgggcctggatgctggcctcaagctggctgcggcggacatccttgcgctgggcaagggcgacatagagaggcttgccgttaaccatgcgctggttcatctcagtgacagccttggaggcctcgtcagggctgctgaagcaaacgaaaccaaagcccttgctcttgccgaggggcttcttctcaggcttctgctcagcctccttcttctcctccttctccttctcctcagcggcaggttccttctcaccctcggcggccttctcattctccttgttggcggactccttggtctcagactcaggagtggcggtctcaacaggagcggtgtcgcgcatcaccttggcggaggtaatagtaccgtaaggaccgaaaagctcacggagcttgtcatcatcaacatcgtcagtaagattcttgacgtagaggttgacaccctggtacttggaggctttctccatgcgggcggcctcgtactgcttgcggagctcctcctcacgctcgtgcttcttctgggcacggccaacgtagagcttctggctgcggacttccttgtcgttcatctcctcgacggcggcctgcgcgctctcgtgggtggagaagttgacgaaaccgaagccacggctcttaccctcggagtcacggctcagagtggcggaagtaatttcaccgaacttctcgaacagcttgcggaactcctcatcctcgacctctgggtcaatgttcttgatgtagatgttagtgaagttggccttcatcttctcgaacttgctctggcgatccttctggagatgtggtggccgacgaagaccttcttgtcattcagaagcatgccgttaacgtgcttgatggcgttgttggcggcctcagcggtttcgtagtgcacgaaaccgtaacccttggagacaccgaactcatcctgagcgaccttgcagctaagaatgttaccgaaggctgcgaaggtatcgtgcagagccttgttgtcaatagcgctgtccaagttcttgatgaaaacgttgccctggccagtcttgcgcagggcggggtcacgctgagaccacatgatacggcagggcttgcccttgatcagggtgtagttcagctcatcaagagcgcgctcaccgtgagcggtatcgttgtagttaacgtaggcataaccgagggagcgtctggtgacggcatcacggcagacacggatggaggcaacctgaccgatggaggagaaaagctcgtagagcatagcctccgtcacggaggggtcgagctcacgacatagagagaagccgagtgaggctgggaggtggtagcgggggcctcgacagcggtaacctcgggagcaggagcgttgtctggggtgccgttggtgttctcggcgggggcgggggtggtagaagtttcagcagacattttgagaggctactgtacgagacaagtggttagcagatgggttttaaaggagaaaaaaatgtcctagcgaaaccggagcacgagcgttcaatgcgtctcagcccgagccatactatagtcacaatgaaacaccggcaggacaagagaccgagaacatgctctcagaaaatacatcctcggcgcatattacatgcgcagagaagattttctgcggaatcgcacattgagaggaggggaaggcaaaggcggtcgcagaggccaggtagccaagcaatccaacacaaccagaacagcaggacggaagacgtacggactcggtagaactcgagaacgagaataagaagaggaagagaatcgaattggagagttggcgatgcgaatgagacgcgatcacgaggaatgaggcaaaagcggcagacacgggatttctaccacacagacgcacacacagcacagtctcgagatatagattcagataagagaatccgagcagaggcctggatatttaacaattttttttcgttttccgggttttttttgaagttttttttccgatagaagtcgaaaaaaaggaggattgcaggagaagaatgaaagggaagagagtcttcttgaggaggggaggaggagggaagatcaaagagagacgaagacaaaaaaaaacttaagactgaaggcggtccgcccgattggggtccaattttttatttttttctcacattttttctgcttttctctggctttctagtggcgctagtctgctctcggctaatctgcggctgccttaagggctactgcctcaggcgtcgctcccttatcgggattggaacttcaaaggagagtaggagcaccttatctaccataacattcatagatagaacagcgtaagaataatttgtccattaggtatgtagtctaatatactaactcaggtcaaaccctgccccagaattcaccgcatacagcagcttctcccgcagagt

SEQ ID NO: 5511 - DNA, 6175 bp, Emericella nidulans
tgacgtcaatcgttgtggtttgggcatcaaaggtatgatgagctgctagtgcttggctgctggaagagagtttttcaccaactggcaatagagcccatgtttcgactgccttccgagcttcagggtattcaggaggacttctacgagcatggcatagcctttctcaaagaatgtgatgaagcaaagttaagcaagctcgccagccagcttggaaagattgtccgccctcgtaatgagaagatcagtggcaccggtataagcaatatccgattcgagccctctcttgttggcaagggttacagttctgaaggtatgatgaaagcccacagtgttcggctgaaatcaacacatactgaccacttcccacctgctagagctttactttcacactgaccgtagcggctgggactgtccccctcggatccttgtgtctactctgaagagcaagtcgaccaacggtggtatctcgatgttggccgataccactcgaatcatccaagaaattaagaaacaaggagatggtctttacgagctgcttacagacccgaagcattctagctttcgcacggatgatggctcgtttgtggcccgtccgatttttgacgagagctcggggctgtttcgttttcgcttcgacgacggaatccagctatctgcgtctctcgtgcttcgcttctcccagctatttgatgccatttatcgcaactcattttccgttggcctggaggaaggccaggggtatctttctggacaaccacagatatttgcacggccgcactttctttattgggtcccgtgaacttctgagagctcttgtcaatctccctgccacaaagtcggttgttactatttattcaacattgacgaacactctgccgatccgaggagctgagtgtcgatgccttttattcgtgcttgagtgatattgtgggtaggccaataactcatgctaatactactgtaagcctccatggaagaaccgacctgggactacttcaagacatccttgacttccacaaagtggaaccaaagacctctgttacggaaaaatttcttgaatcccaccccaggtatctacatgcttcactcgagaaggggctcaaatcagtagcgtgccaaggtgtcaaagacacgttggagtggttgacggcgaagaaaaagaattccgactctccaaccctaagagtgggactgctgactggcaattctcgttcgaacgcactcttaaagatacgtgccgctggaattgacactgaactcttcgaccttagcatctctgcattcggtgatacccatgtggatcggatatctcttattcaggattccatgaaaaagctgcgtgctagggacggccctgacctccatgaaagcaaggtcatcattgtcggcgacacgcctctcgacatcgaatgtgctaagagggctggatgtgctgtcgtcgcggttgccagcggaaactacaacatggacgacctggaaatgctcgagccggatcatgcttgtgcacagattggcgagtcgagagcttaccttgattctcacttgagccgacccgccactccactgcctttgatgggtaactgatgggcccttgaaagcgcacagcattcatatccggctctactgaacggcatgatcagcaatgcaactggttagggataagcaatcgagccagagccacaaccaacagggaaaaacgagaaaatgaaaaggaacaataaagtacttaaagacttatgtgccaggactcacgtgctaatatgtttatacttgcatgctacatcacagccggtagagtcttgacctgttcagcagatataccctgtacgtacttagttatttctcttatgttcaggctctcttttcgtcctgcaagtacagatataatgtatatttattcagcattgtgctttgtatcacccgcaaccagatgttacctaagctttacgaatcttcctgactgggacgtaactgtttggtcagccaattcctaacctgagctttacaaaagagctttaggaaagatgagacgaaatgctagaaaagtactcctcaaacacacaatcctatctgtcacgatgggcatacgtttacgacggacagtctatgcgtttgcgtcaacaaccagcacgatgaattccagcaaacactttctaggaatttgtggcggctttacaaggcaaaagcaactggtctagattatatcaagatccataaatccccaaccggaaatccgaaagccgaaatctccacaatatgcaatagaggtcagtaagaacagcaaaacatgatggatctcagccgctgtctgggcttcggttaggggcgaatcggttgaacagaggcatatcagacccccatgcgtaatgtagtactgctagcatccaggaaatgtgaaagcccgtgataagactcttgtaatgctcagtccttcatgttcatattcctatacgcaagaaatatgtataattgataacaggttaccagctgtttcagcagataaaagttctagaacagtgcttgctctgcttgtctgcataaataactttcataggtgcctagtagtgctatactagtagtatccaaagctgtgtcgcacctcccgcagcacatgttagcagctgtcagcagatatgaagtgaagccgtattcaggtgatattagacaaggtgccagtaagcttaagcaaaagtcaacctttgattgaacgcaaaaagtgcttggtcactaaccggcctgtccatgattcagaatctggaatgccttattatcagaactcagaactggtactgtttcccggtcaaaactgtgataacctcatgacagaattcttactaacatattggagactggaacaggaatcgggggaggtgttttgatgatatcaaaacagtcaaaggtgaaggatgtaacagtgtaatgtgaacatgcaccctctgggtccctccttattctctcaggattactatcctttgtgttcacatcacacctactccacacacaaccaagaagctacttcctttgccggctaagctagtcaagctcaccaacagaaaaatagtgaatccatccttgaagttctaactatgacccaatgcaatgttacaatcgccccgagtctatatatttcgtctacatactggaccttacccctccccccattcactttgtcgagggcaggttggaccgtgcagattcacaccttccaccatcattgttgtgatcgatgacatgatctcagtctcacctactgtgaaggtcctcctaattgccggccatgtctcactcacgggcttgctctatggcttggacactggtatgcccccgcaacgttccccgttctcaccgagcaaactttatcgcagagcatcgcttagcagttttctctacggataggctcgattgatgttataacccagatgacccagttcaacgcctccatcggctatctctcttccatccaacaaggggtttacgttgcctcgatcctactctcgtcctctgtatcctccttgacaagcggccgtgtctcggaccgcatctcccgcagatacggcatcctcattggaaatgttatatcgctccttggaaccgtcatatcagcttgctcacccaacttcgccagcctcatcgtcgcgagcctcgtgactggtgctggtatgggacaggacatctccgtaaccacagtgtatctggtggagattgcaccagttgctatccgtggagttgccgcttgtttgctgcagacttgtgttgttttcggaattatgacggggtactttattgcgttcgggtcgtcgaatatcgcggggaattcctggtcgtggatagtgccgttcatcgttcaggccgtggttgcagcggttctttctctgggaatggtccttgtcccgttctcgccaagttggcttgcacaaatagggcgtaacaatgatgcgaagaaggtgcttttcaaattacggcctgtggcgacggtagaagcggagtttgaagagataaggcagagtctggatccggagaagcagcaacaaacggcgagtatcaaagagatttttaagcggaagtatagaagtaggaccgtgctagggatctttctcaagtcattccagcagttgaccggggtaccacaggaccctcagcttttttttttctaacatagttagggctaacatggacacctacagattgacgtggtgctgtactacgcaccaatcctttttcagcaagccggcttcacgtcccagcgagcctcgttcttgtcctctggggtgatcggcattgttatgctggcgtgcacagttcccccgcaaatctgagtcgattgctgggggcgcaagacgccgttgatcatcggcggagcggcaatggcaatctgcttcattgtcatcggatcactttacgcgcgattcggccgtaccgaagggaacaaagtagccctcgcctctgactctgctcaatgggttgtgattgtcctgatctacttcttcgtcgctaatttttctcggtcttgggtgtggtaagtcttagtagcttactttctcatctttagaacgaattgcctccgtgaactttctcgaaccgatctgcgctgcgtagcagctgtggctgtcactaggctatacgaatcagtagtctatgtacataccaaagccctttgaattccaggtcggcaagatctacgcctcagaaataatcccgacccgactccgcacaaaagtttgcacccttgggctggtggctaattgggtcgtcaactttcttgtcacgttcacagctcctttgttcctacgcgcctcgccaagcggaccgtactatctctatgggttctcgaccgttgccgcagtaatactctgtgtttgatgcccgagacaaaaggacatagtttggagcatattgagcgcttgttcgagaacgtcaacgagcgtcagcgcggaaaccgcaatgcgagcgagaacaggcagggaaacaaaaagaccggaaggcggactaagattgaagcagaagctatggtggtgtcgttgccgacaacgttggagtcggcataattagtgtaatctggtttaggggacgaagcgtttgagagttcgacagcagaagttagcactacggcttattgttttgaccaagatcagacgaagaaagaaggcaacggaatttaagatcaatccgaagtagggctaatctctttgatgtactctttgatgtaatgtaagctttcaatatagttggaaaatccgtagataggtggatacgctcttcatgtacactggaatcagctctcggcctgagctaatggtttaggagtcactccctagtttacagagttttgagatatgaatttgagttctcgcgtattgatagagacgtcaccgtgtccagatcatatacgtactttaccatgacgtaggtgtagacctgttcacctgtcagactcttccgcgtccaaataaatcttggaaatggatctggttgaggggcggtgccactgttttgacatgaaggtgatcgccgacaaaccacggttggatacacattacgaacaaagcacattaggttcgaccttggctcttgaagctttgagcagctacagaaattttttagtcctcctcaaatccatcaaataggatttatatcctgtaggttagctgcagtcacccaaaaaaggatatgatcgtggagcatctactggccctatgattaatgcgcaaccgttggaggttcctgatgcctcatcgtctggagtagtttgagtggtcgagtttcagggtttcggaactcggtcttcggctgttctccgctaggatcacacaaaacggataaatcgaaactagcagagcataatcggctcggcgtttcaggcccaaatttcaagataacttgttcttcaagcaaagcgacgatcaacggcgactagcgtgagcttcagctggccttgcccttaccagttccgctggggatcagcatacgaaggaaggggttacgtagggacgggttaaatgagatatcgtgaaccgacaagcttttggcgggcgtcgaaacctatgtgacgaactgtaagctcgtgaacaaagtcgcattctgagttctgatgttctgataagggctctctccttggatcacaattgggacgtcagtcattgatgcctagtttgagttatgatgctcaaagtctggg

SEQ ID NO: 5512 - DNA, 8617 bp, Emericella nidulans
tacgagtgtacgtggcgagcccgatcgcctcatgcacatcatcggcgttggcgtcagattcatcgtctgaggaagatatccttggcgggaaagatccgtcgtcctcagcatgactcttcctgaaagccgcaataagaaggttagaggacatgcttttatgtgaacgagaatggcctgccgccgagtttggccgcttggttggtgaggagttatcagtcatagtgcttccgctcagttcgagcatcaaagaagcatccgcagttctaggtctaggcctaggttgctgggaagcagctgaagattcggccttgggtgaagtaatggcggtatcactctttcgagcgagaacactcgagcgcgttgcattttgagattcaggcgcaaggaatgaagtcggagtacacagacgtgggttctcgagtcgctcattcttgggaatttgcgaacttggagacgcttcattcaggtttaactggggcgatgctggaggtgttggccgagacagaacagtcgctgaatggggtaatagctgagacggttcgagagacggcctacgctcccgcgtcatatccgccgatgtgcaaggggcgctctcgacgtaaggtttgaggtcgagggcattcgaaatagccgtaaggtcgacactggaaatagccgctgagcgtctatgagcgtgccggcgcctgccgcctgcactaaaaccagggccaggtggaggcaactttaagggtgccattggagtctcatcgctagtctggccagcggcggtattcccaggaataatcagctgggtcaccaccgacgaacttaatgggactgtccgaacgatgcccgctcatacggctattaaaagggcgctggcgctggcgcctggttcgagcccaccgaacctggattgaacgaaaaggctggaagaggcggtcggccatttgttgttgtatctaaatcttgcttgtctggttcgtcgtggtctcgtgctgggaagacgaagggagggtttggcaaaggtgtagacatggttaaattacgacggtgtccgctaggggccggatccgccgagtcgaaataatggggaggcgatggagcagtctgcggttgcagaggtagagatatcgacgccattcttcaagtctggacgcatcaacagactcaaagcaacgccagcctcagctgtcagatcgctattcgctaacgaatagtcgtttttagttggtgtagtgatctaacgtctgaggacctccagaccaacgtgacttcccactcccagtgactggaaagcccaagttcgtctggaggtctttaaatccacaagaatgacattgaatttcctcaaaccaggccgacgtactccagagtaaacaccgaccacgaccgggaggaaatctctgggctcagtaaagaaggaaggaagcgggaaacgatagctccggatatttcgctgaaccaaaagaaccgattaaatcatacggcgagcacagcgacgaggagtcgtatcgaaatcgacaagcagtacgaacgtcaagagcgagcgagggtcttaaggagtggacggccacggaaaccgggccagaaaacgaagaatatcggatgggcgggactgtcaaaacaaaaagtaatagcaaaatgtaaatagaagagcagtcgaaggtaaatgaagggagggaaaggtaggagagagcgcagacgatggggaggatgggagggtgaggtttaggttgaggttgagaaagccttaggaaggggagatccaggaaaggctgcaatcaggttgaattggagacggtgcctgaggccgcctagtcgagctttagtcccactcactaatttagcacttacgggcccggtacaagcggtctccattttgatcgtcccttagccagtcagcgacgccgagcagccgcgataaatgaaccatccaggatatcagtttgtaccgctggcttggccttgttaattattattgacattatactaatattacttgctaacagcaaagtcaacagctgaacccgacgccggcttgatggtttgccgggcataccatgcggcattattgaaaccacagtttcccgtctgggtcagcccagcccactattgtgtgtgtgtggaactgtgggcagtctggacgtcattgacggctctgcagggagtatggtaactcgccaccacatccagttgaggacaataataatgctgttaagtgtggaatagagccacaaagggagtcaaagccgaatgcggtaagtccgatttgatcttcatatggggattcaagcacgaatagtattacaaaggagctgcccaataagtactccaattggggaccctttatgagaagaaaacatccttcgcagggatagctgttcggggtacctgatcggccaggttatggccgcttggaggcaattatcctgcgctcagtccaaaaatcacatgtacctatgtacggaggcgtgcaccaaaagtttttgcgcgacgctagtaatttaatgcgccgacgtaacaagcttacatacaaattattatagcaacatgttttttgacccacaactaactatatccgcataaaccccgaaatcaaaaacaagagaaatgaagctattcaggggcctctattggctgtagagcgaggtctacacgtggtgatagtcaccctttaatccgcctgcctgcccaactacgcgtatcgcgatcctcacggccctccttgtattcattacccccttctagctcgataacaatctgaatatgacaaattagacgctcaatccagtgttgtatagtctcctgtgggagatccgcccaagcctgcctccattctgcttctcctgtcttcttatcgcggggcgcaccgcgggatgttgtacgcttcttcatccaagcccagcacggctcaattgcgttgagatccggtgaattgccaggccagtcaaggatcttttgcacgtcttctgctttatagacatgctgctggattcggtgacagtgggcaggcacgctatcctctaaaacaatagtatttgggcgctcaatcatgcattcttttgcaaatggaataagaagaggtttaaggacttcctaggcagtagaataagtaattagcacgtgcttaactactctataatagagaattatagagataagggaacaaactgtttgatatctccaccaatcaatcccccctttacctttacgtataagcttaccattcttctcgttccaattccatttaggaacacggccgcgatttgggcgtaaatgaacacgagaaagacctgtagccaactcccattcctcccggcatagaggttccagctcacaattcatggcttcaatctctatatctgcctgcttccacatggcagcagtctccggcttgtagatatgtaaagggcccttcttattatatgagaagcaaccccataccatgaagtcagagcaggccttccagcgcctccgtacacaattccttgtatgtgaatctttcacagtcctccacactcgtattgctccgcggcggtggccaagaataacaccagtctcgtcggtaaagatcacgcgtttccagtcttctaatgtccaatgttggtgggcaaggcagaattcaagacgcctaagacaagcagcttcagtcagaccaggcttccaggaaggttttgcaataacaaagccatgagaataaaggatacaaagaacagaagaatgggagataccagcttcataagcaagaatttctgataatttctcgcgccctgcttgatctgcagttactgaagtaataacagtattctaagtagcttcagtaatctcaacaggccggccagatcactttctatcctcaacaaattcaagctgcacgcgcaggcttacttccggccggtagccacgatctctgcctttctttacgatgctctggaccgtacgaggagagagattcaaagattttgagatcttctctgtactaaatccgatagctgataaagtaagaacttggacacggagttctactggatgaaagccgccgcgaggcatcatgaagctggtgttgaggaaggagagcaactgtggcaggataagttgaattagtataaaaagcgtgctaagcgtgctaaaacaccaaattgatcagtcaaatagaatatatgagcagtgtgaatagcttcaagaggctgcaggcagctgaaacaatgaagaagcaatatatgtcaaaatattaatgtatgtatggtagtggggttgccatagaaattgttatgtagggcgtaacagtattacatggcgtgacactagcgtcgcgcaaaaacttttggtgcacgcctccgtacactctgaggctctcggccttagcccgaggcgggcgccgggcggtgtcactgtcggttggccacttcgacctcgaatgattcatcctctcccaagcaaccgtcacgatcgaccacatcttccttttctttttgctttctgacttcattctgttgctcaggctcatcgttcattacttgtattcttagcatacgttccttgagtattatgatcatatcccgtggtccttatatctcaacgaatagtttgcgcttgaagctagcttagtttcttcaattgggttctgacgacgactacgacggccacgacacattacagtatcctcgcttttcgctttcgattccccgcgggcttcctaaattgatatattatttgagtcaccatgggtgttcccaagttcttccgctggttgagcgaacggtatcccgcgatctccatgttgatcgcggagaaccggataccagagttcgacaacctgtatcttgatatgaacggcattattcacaactgcacacacaaggacagtgactctccaacgtttcgaatgactgaggataaaatgtttatagccatcttcaactatattgaacatctctacggcaagatcaaaccaaagaaactcttcttcatggccgtggatggtgtcgccccacgtgcgaaaatgaatcaacagcgtgcgcgacgcttccgaacggctttagatgccgaacaggcgaaggagaaggctattgcccaaggaattgagatgccgaaggaagatccctttgacagcaactgcattaccccgggcacagaattcatggcgaagcttacggaacagcttaaatattttatcagcaagaaaatctctgaggataaagactggcaaggcgtggaaattgtactttccgggcatgaagtgccaggcgaaggagaacacaagatcatggagtacatccgacatgcaaaagcgcagcccggatacgacccaaacgtgtgccattgcttatatggtctcgatgccgatctgattatgctgggactcctcagccatgaccctcacttttgtcttctccgtgaggaggtgactttcggtcgccaggtgcagaaaaagcccaaggagctagagcatcagaacttttaccttctacatctatgcatggtcagagagtatctgcaattagagttccaggagttggaggaagaagggattatagatttcccgtacgaattcgagcgtgtgattgacgacttcattctgatggcgttcttcgttgggaacgatttcttacctaatctgccaaacctccatatcaacgagggtgcgctgtcgctgatgtttaaggtttacaaagaggttctgcctaagatgggcggctacatcaacgagcagggtaccatcaatttacagcgacttggtgtgcttctggatgccttgagccacgtggagtaccggttctttgaggctgagtactccgacgcgacatggatgcgagcgaaacagagtgctgataacggcgcggatgtggatgctaaaccgaagacattcactgtcacgcctgatcagaaaaacattctcaagactgtcaagaagtatgttctgaacagacctggaaaggcagcagattcaaagcctcttgactttccacccacgctcccagccagggaccgcaaattcgtggagcagcttgcggacgatctacggttgccctggagtactgtctcgaatgacgatggagaccggttcattcgaattcaatttccatccaatgaaaacgatgacagcgaagaagaggaggatgaggaggcttctatggcggttcggcgagttattcgcaaatatgagaacgccaaagtccaagagctctcagctgaggaggcattagcggctgcccagaagaaatacgaagagaagttccaagattggaaagacaagtattatatggaaaaattcggctggggattggacaaccacgaggagatgcgaaaattgaccgaaaattatgtacaaggccttcagtgggttttattttactattatcgtggcatcgcttcctggccttggttcttcaattcgcattacgcgcctatgatctcaggtatgtgcttgattacttttggtcgtcaacaaaaccgctaatgtttcccagatgtaaaaaagggtttgaatgcggatatgaacttccgactcggaaggccatttaggccttatgatcagctcatgggggtgcttcccgatcggagcaagaaaattgtacctaaggcataccacgatctcatgtcctcgccagattctcctattatcgacttttacccacgtgacttcgaacttgatatgaacgggaaaaagatggaatgggaagctgtcgtcaagatcccattcattgacgaacgtcgcctcttagatgcccttgcgacaagggagcaccttctaacaccagaggagaaggcccgaaatggcttcggtgttagcctcaagttcacgtactcgccagatacagagtacatctatccttcctccttgcctggagttttcccggacatccctaactgccgctgcatccaaaatgtctttgacttaccgacgatggacggccttgagccgtacgtcggacttgttgaaggagttcatcttggagcatcagctcttgccgggtttcccagcctgaaaacattgcctcacgctggccaactaggtttccatggggtctgtgtcttccagcaagaaagtcgcaacgaaagcatggtaattacagtacttgacccgggaagccggtcaagttctgaactggctaagaaaaaacttggccaacgagtctttgtgggttatccattcctacaagaagcacttgtcaccggcgtgtccgatgaactatttgactatactcttcccgccggagaagagcatcctcttgccacacctcattcggatgctcagattgagcagtggaaaaagaaggcggacaagatcgaaggcatctacagcaggagattcggtactattatcggcccagttgaggctatggttcatgttcaactcctgaagggtcttatcaaaactgactccggtgctaccgtcaaagaatttgcggacattcctggacaagagacagattatgcattgcaacttgttgtcgacgaagtaatcaaccctgatgaacggttcattgaaagagaagccctcccggtcgaaaaagagtttccggaaggatcgcgcgccttcttccttggcgagtttaactacggaagacctgttcatatcactggtcacgatgatggtaaagttaacggacttattgctgttatcaagggccgggagcccgagtttggaagagaacgtgcgcgaaacgcggaggctctttctccctacatgccagcctttgcagttgcgcggatcctgcagctgaatcccttgactttggctaaaatcacgtcttcattctcagtggacgtcgatggtcaacgtgtcaacttgggtctcaaccttaaatttgaggctaggaagcagaaggttcttggttattcccgccgatctgagtcgggctgggagttcagtgcaaaggcaattggactggtagagcagtacatgctcaaattccctcaatttatcgcgggtatccagcgtaaccctcgcaatgacagatatcagcctaccgatttctatcctcccgatatcgctcttgacaagataaatgagatcaaagcttggctcaaggaaattgagtcgaagaatttcgaacgggtccctctagaagcggagcagctcgattcagatgttgtgaagcttatcgagcaagacgccgaccaactagtgaaaacccagccgcctatggaagccaagaaaattcgtgatattcctcggagtgcgcttcttcggccagctgacgttgaacatcgacttggaaaccaaactttcaaacttggagatcgtgttgtgtatgctcaggattccggcaaagtgcccatagctacctcgaggaactgtggtcgggcttactcgaacgccaagagccattttgcttgatgttgctttgacgccgattcaagagcggacaactcttgggaccgattctttccttccagggcaaactgactggcgtctctgtccgatctctcgatcacagttgtgcttgccatactgtgtaaccaatcataaatagccttctttaccgtaagggtcggcgcctttgtccgggtaggctcttaaaatccctcccctcatctagccttcggaaattgccgggagagggctgtcccacttcgtcctcctcgcgtttaaccagttaccgatatacctccctgatctgccctctct

SEQ ID NO: 5513 - DNA, 3762 bp, Emericella nidulans
caatacgaggtattcaattgcgatcgcagtttatgaccgattcaaggttgatttcccggataactaccgacaggccattgatagatgccttgaccctaacctaggattcgacgagaacgacgaagaactaagtccggatggtttgaaaatgttgatttacgatgaaatcgtacagcctctcgaggatagaacctgaccaagggtttggcagtacaatcgagactccgtaacgtgatgcggtcgcgcaaaccatggaccttagtcgttgggggcaaatgcgccaactcaaaccagtttctcccatgtccaccgcacctagcactcctgatcaaagtaccgtaagtcccgaaggaagcatatcgatctccagaacttccacattttgggcttcttccgagcgtctagtaagcagcaccggtagcattatgagccatcgggattatacagtaggatggatttgcgcgcttccaaaagagctggccgctgcacaggcactcctcgatgagctgcatccgccattaccacaagacccgtccgacctcaacaactatacactgggacgcatgggagcgcacaatgtagtaatggcttgtcttccgtcggggttgatgggcacagtctcggcagctcgagtcgcaagtcacatgcggtctacatttaaatggctgaggtttggtttgatggtaggcattggtggcggagtccctggagagaaagacatccgacttggtgatgtcgttgttggggagcctaatgggccgtttggtggagtcatccaatacgactttggaaagaccgtccagaatggagaattccgccgcacgggtttccttaaccggcctccggatttgctactgacggccatctcacggctcaaagcggatcactatcgcaatagagcagaccttagccgacatttgagcgacatgtttgagagatacccgcatttgagccgcgacttctcatacccaggtgctgaatatgatatcctctttgagagcaactatgatcatgccggagtccggtcgtcgtgtgattcctgtgattcttctaggttacttcatcgagaaccgagaaaatcacactccccgcacatccactacggcctcattgcctctgggaaccaagtgatgagagatgggaagactcgcgagcaattgagaaacgatctaaacgtcttatgttttgagatggaagccgccggcatagtcgatgtgtttccctgccttgttgtccgggggatctgcgactactccgactctcacaagaataaaatatggcagggttacgcggcggcaacagcagcagcttatgcaaaggaactcttgggtgtgatatcaggcagccaaatcaataatgctgagcgactgggaagctttcagccttaatatgcgccgatagtgcccccttgtcttgagcatagtgttctggcctcccgaaatattcccacagtctgcacctttctagagaagcagcattcaattgccgaaagctattgggttgccttgaccctggtgcggagttgcggttctttggttgtgtggacctggaggcgtcaacccactaccacgcccactgccgcacacgcatctgcaccgtattatacggcttaattttcgtagtgacagggtggatacgtctgttctgttctcgaaaaaatagagaagctactaatcctctgacatatttgcagaaataagaatctacccggacttgggtactggacctcgaagacacaagcctcaaacccttttatattaaagtgtcacaatgcccataatattgtcgcacattcagtactcaggaccgaaatcaaaatggcaattcagagactgctcgccttcacacctgcaagaaaaggtctacccctcgacacaattatccgtgcaccgcgaaacctctgccggtatccgcatgctcgtggcagacatcgtacgctaaatggctggattttctcagcaacacataagaccatgcacttattctcttatgaagccccccgggcatcacaatcgtttggttcgccgatgtagaaccagatgcgattttgttctggacgttgtacgatcatgaaaagtatacatgaggaactcgaactctcgctcttggacatcaggttcatgaatatatcctggacggtacatatatagtcgggagcatgtacagtggcttaattttacggagttaggactgatttattcagagaaggcgaggatggcatactcctgaagctgagcaggggggcgaaaccttacaagtcagaaggaatgttccgcaaagccatagtgtgcaacaatcgtgtactattcttaaatgtatggagaaggaaaagtaatgaattttttctgtacttcggagcctagtcacatctgcgccaagcttgccctatatcgctcacagttcgccagtcccactcgactcctcccataaacatcgtactaagacaacaatctaacaaccaacacaacttggggcatttgcatttcctacaaacgcacagcactgtgtcccacattcagccgcaagctgccagcgtcgcccgtcgcatgaggcgatggcgtggtttcccgaaaggcatgcgtacccggcgcccgtgcagggagaattgaccgtcacgccttgtgcagtgacgcagggaagaagtgtaaaggtgagggcgagaaaagtggcggttatggctggggccttcatcgcgagattctttataacggtggagagtaagactggtgggatcgaacggggcccagcgtcggcgttggacttagatgggtgggtttagctttattagagactggattggatctagcgagataggcaatctaaagggcgagccagacaaggcccgtggaggtatataagcctttccagcatcctaccctctatcttggactcttgacgaggtagctgtagactagtacatgtacaacgctacagcgacgcggtgtccccccctggggtaccgcgtttgctcctccgggtaaaaattacatgcatcttttccactggttggtaaagaacatggtactgctttatacagatcgcgtttcccaggatgcgcaagggtaccacgattgtcctacatataaccaatgcacaaaccagccataaccgatgaggatacgccggcggctactccttgcatagctcaacagcgagtctgcctggttccgtctatactgagagacagcatatgcctgctgtacaagggtcataagcctgggatcgtggcgcggtaaatttctgcacgaggtttgcaagtggccactgaaagggctgcagccgggcgtttctcgcgtctttggatctgacttatggacagggaacccgagagttattctatatactatagtatggtgtcaagcagccatgtttttttgttcagctgtaaccgaggatcctcgaagtcctataacctaccaattcccgtcgagggtgccagacaatctgtctcataaaagggcctctttaacgaccgcaccatatataactaccgtcaatcactcgttctcggcagcacaacagcttatatccttctcagcatcaagagtatgactctctctctaagaaacgatttcactccatcccatacccagagctatccaatggaatgatggggggaaatggcctaccacgacaacaattatacatgcccgattatagcaagtgtgtcaacccgtgatactaggcaaattggctgcatatccagagtcaatatcagcaagcggtacctacgtgtgtgatacggcctgggttcgagaatac

SEQ ID NO: 5514 - DNA, 5820 bp, Emericella nidulans
gcaccttcattgcaagcatggacttccagtcacgcagggagaagcgcagtctgtttgtgtcgatcgagaggacgccggggtacatctactaccacgttaatgtactgatcaagaaagggacattcaggaggtagggaaaacgaatgcaaaatatatagaaacgctgtttcgaccgaaggcagaacagaacaaaactgagcaaataggacaaaacagaccttgaaatcgccctctccacagagcaccgcaacagcccaatcctcaaccgcgctcgtctcaaatgcattgtatttcctgttccgcccctgcattatatgggagttgcttaggtactgactttgccctggcgacctctccgacgaagctgaagggactctgttcacggacgttgggtgcaaagtgacggactggttgttggcgatattccgccaccctttgccctcgcgggtcaggagcttggggtaaaagctccaggcgataacggactggatgagcgtgtcgtttgcgttatttgtgtcgtgggatggcggggttgtgaagaagtggcgttggcgggtcgagcgggcactttttccgtatttgttagtctccttcgtccttactcttgtgtattcggtcccttttgatgaaggtggggttggagaatacctaccggttgagagaagccttctggttagtatcgagcgtgacaaggcccgcgtcggcgattgagaccataagctggagcttgacgtcctcaatgtttagcagcgtctgcgggctgaggaagttcttccgacagaaggcgtactcgttggcgcctggtgtgctccgtgtgcgtttccacgcgcaatatgcgttatacacagtcaataggtccgagtcacctgccctgtattagcatttttctccatttaatggatttgaactggagctagagactcaccccgtcgaaacccaagtcggaccgcctccttctgagcgttcgagcccatcgtattcacaaacggcgacttgcatgacagaatcgcagcaatgctaatcgccgcgtcaagacacttgaagaacgccccgtggatgataagtttgccgaggaacacgtccagcggaagcttagcaagctgctgtcctagcggggtaaggttctccgtgctggttagagccttgacttccttcagtgcgtcgatcgcccgccgaatgttcttcgaggacggcggatccagcgcttcaagaagcgttggctcgacttcgccgagtttgcaaatcttgacgcggaggaccaggtcttgaagcgagagtcggagcatctctggggtttgttgttcggccagctgacatctgtgttagtaccttgttgaatggagaagacggaaacgtacgagattgtcgtggcgatgcttggtgaacatgtggaagcatatacccctttggacacgaccggctcgaccgcgtcgctgctttgcatttgcccgtgagatgaacgcctctactaaacgggacagctggcgccgctcgtcaaacctacttggattagcttccttcttctggacgttttgctggtacccaccgcatggtcttctccttgcctgcatcaataacagctgtgatatcagggattgtgatacctgtctctgcgatattggtggcgatgactatcttccgcatgccatctggaggcacaacgaacgccttctcctgctcgtcgctggcaattgacgagtggagagcgtgaataatccatccgtgttgaaacgttggctctgagaggagctcgtcattcagccggcgaatttccgccataccgggaagaaaaaccaaaatggctttgctgtagtattccatttccggcgccgttgcgagcttcatcaggagtttcttaatgagctggtagtcaagtcggtattcatcaaagttcataatcgtttctcgtgtttgcttggaatagttctcgagagtcgcggccacaccagtagtttctccttggctagtctccgcgtcgtcttcatactcgtcgtcggccacattagactcgttttcggtggttcgatattgggtcagctcaattgcatcttccaaaaactttgtctccacagggaatgtccgcccagggatattcaaaacaggaacgccaccaaggtatgttgagaagcggttggcatccaccgttgcagacatgaggatcagcttaaggtcctgccgtttctgcatcagccgccggagaacgatgagaaggaagtcgctgtcaattgaacgctcgtgcacttcatcgaggacgacatgagtgatatcttgaaagtcatcggggcgttccagcattcgcaccacaactccggtagtcctatttctgttagctttcttcgatgtcctctctaggtgacacaaacgtacgcgaaaaccagccttgttgctgggctgaccttgctctctaatctaacggcaaaaccgatcaacgagcgcgaggttccaacatcgttcttgctctcccccagttcttcgctcaccctgcgcgcgagtgagatagccgaaatacgccgcggttcggttacgtagatcttgcacggacgtcctgacaacatttcatgttcgagaataaacgatggtatctgtgtgcttttaccacttccggtttcactacagataatgagtgcacggtggctattcagcgtgttcaaaatctcgtttttgaatgtccaaattggcaattgcatgcggctttggaccatatattgaaaagcgggcgtggaagccttttccatccaaatctgggataactgctcattgatccctggagcctcctttgcacccgctcgcactggggaacggttccttggagttccgtttctctttcggaagttatctgaaagcacgacatcatcctcgaaggtgccatgattttcttgtatcagctttcttaagcttttcacaacctgcttgtcagcctcatcatcttgcaccttctttgcgtttgcaaactcctcccagagatctcgccatgcggcaggaaggcgcatgtacgccttgccttcttttgagttctgggggaagaggataaaaagtgcaaacgtggatgcgtaggccttggcttgctgggaggtcggtgtcggttttttgtccatagagacgaatgtcccataccaggtagacttttgagtgactgcctcgtgggaaaagggagacggcatttcctgtggctttgaccacctcacctcaagagccatgcgattcaaatgtgatgccgtcgagatgtctttataggtgaccttacacccagagtcgctacatgagttagtagaattcaccaggggaagagtgtatgtgcataccgtgccttgcacgcctcttccaggacacggcgagggctgagacctgtccacttgccaaaatcccgggtcgcaatagaagccttgttcaactcttcagtgattacgcccagttctagagtgggttcttcgtcctggaacatgcctccaaggatatcatcagcctcatcatctaaagctggcggagtttctggctccgactcttttttctcaacctgctccgtctctgcattggcatcaacacgtcgaaagatggcagcctctttcctcagttcatcgagtttctccctccaaaggtactccgcctcctttcgatcgaaaagtacatcgttttcgatgctcgaaattttgcgctggagtttcagtgcctgagggtcatcagttgcgccggcaggctggcctttcttgccctttttgggcctatcaaagatttccggacaaagattgtacaaacgggtttgcagatccaagtacttaggaaccagtgtgtctgggtcaagagagctgtctgaatcatagggatctggctgtgtaatgtaatctctaacgacagagtttcgccttctgcattatgctacctgcggcaaatttaggcgcagattttcctgaggtctctcgatctgaaggatgttagcgcttgcgattcatgcgacgccaacactagggttaccagagatccaggaaacgttcttatccgcgtctttgcgctggccgtttgtttgagtgtatgaaggtagttcgtccagactgcagtgcatcgcaagccattcgagagcttcctccaagttgcagacaacgtctcggttagtgactgtgaaattgcccgcaaagtatatcaagacatgcttcaacgcctcttcaaccctgttctcggggaaacccaacctcagaagagtatccttcaaaacccagagtttcatacaaagttcgtcctctgtgacgacccgtttatctcgcaccggttgagggctcagtccctgttcctccgcctcggccagagcaagtatagaactcacaacatccgagggaagccattcgacatggttcacggagactgcctgctgcctgagaacccttcgttcggtttctagcttgctagcttgacgaactgcatcactcttgcatttggccgcatatttctcaaccaggatctgtaattctgcatcttccaggtgtcgctctagttcctccggggtgtaattctgtagagacggggttttgtccgagctcggagcagtatgagtcggctcagaaggcgttggacgatcactctcagataccgacttggaatcgaccgttgaggcaggctctgacgtctctgtaggctttactttggaaggaacggagaccgttgcgaagccgcgagcagggttcgcagcgggcttcttctttttcttgctgtttggcggcataatgcagcgctacagcgcctgtaagaagcttcagtgtcttctcaagcgagcagctcgtcaatgaatcacaatgactcacttgcaggaggactggactgggcgtggatgatgcaggacggaaggcggcgaagctcgtcttccccacacaaaccgtcgaaaactcttatgacaacatcagcacgagcaaacgcagagcaagaaacgacatgctccccaccacctaacatggacgactttccatgggatcaggtgaaatcaggagatctcgagattctgcgggtcgtgctcctctcgagttcgacttcgcgcaggactcgcgttctcagtgatctccgcgagaaaattggtattgcccgcccctcctccgtggcatcagcccaattctgaccgcgtgcttggttttttgaatctacagggtctgatctaccggagatttcccgtcagtctctcctagagcttcttctccagacaattccgcgatatgttgaccgcccgtctcgtcaggccgtccaacaatgcctccgctctctactcaaagcccccattccaaccgaggatctgaaatacttggtgtcagaattacagaaagaagcctccaaatctagcttggatgcaggttctacattggttcttttagaatggtgctctatcctgctgcagactctgaagagcgacaccgaaaccccgctttcagtcgtgttggatatcattgccctggatgctcgggcgctcgagacatgtctggttgctcatcccaaaccggctgtggaaaagtccgcatatagggtaacaagacgcgccctacgtgcggtgttctccgacgcctggggtgacgatgctatcaaacagtctgttcagcgcctggctagcaatgcgaccaccggacagaaaaatgcgcctttccttggtgttatctctggtgtcagcgcacgcctaccgaataagaaggaagttttagcaggagagaaaaagaccctcgttgcatactatatcaaagaacttgtcgggaccaaggctgcgccgcctgcacatattgctaatggcatgtccgactttttcgagtccttcatcacggaggcggacctcacgtcggacatactccctcccct

SEQ ID NO: 5515 - DNA, 6879 bp, Emericella nidulans
aataacaggagtcttccttttgggggggttgtatgttctatcccttggtcctcgttgtgctttgcccttgataccatgatggatgcggcatatatttggtagatgactggacgaggctaacaggctggtcgtataaaaaaggggactggtcacaagtatcttacgcatggtgatcttctttcaggagagtgcgctgactgatccgacctgtacgcctgagcgactccattccatggactgtgctaacaaaggccagggacatcagttaatctcggcacctggaccgtgcttgaaggaggaattattatcatcgctgcctgcctcccgccgatatggccgttaatcgtacgatttctccctaccaaggtaatgggaaagcaccgcaatatggcagcggatgcccaaggtagattgtacacgggtacaagccaaataaagtcaaagccaagggggagggaacgtgggaggttttgtaggcttgcggagggagcagttcctgggaggcagggctttcggacgagggatggcagagaagaatctacacatagtcgagcaagagttatgcgggatagtatctctttgaaaagcttagacggaggtggaagggcgggggagaagtacgaaggggaggatttctcgctctagtagtaaactcgaggacatatgtcgctatgatatacagaaattactcagacagcaactgtggcttaatacaagattgctgcacaaataactaggtaatagacctcttaacctaatcccgtaaagaatgaaggtacgtgccaggcgacgtactcccaaccagacccaaaaatcacctcctgatcgcacctgtatagctagcttgcctgtgatatttaccgtgacaaggcatacggtttcagggaggagatctttttacgacatattacacaaaaatatctccaaggcagtagtttatagcaacataatgtttggaagagataaagatcaatagcaagccagtcatgctatttatacttatagtaccaaccatgtaacaatggggttaggccctagatatcaaggcatctagcctaaggccctaacggctgaatagtggtagggctgtgacaaatacagtaaattatgctttatcctccgtgcgccaccttatataacgatttccgcttaactgtaccactgacggctctggtcatgatggctatgttgatatatgacaacagaaacactatggacacgccgttacgtggtctcttgatgcattcgaaacatttcgaagccaccatcatgagacagaggcggagcgtcctgacgcaagcagcggccgaacttgtacagggagcgttttagttctgaactcttcgaatggcgagcaatcaacaacccaaagtccctgattcaacctgcctggtacacacttgaaaacctctaatattagtagacgctgagtacgtcagggggaatgttgactgtctcaatccgaagctttcttctagcatttctcgaaacgaggcccaaaccttcttgacctccgctagtggtgacacttgaacacgtcccatggtgccttggcagattctccgcgattagcatcatcatactgtactacattcggtaacccttacgatatcctgaacgggattgtgagctcccactgggaagttgattgacaagaaatgtaaaactaatgccgaggaaacgccgtggtctagcctctgtgtgtcaccgaaaagtttctacttccaagtatggcagcgatcgctactactcatgggagcatgaagggcctttcacctgcactccgctccgcctctagttgacaaaatacgttattctccgcctgctccgacattgcgatgcattcaaatctgcctatttaggtcgaaataaggcggagcctgggaagggtccaagactaaatggcgtggagtaggagtagatgcaacatacaacgtttcaagtgcccagtaaagcaagtgatcttctcccaagcgccccaacggcaagtccccaagccagacaatcctttgccgatcccctcggcataagacagtattgccttaatgctgcttaagatacttgcagttaaagcaagatgaactgccggatataaaagacagcagcaagtctgcaattgcctgcaccaaatcatcctgagtctcgaattgatctgatccatcagccaagccagcaaagtcagacgtcttatcattgaacgtatttcaaaatgcaacttctgtctatcctcagcgccttgtctcttactcctggcgtgctctcttcttcgtctacagtctataaaggacttgtagcccgagatggtagccggggaaatgatactatcacgggcctgggagctcgcaagcaggcggtgctggacgctggtggcaatactcgcgatctagcaattgcgatgctggagacgtaggtctattccaagcatcctctcggtaccagcgagatggcttactcccagcagcaatactatgacgacggattatacctacggtaggtacaaacgaaccgcagcattgtcagatgccgatttctcacaattatacccacaggagacggcaagaccggcgattccacaaacttcggtatcttcaaacaaaattggtacatgctgcggcattccgcgtccgattttctgggacagaccgtggatcaggttgataacggcgccattctcaagtaagctcttgaaccataaacaggcaaaccataccatccccactaacgcccactgctagctctaacttgggcaaagacgtcaaagctcgccatgaaggcgaagagaaatatggctatgaaacctggttcgccggccaccgcaatggagagagtggggtgcagaaccctggcacagacgacatcaagggtaagtttcttttgacatttcaaacgagaaatattttataatcggattggtggccgctaaacttacatattgattagcatatatcgatgctgtggcgtggatccaggagcagattgagagcgacaagaagtatcagtctgacgacactcggttctgggtagacgttcacgcgatttaaggcttgtctgatgatgcaacattcttcctatctgtagctgcattcattattctctggttttaacagagtacacacctattgttttacattcttatgacttcacattcctgaccttacactcctttcgacttgtcctgttcggtcttgagttcttgtgatttaacctgatattacacttacttcgcaaaagaacttgggaaatataacagcacatagagagaaagcacagcgtccagactacaatattatacgctgttgcagtcctagcgctctactgtaggtatatcatctgctagtattaaggaatagaaccataatagtatctcaggtcttgtttttggctgtgaaatcgccggtctccgctatatcctgctgatatatacacggatgctcaataaagagtagagccaatctatattcactgaccatttaaataccttcaacatcagactagcgcaggtacaagctgcgtggcgcggatattaagtttgacatagttacaaggcagccagcccggacattcacgcccacttcggccgagtgttatgtctgatcttttctatctagctcagattcaaacctgcaattaagtctagactatctatgcgtcatataagccgtattagctctgcatacgtagtctccagcgtttattttgaggcccgtggctagctgtggcctatggcagacattgcctgaatttagtaacagatatgaatccaagactggtcataacaccacactggagatagtttcacatcattgcttagacctaacatatgagcgagatttgatgtcatcacgctagtagattagcatatcatcaggccagtcaatctccttccccggtgtgccgatccgtcggaatgccgtctgcctcctccgcctatgcaatgctgtttcggcttagttcggaggataaatttctcgtcaagtgcgcgaaatggatgatcttacctttgtttatgaatttgtatgcggagaggcaatactcagcgttacgaggcggtggagcacacatggtagaaggatgatcatagctttttccgaatgtagttgagacatatcgggcctcggaagctcatgattgccgtgccctaggatattccaaagtattgcctatttggggtgttatatattctctatcaatcgctatccagatgacgggttagaatacgctcttttgcattgctttgctcaatgcagtactgtatcccttctcaggagctggactgattgttatacttactcttggtactgttagaacaatgtttatgatattagtcagcatctgccttggtgccatcattctaagcggatgccaacggcttctccacccatcgaccgtcctttcgacctttatccacagccctcaatcggcaatgtcctcgaatctgattgttcttccccgtcctgggcagataacaactggccaggcaatccccagcccttccgaagccgctttcgtgagaactttcggccagctcttgccagcggcgtcctatctgtacactcagaacggcagaatcgcctattacagtcagtcaccagaaacgaacgaccctacagcaacaattcgccgggtcttatttattcacggagtccagacacctgccattggactgcagccattatcaaaggagctcttttcgcgctttccttccgcacaaggtgttcttgttgatctgtggggccacgggctgacagatacaccctttgcaccccatgagccggccctttttcaccagctcatcgaggacttgatgacacatctggggtggcgcgatgctcacatgatcgggtactcctttggtgggtcgacaacggccacgttcgctgccgcgcggcctgatcgtgtctcgtctatggtgcttgtcgcacctgcaggtctcttacgcgacgctcatttcacagacgaggaaagaagctatctccgcggcggcgatgacgggctggaagaggctgcaaaggactggattctagagttcctcgaggggggacggttgaccgtgccatccaactgggaggagagggtcgcacggggcgaggtcgtcgcagaggctgtccgagactgggagctgaaaaatcatccaggacatcaggcaagcgtgattggcgtgtttcgggatggaggggtgcttgacagacacgccgagttccttcgagctgcaaaaggtggtgttccagtgttatgtgtcctcggggagacagacgatatttgtaaggctgaggatctctacgaagtcgggttgaagaatgttgctgtggttcctggtgtaggacacggcgtcgtcagagaacgagtaccagaggttgttcacctcattgacactttctggagaggtctgtagtaaccacgggtctagagaaacgagcctcatctaaggtgtcctttctgtgttttacagctcacctagataccagactttgcaatgttgtaccatcgagctctatattactcctctcgcttaccctcaacagtgtcgctgtgcgtaggtccagggtcacacctacctccgtcgtgctgttcgatatccagcagaagaagcaactagcggagttgactatgagcggcatcaagtacgtagaacccattgcgctgaagctatggagttcttgggggcctggctgcttgccagtccaattcacacacggttagtgacagccatagaattggctggcttcaccagatgccggcccttggaagctcagcaggccggaggttggcaaccctcatgactatagatagaccccggagtgatcgagatgggcgcaatggttgtggagtaccacagctttacatgattattctggcatagatatcaacgaggacaccctgaatgtgctgggtgctagttatgtagggcacgaacgcaaagactaaaaaaaaagacagaaaaatgagaaagaaaattaaacagaaaagtaaaatgatatagaatatagagataatcaacaacaaccccattcaggattcagctcttgttcttttttgttctttttttttttttttgctaccctggcccaaacagcgacttcgcccttcatcctccatataaggtcaataggggaacgtatgattgcgtaatctacctattatctacttggacactatgaatcctagaggacaggcgttacagactgtgatatcacctccttcagcaactgcaacgactctcttgcgaacgccaccatgttctgcgcccgatcactgctccccgtctcaacctcccgcgtctggtccccattcgccgtcgacacggccaccgccacatagccacttgtaccttagtaaactgctagttcttagagcaatctgtacttacggagtccggttcctcgtagtccctcccgtcggtccagccgtgccgctctcgcttactgcataagtggattccaaagtgcgacgagtatggccagccatctggccgactatctcagtcgtgggacccgtgtacttgtctcggtctgcttgcgtccagccggcaaatgcaaggcgtgattccagggtgtagacctccgcaggtttagtatggacgcgtcaactagcgattagagggtcggttgagtatcatacagtcagcccgcctttatagacggccgatgcccctggaacagagagaagacatgccgatatcaggcccccggccgcctggagagatcagaactatgttcgctccgcagacatggggtaggtacgcaccgtctcggcaactgagacggtctctctccttgccttgaggagttcgacgacctcctgggcgagcggctggagactgaatggagggaattctgccatttcaattctgccttgttgagtacttttgcatatgtgaga

SEQ ID NO: 5516 - DNA, 6751 bp, Emericella nidulans
atgatcgaacacatataagcgaactatccacacagcacagggtttaaaactgcgcgaaagcagccagggccatggttgcgccgaaagtaaccttgaagggtacatttcgtgaaatcagtttctcgagattgacggatttcacatatttctgcaattggcgggtaggcaagatgttgtatcctttggaagcagcccactacaatcatcagcaaatacagcctcgcgtctgaaatccagacaactcacctcgaccaatataatccccatgccgaaaaggaccacgaatacccgcgagaacgcccttaatccaactccaacaacaaggccaaggacgcttcccatgctcacctgtcgcatgttcgacgcagtcatgataccgctttctcgagccgcgccctgcttccttaacggatcttgattggacacagtccagccgggccctgtagagccgatactcggagttgcatattcgcatctcatgggtgctgtgcgaaagggagacgaatggaggagcgagaaggacagcccgagacccaggccaattccgactgcagaagtgcgcgaaagcgtaaggagaccggaagccatttgggaagcgcagttgagcctgagaccaatgaatactattccgtgtttagcttcaatttggttcgagattataaacctatagggtgggattcttgtagatgtcaacaagcagcatctgccctgtgcggagtaacatggcctttacgtcatgctggaacaggaggcggtaagtagaggcaatatagtccctgcggcagtcggtgttactttaatccgcagatcatgatccggcaacggcaccctggctccggcaggtaaattgccatcggaatggaggtttaactccggtcaggtcgatcatccgtggaccgtctcattcttaagtttcactagaataacagggcgtcaagcgctctattacgatacaacaattggatttttttttgttgggccgctggttgttgccaagcatgatcgaaaaaggcgaacatgtcgctaggaagggtccggaactctatattgagcgatttcggagctctatggattcgatatttgttccgcagatagccacgatgtctaggcatttcgctgattgaatcctgaagtttatcgaataatcaaatagtctagaaaccactcccgaccgagaacccagccgagtgcgcggcgaggcgaacgaatggtacacggtccctggccaactactccgcgggaaacgtgaaagatctgctgcggaatttgcacgcaccagacattggaggggcaaagaagctgtgattggcgaatggcggtttttggcgggtaagtcagataatagacagaggggggacgttttctggacccgagaggcgagagcttaacactgtaggctgtgagtatatagaccagtgactcacgcgcccttcacctgacatttatttccccacgcaattctcctgctttgctcctgtccttgtccctctctccatcgttttctctcgttcttttgtttctctagacgttccacacactctctgcctaaactttacaatggccgccaccaatggagcctcgaacgacttcaccgtcaaggccggtctggctcagatgctgaagggcggtgttattatggatgttgtcaatgcggaacaggtgtgtaatactacgattatcaattggcgcaatgactgactttcaactctcaaggcccgcattgccgaagaggccggtgccgccgctgtcatggccctcgagcgtgtccccgccgatatccgcgcacagggaggcgtcgcccgcatgtccgacccctcaatgatcaaggagatcatggaggccgtgaccatccccgtcatggccaaggcccgtattggacacttcgttgagtgccaggatcgacgtttgacccctgtcactctcctcgccttaaccagacatgctaattgacctggatagatcctcgaagccatcggcgtcgactatagagctgaagcctgcggcctcacgcccgccgactacctttaccacgtcacaaagcacaacttcaaagcccccttcgtctgcggctgccgaaccttggagaagccctccgtcgcatctccgaagcgcacatagatccgcacaaagggcaacggcactggcgacgtcgtcaagccgtcaagcacatgcgcaccgtcaacgcggagattgcccgcgcccgcgccatccttcagtcgtcgcctgaccccgagcccgagctccgcgcctacgcccgtgagctcgaggccccctatgagcttctccgcgaagccgccgagaagggccgccttcctgtcgtgaacttcgcggccggtggtgtcgcgacccctgctgatgctgcgcttatgatgcagcttggctgtgatggtgtctttgttggctccggcatctttaaatctggagatgcaaagaagcgcgctaaggccatcgtccaggctgttacacactacaaggaccctaaggtgctggctgaggtcagccagggcctcggggaggcaatggttggcataaacgtttcgcatatgaaggatgaggacaagctggctaagcgtgggtggtaataccgacacttgacttcaacttcagttttttgtttttctttttgctttgtaattttttttttttttttcatgagcgttggaaaagttagtatgtatagcacggtacgcgttcgacctgaagattttaaagctcttgcaatagattttctttgctgtcttcagaggctggcatcagacattcaattgtttgtgtataaccggagatgtagatattctatctctgcaaagttaaaacatgcccctagtgtctcttaagtctgctctacttagctttgacggaccttttgacatttacatctgtggcccagtaaaactctgtttcctttcctcaggattcgtcaatttactggctggtgagaacacatgcacaacttggaagaagcggaatgctaataagaacgcttcagctactaaactgacgttaaaaaagatagatatctataaacggaggttattaagaatacgatagagccaagagaaagcgtcaagtcagattgcgacagaagatatgtgttattctcaaacccttatttcaacaccacgcgcaatgcaatgctatgcgatgcaataaatacaaatgcagatgaaaaacaaaaccaaaaaacaccaatgccaatgccaaaaacccgtatactcctggatccgtcataacatgctaagcggctggatgagagatacacctgcactcctccatggaaggaacttaaaacagagtccgtattggtacacatggcacagtccagagctggagcatccctgctcgttcaattcttcggtgtcgtgggccacattttcttctttggcgttagattcagaggcttataagctagccccttgccaccagtcatgcggatccgctgttctgtccgagacaggctgcggcccaagccgaggtcagtatcaggcgcataagatacctcgtatccgctcgtaatggacggtgattgttgaggtgattggcttctcgaaaaggcagcggaggaaacgctgcttccagggctgaatgaggaatgccatggttcgtagggtgcagagacgctaagaagccgcggtccggttctcaaagattcggcagctatacgcgcagctgagagaaggaggtcgtcttcgtcgacgtgtctcggtttcggtggctctgatttgggctctacaggttttcgggcggtcatcgattcgagctgctcgaggatagggagtttcggtaggggttttgtggaagataaggccaaagatttataagcgggctgttgtgatttcgctactttggttggcttgattgtctccgttggcggtgtttcctgttcatgcacacgttttcgactcggttgactcgagacaacgttccgccgtctatcggcggcttctcgtaaagaatttatccacgcactttcccgctcggcgtcttcctcggtttcattagacactacaaacaatcagtgaccataatcgagagcagttcatccggttataatgaccttgttcctcgctgacggcgtccacagtcaggttgtcttccccaatatcatgttgagtatcattcagtggttcagcaggcacacgaggctctactatatcagatgatgtcgctaccggcgttggagaagctggaggttgtgctatgatcttatcgctggcctcagaaaaagtagactgaggggccgcattcgcttccgagaatgtttcatttgctgaagtaactgccgatgattccgaaggagatgctggaatttctgggaaaaaagacggtgctgcgggtgacttgaaaatagactctgacggttggttcagaaaggtagaaaataagcttgtttctacagggctgttaatgatattgacttctaattatggtaggcacatacctttcttctgtgtttctgaaccggactgcaaagaagaaagaggtgcgagagctgcgggctgtggattcaaaacttcggggatagcctgaagttccgaggcgttcggtgatgaatctgacggtttgttcagatttgagaacggagactggctcgcaaaagtcggtttggcgacgctagagatactagtggaggactgtccagcagccgcatcactaggttgattgggcttcacgctaaaaggagatgaagcagcaaatgggttgttctggctctgggtgcttgaccagctgcgctgatcgggcttaacttggaacgtagattgggaagcatcgaaaggaggtgtgggcgaagtcgtggatttttggatattctggaaaggagtcggtggcgtctgggaagccgccggttgggtaagagtcgggaatttgaaaggcacggcagctgctgtagtcgacggcttttcattctggcttgacgcgaatatacctgccgagccagcattggcaaagatgctcgacgactgaccggcgctggttccagccggcgaagggatggctggctgactggtttgagaaattccagaagaaaaaggcgtgaaaggcttagcgaaaggattgagagatggaggcgaggaagtagtgctcgtgctgttagcagcgaaaagagacgaaaaggggttagagttggtggacggttgagaatcggttgctcgtgacccgaagagcgtagtagggccagcaacagccggagtggtcgttgtcgcagtaggttgcgagtcaacatcgttttcgccttcgctaacaaaaagggagtcatcattatcgatggacatctgcttttcagtggtaagggcagagccgcactctgagagggagaatttgtctatcatgcccaaagtcgcagcttctttgacgttgagtccaaggacaatagccaccaaggttctgcccgagcgcttccactcgacgtagttttcggagaacgagtgatcagatgatggctggaatgctgttgagagattgttagtcgacatgacgtagcagcttcaattgagagctaagggacgtatgattgaatcgcagaatggggaataaacgagtagttgagaagtacagcgaagaaggggccgcgagacgagtagcgacagagagggtcgttgccgagaatagaacataccaacagagtcaacaggacggcttccccagttgagatacaagtcaccgttggcattttcagcgaattgtagatcttgttccgcgcagaactggatggtctgatcattgtcatcaaagcacaaaacacttgtcagctcgtcaatcgtccattcttcgttcttatgctgctgagaggatgggtagcggcagtaacccttccagattgaacgaatagcggtctggcgcatatggttgaaatagatttcggccacacaggccatcagataggatacgccaggcgagttcactaggttaaagaaacgcgtgtaaaaaccctgagcaatcgcattaggccgtttagcatcgagcgtgccctgatattcccaagtgtttccagcagcagcgaacagctccaaagccacccggacgcgcggcgcgtttcgtaactcaggaggccatttctggacacgagcttccaaatcaggacgttggtcgtggatcgagaaaatgatatagtaggcgcggaactcgtcctcgttgggaaatgatattcgacctctgttgtcatcgtagtaatacatcaacgagagcatggtattgttcagttgctcgcgttcctgatgccggtcaaaaggctcttcattcgcagggcttgaaagcaaatgaagagacacgatatggaatcgggctattctttcaaggcacgtcactgcaattttcacgtcttcttcctgggtaagttgttgaactgaaaagtcattgcgtattgatcgggttctgtcccaaacaaacttatgaatgatgcccagaggttctggtccgccgatgacgtgccgcgttaggtagttcatcgtttgaagaagtgttttcggcgtccgaatatcagaagggagctgctcatcatatcccgcagcggaccgcctaaatcgcttgagcattttcgtctccatgttttgtagagtattggtcgcaggatggagatactacagatggtaaattcctgagtcatgggttgtgtcagactacataccttttcacttttgtcaaccattttctgaacgatgcgctcaacccgttcgaactctggacacatgcttgtacaggttcccacgggagtaatggctttattcaatgacgtgggctggtacggatcagc

SEQ ID NO: 5517 - DNA, 5995 bp, Emericella nidulans
cttcgaagtctatatccgcgcccatcgagagcaaggcttgacacgagtcaaggagcgcctgcctggctgctgtgcagagagagctgtcgagtccgcaggctcggccgggggcatagtttgcattgcactcttcccaagaacacgaaggagctgggccaaaactgcaacaacagcataccgcacatggacggggatcttatattggccgaggcggaatgttatcaagaaatggccgttaaagatgtttgacgtgagcacgggcaaaacggattttctcgaatattagctcctgcagttgccagattctagacgggtacctgaagccacggtcgagaagcattgcgaaagctgtaggatctgggcaagcgagaaatggggaactgaatactgacaatgaacctgaaaatgtaatgtcatgttgggtaggaggagatctatccttccttatctcttcccatcaaggaataggtcagtgataccattctgggtaagaatccatttggaggtatagaaatgtcgcacgcagatcctcgctcccacgtcacaggacttcgaaccgctgaacttcaatcactttgatgatagtacagcatctatcattagcgcagattttcggatgtattgttatggtctttctccaatctgtctctcgatgcttttcccgtaacgcgcggagtgactcaagtccgtcctcccaaactatagcaaatgccgcatcaaagtccctttcatcagctagttgagggcaggcgtggctttccagtaagatctgaacagtttggaacgggcgctcgagaatgtgatgcacgagggcaggctctgaccccctcctgcagcgaacatcaggatcgactcctttttcaacgagtattcttaacttttgcatccctgccgatacgtcttcgttggccaggaggtgtattggagctaacgcagagatcagatctagctggtttagctcttgaataggagccttagatagcagaagttcaaaagccttgagcgaacatcggttaaaggctgacatgcgagctccagggatgatcgatagacggtctcttgtccgaacagaaaaactcatcaaattgccgcaggactgctgctttcaggggatttgagacattgaagttcaaaagctgttgctcttttgtatcctgcagtcgagcgaagtaggatctgaagctaactggccaactccatgtagcaaaatgatagaacgggtggacgttgtatgtaccctccagcgctcgcaagatatcggttggggtatataagggcttgctgaagttttccaggcgaataaagcgaaggcagaagtcaataaggaaccagctctcatcaggtgctatacgatacttttcaagtaactaatgagcagcgaggatgattcaagaaactcgcgtacagtaaagtgtgcaaattcaaagtggctcccatcattagatttacgaatcaggcttctgcagattctagcaatctcgtcgagtacgtcgtcttcatcaatatacaaactgtcttcatgaacgatagagcgtcacatagctgatgaatcgtcagctcaggcgcggcagcggcgacaggtttcagcgtcgttttcatgatgtacgtcgactctgggcgtgtatcttcaagaatccgttggtatgttgcgttcaggatcggtggtagcttcccaagggcttgttttcgagccctatcggttggcaattcgcacatgtaatccaattgacagctgacccagcggaacctggtatgttcagtaacaagcctggagaaacgaaggctactgcttacatcccgttagccctatcaatcaatgcttgagctatctcccctttcaatgccggcctccgacttcgaagttctcgcttctggagcgcgcatgtatagttccacatcagcgctttctgcaacaatctcaacttgttcaaattgaccgtccatatcctcgacgatatgctgttcaacacggctcagtaccgccattgaaattgttggcgccctttccaccaacaaacataaatccctggccagcgaagaactggggccacattcgtccaggccatcaatcaccatatacacccgatcaaactcctctgacatgtttcccaggatttccaagagggctgacacgcttggtgactaggaaaagcctctgtctgtatgcagatcgtcgtagtatgctgcaagtatctcgaaggcactggttttctgccgcgcgagttgctacgcagacagcatagtatgtttattacatcctgggtctgggtccgcttgtagtcgcagaagaaaaagcaagtcgcggccgttccgttgctgcttgaagtctttctgagacactcctcaatgattgatcctgccaaaactgtcttgccagcgccaggaatgccgctcagccagagcctcccaccccgggaagaatcaagccagctcttgaaatgaggacgctctatcaaccaagaccggttgaaggatggcgaagactcaagctcatctcgaaatgaggctgcgtgttatagcgcataaagacgttaagaacatcattacgccgcttatccaatgtaatccgtgtctctattccggtcagctttctgtgaagatggtcagttccgtcacttatctcgctctgtttggacagagcctgtaacagcttcttcaaggaatcggcggagagcgcaagcgtcattgtctctttgtgtcttgagatttcctcaagcagtttctgaacctccttctctgaatagggccatatcaacttggcagtcgccgctcgagctagcccatcctttaatctactggcggccttttccagtcgcgatatagcattctggactgtttcgcgacagtcgttgacatagtgaagacgaaagtacgtacccaaatattgatcagactcgaatgattttgcaagcaatgataaatcgtaaagcagcactgagaggctggatctctttgcatattttttggatgccctccttcgcgtctttgaacttatatacaaggtggaacagttcttcagctaggacaatcaggccagcaatgctaccagctatggagagtggatcagacaattcatattttcgatcgagaatgagtgaggaggtgggacagctgaccatcgtggttaagtacgagggggtggtgcactctctaaaacaggcgctgtttggcgagaggatgggaggctgagaggctgacagcaaggctgcacgaggttgcactaggctgcgtctaatatcattgtatactcgctctttgagatgataataatcatggagagtccactggcccagttatccttacgccataagccagagagtggtatgtaggatgcgcaaccgcaccaagggtcaatttttatagcacttctgcctagtcatccctctataattatttaacggagtttattggtataatctcgtctagtcctaagtatgccccgtcttttgcgtaccggtaaggcggagcggtgctaggccgcagcttttgcacatctcttatatctccttccatactgcgttcattgttgagacttgcttggcgattcatccgcatgtacatacccatgatatttgcaaacaccgtgcccaaaatataacatccgtggaatctggatcattgccaggcaggaagtagatctccagctcgggctccttcacatctgtccattgacatattctggcaatgaagcttcctgacaaacaccaacgccaaaagaaacctagagaaaggacagagagtgtatgccttaggagtcaagcagacagtcgtctttggacatgtccttaaagacagaaatctcggcaagccccgggaagcgctgcgtctaaacgagagacgtacgtcacgatataagtccaagaacaatttaaaacacttcaaacgatattcctctatagtactagctacatttgaactaatagagagataattcatttcgtgggcggggatgatgcttgaactgaggatctcctaaagtcagcaatgcggcactcgcgaggcagaatattctcgtcaatattcttgtcacaaagtataaagccaccttgctaggtgaggcgcttactggagtaggaggcttatattgaaaggctccaacttccacggtaccaaatccttctccatatgggtttgagccacgcaacctcccattggacgttgtattcgcgctctttggcgggtgaaaaagtcctcggtactgttggtcttcagtgtatcatgacagggaactcttgaagatattcgttacttgtttgtcaaagctgccgtggactaaaagctatcattgtcgttctggcgtttatctgtactggtttcttgacctacgagctttggttcttaggacagagctggctttaattgccggcggttccttgccgcctgcgccttgggatattcctcagtttggtcatgtttagtgggagcctggtttgtgttgagttattcaagctagtgtccaagcgatgccgctcgttgcaggtgcgctgtttgggttctcgtgtatttttatccgatttcatggtctggagaagttcagacatactcgcccatcagattccccttcttgatgataagatgctgctccagtgtttggcatatcgcaatgggtagtgagatatccgtctgtggttggcgggcggttcaataaagccatttccaactccccgcaacccgtcacaacagatacgaacagatttattattattttcagcttgtcagcattagttccatgttataggaggaattcattagatagaggctgacctgagataattcttgtatatgctcgctggcaacatcctatgcttcaagggtgtgacaatcctggcaacaactagctgggatggtgcttgaacacccctcctgcccccttactcccggcgatcttggtcgtgaaggtacgcctttaatacagtttacagttatttcggcaaacattccctgctggtttcccaattatccttagtttccatggttttaaggggagaatcactgatttaagctatgaactctcgtatataccagaagcgtcgttgaggaaagatgtgtctagggcctgtaagtagaagtagggaatatgctaagcaagcatctgctgtatatggcttcttactggccaagtaggagagggtaccttgtcccagaacccattgcacactctttgtggcagcatagcaaattgaatatgtatgggctgcagcctagtatgccgtttctttagaagaaagttattctacctatacgaagtagatccaccgatcgacttgcacaaaaatctaacctgcataacctacataacctgaaaatcgtgaaagctatatttgatcccacctaaaccgtaacttctatgctaagcgaatatcaaactcaatgcctctataaaacccaacgtacccataaacctcagaggaatcagatatcataaaactatcctttcctagatgatcgtggaaggtgtaacttgtcatgtagccatagcagacatgtacgacactggtcgattattgatgtgtatcgtctccgagccttggcaataaaccattagctgtgtataagacatacaattcaatcatgaactcacgcataacgtaaccgtatctaaactcggtacgggactcaatgtcgtgatgaggctcttgaagatgagggttgtgtatacgagtgtgcggggatggtgaacttccccgcatcgggacaatctctagctctgttgaggggttcgtttctgacatttaaggaaatagtaatcgtcaggtaaggaggtagatagataaacaaagaaaaaaagaccagacccacctggatatactttccaaggacctctccgacgccgagccctcagacacgagaccagtgtccataccgcagcgcacgctgccggaacgccaactataagcgtaatcatgttgattgtttcggagggtgtccagaccatggtagaaagtgactgcttgatttgtatgtaagttctttatgatccctttagtgagggtta

SEQ ID NO: 5518 - DNA, 6169 bp, Emericella nidulans
cgaggtttcggcgcactatgatcccatgattgcgaaactaatcgttcggggcgccgaccgacaagaagctattcgcaagcttgctgcagcattggaagagtacgaggtggccggcccagcgacgaatatcgagttcttgaaatcagtttgcaaaagtgccgacttcatctctgagcaaagtcgaaacgggttacattgagaagcatcacgacgagctattcgcccaatcgccaattgagccggaagtgctggcacaagtagcactggcttgcttgcatgacgacgctcgtctcgccgcgcaaaaagcaaccaattttcaaggctccgcagtgggatttgggccaggcttccaacaacaccacatgaccttcacgaactcagcatcagcaaacaacgaggcctttgacgtcaaagttcaacaaaccggagagaacgtgttcaatgtaaagattggcgagcacactttcgagcaggtgaccagccaccctaatgcggacttccgcatcatcacctcgttcttcccgcacacccgtttggacaccactgtcatccgcgacggcgattcaatcgtcgtatttcagcgcggcaggcaataccgccttactacaccacgggcgaaatggatggaaaaagcactcggcatgaaagacgtcacaaatagtgtactcgccccaatgccctgcaaagtcctccgtgtcgaggtccaagccggcgatactgtagaaaaggaccagccacttgtggtgattgagagcatgaaaatggaaacagtcatccgcagcccacaaagagggaaaattgccaaagtcgtccatcaaaaaggagtaagtcatgcgatctttcatcaccattttacccctgctcaatgctgttgcaattctttgcttccctttgttttctcttgcctttcacttcagctcccagtactcagatttttaccaatcgagggcccagagtccttcccagacatgcaggcttaggagcttcggactccaatcagggcctgactgagtaactggccaaggcggaccatatacaggcttgttgctaagcttcgttggttttctctgtcgagtttctatttggctgtttattaatttatcgcgcaaggctaatatttattccttacaggaccaatgcaaaagcgggacaccgcttgtggagtttgctggtgaagacgaagaggcgtcgaaatagatatggaaggattgaagctatgctgcaccaatagagaacaaatggtcaagcagatagttctttgttcatgtcatgacgagcatataatacctaggctcaatgcattgtgacgaaaacgcgccgatcattctcccactaggctttaattcctataagaatgttggcgagcctcgcgcaagccatttccgttcctacctgcaaagtgagtttgcattcccgtgggaccaatactgttggagagtctatatccaaggttccggctgcgcatggtgagctacaacacgtggcgcatattgttttcgtgacgaggtaatatcagcaggtgagaagtttagagcgttatatagaaagcaatttacagtgacagcattttcatcgactgaagcaaagcagagctacaccagacatgcaaagcacagctaagaattatgcttagacccaggataggccttttctgtgagcatgagctccggtaatcagtgtctgatcgataaacgtatttcgaactcagtgggtgttggccatgtctgatcgaatctgcagcaatctcttaactgcattgcgtatcttagatgacaccagttcacttgagacaccatggtgataacgaatcggctagacccagaacgcaagctgcgcaaggagacgccaatctatcagaccagagacatcacgcataggcgagccagacactctttagtaatagagggttctatttagtgatagcacggccggcaatgaaatgagccaccgggctcagttcaaacgtttgatccaccgaaagcaatgagttgacgcgactcctctcggcttaagaatgcgattaaaggggagggaatcattcggccaagcagataaatgacactgcgcagtctgcgcgagccccaagtgctttggtttctcatcattccatgggtgattaccggcgcgcgggctgcccggagcccgaaacagctgtaggggggccaacctccagggtttcaagcataatgaacagacaattgaagcaaagactgggcgtggcaaaggtaaggtcgtggaatccaaatactgagatattacccaccgtcagttactctgaatacgcacctcgaccagccctcccactctttatgagggttctggaatttgggctgcatggcccgggccccggggaggcgaagaatgagcagattgtgagatctcatatgtcgggaccaaagtacggtgcagtatcctgcagaactagcacagctaggcagtatttagtagtcaatctgcagaactggaggcttgagcgtacatccttgtcggtaaaaccgccgaagcgttgatgaagtttatttattctagttatattcatctggaattccagctagggatggttggacggtcgatcaggccgaatgtatccaggtcacaaggagacttcgcggagcctgagactctcaccatgtgagagattatcgtattgatttatgcatcgtgcagtgcgagttcgcgtggaagtccttcagcaattcgaggttcggcggcacttctaaggccttggttgtaggtggggatcgtcacaaatcgtttcgtggaagattgattagctgtgactggttaatggaagttcgggacaatatccgttagggaaagggttccagacaaacgacaattttgaagcaaatcaacattgaaaccgactgctggacctgacacagtagacagtggtaggggcggacgaggtcacgcggagaccaaagaacagggatttagaagctggagctggcgtggcagatcccccagccctggccagatcgctgcatggcggttggggcctggatctgcctctgtccacatgacatgggaaaaagttcaaagtccaagacaactggccccagagaactttctacaatccaaacattgcggttctgttgtatgagcgggagcttcgcccactcaatgagaatacatgtaatcggagcggtatggcttcagttgttcttgcccatggttatagacatcacgagcggttacggagcaaatggaacagttttcgagaactggtaacagcagcttgcaaacctcaggtttggacatcattttcccagcactctagctcccaatcttaatttgatttttgtctttcatctgtcaatcggagtttcgccgtcctgtcactgctttgcatgctagttcgtgtatcgtgacctggctcctgccattcattctcggaggatctctccaatccccccttgaccctgggaggagagtctactttttatagccggtattccgtctccccagaaagttttcagaatccattatccctttgccctgactcttgcccgcacactcagcttcgtttgattcccgttctgactttcgtaatgttcagaccagcaatccttcgccaggtcgtcagagccgtcgaccagagcactcgcccagcggctctagttgctggaccccatcagtttattcgccctctttcgaccacagtctctcgtgcccaaagagacgacaagaatgaccccttgacgaaagctaccacaaaagctcccggaggtgctgccggtgagcatgagggaaagtatgcgcgaaccgacgagaatgtggtgatcgaatatcccgatgatgcagatatgcctcgcagccctgttgtccagggccgtggaggaatgcatttcaagcgcactcttgcccaattctctctggaaaacagggtcactctggttactggcggtgcccgtggtttagggctggttatggggcagggcattgtggcttcaggctcggatctggccattgttgacctaaaccgtatgtgctggttatagtcagtcctgaagtgaccgtcgctaactccatcccaggagatgaggccgaagagtctgcgcgaaaactggtcgagcaattccaaaaggagaaccccgggttagagcagtacgtcattgtttttcgtgaatagtcctgaactgatactgacggttattattgcccaggttgcccaatgtcaccgcgcactacgccgatgtctcgaaccccgactctgttaataatgccctctcagaggtcatcgcaaagcacggcaagattgaccatctcgtcacgtctgcgggatttaccgaaaacttcgacgccatcagctacccatacgaccgtatgcagaagctctggggggtgaacgtggacggcacatatctgtttgctacgggcgtggcaaagcacttgatggagcgcaaggcgcccgggagtattgtgatgatcggtagcatgtctggtgccatcgtcaacgtacctcaaccacaagcgccctacaacgccgccaaggcagccgttcgccaccttgcttcgtctttcgccgtcgaatgggcaggacatggtatcagggtaaactgcattagccctggatacatgctgactgctctgtaagttgcccgaatctttacaaaatagctgagcacgaactatatgctgatttgttgcaaccaggacccgcaaaatactggatgagaaccccgaactgcgggataagtggatctcgcttatccccactggcaagatgggtgtacccgaagatctgatgggcgcggtgactttccttctcagcgacgcgtccaagtacatcactggtgccgatctccgcgtggacggtggctacaccttgacctgagcatggcctcgcgcttaccgccagtttattcttaatgtattactgttaaacggggaacggagtatttttcttttcagcgggtccatcttactcattccgttgatgattcggcttgcattacgataatacctctattctgcacgcaccagtggctttctatgggcgctttgtcttctgaaaaagcgaaacggcgtactgtttggcgggtatacagcactatgggcaggcttcgataaagatctggttttgtttggccatagttagcatgatgtcattatctttatcttaatgagtgggaattcatatatacctatgctggccttatcaattcaagtcgaaaccattaaaggcgtttgtcttacatctcttggattcgtaaacatctcctcgtaattcttcagtgccgaatttgccgcctcaattcagcggtctagcgtagccccatctcgattgcacgccatcttgaattccaaggtgactagtctgaccgtccaatccttcgagcttctgcccgctttctagaaaaagccccaatggaacctcgcaggaggtactatccatgacctgttcaattcgttgataggcctcgggtgtccgagcggcttagacagttacatcgggttgtgatgatgacgattacatgcttgtattatgtcaggctcagagctcatcggtcgttctattgtacactttcctctgacatccgccgaagaaaggcttacaggtacctgcctcaatccatacacgaaatgaggtgtccattcatcgtctatccagaccgctagaacgccatgatatccaaaaacgaacccgagttcgaacgagaacacggctaatgatttcagacaatattgcggacaaaagacgacagaggaccgcagcttcagtctatgctgctaggttgaactggtccaagttcatttgcgccacgattccttaggagagctcgtcgggcatctacggtacattaggtgccctgtgcgattttcttttcttttcttttttttacttttgtttgtgagctgcgatccacctttttcttgaaacttgttcgtcgctgaaggtcagatggtgcgtccgatatagtgctttattcgtcggtaagcggcgggcagagggaacccgggatgtcgttggaacaggtttgtactctagtcaagtagagaatattcgcatggtagactttgcataccgactagagcttgtcatagaccctggcaaacgtagtattctgtggttcccttcatgataagcaggatgtatcctggacagtctcagatggcggcagactacaggtatgggccttgaaaaacaccccgcagtggtatt

SEQ ID NO: 5519 - DNA, 2109 bp, Emericella nidulans
aacacggccgtcatgttttttgttagaacctcgggtcgaagcaaacctgtggttgctgaaaaggactctccatgatctgatcaggggttcagtaaattcaagttgctgtccgagggccgaaacatgagagcaaacttgcatctcatcaaccctcccgtccgacttcagagcatccaaacaggcaatttctgagatcaggtacatgacacggtcttcgcaccccatgagctcacgtaggcccagagacactccacccaggtgtttcgatcggtaggtgtgggcaaactcaggcgtcctccggtacatggtggaaccaagaatatcaatccatgccgttaatgtcatgctgaacggaggaagaacgtatgggttcggagcgtccgctgtaaggccaagtcgttgcactagatttgccgctgcctggaagtggtctaaccagggaatgtccggaagatagtcatcggcgggtcctacagaagagtggaagaaaatcatagcaagcgtggcatccaaaatttcctgatgttctgtgtcgtctcccagggcttggcatagttgagagatcgcctcaaatcgatttcgcatgatatcgtgatcaatctgttctcccgtgattccctcggttgttttcaggtggatggcggcaacactaaggcaacaatgtaggtagcacttgtttgtctcgagggtctgaaggacggcttgtgcgcgcatatgcccgcgttgatgagcctcaagaacgggaaagctcacgcgcaaaacgttgtgaatgaagtgctcaagaaggggtcggtcgtggtcgctaacgggtatgttttgaagcatgtcatacgtctcggggaacggctgctcacagagcgcagggtcgattccggggagaactggtgccctgaagtactcatcgtgaaaccactcatcacctggaaaagttggaagaggcgcgttcaattgtggtggagcaaaggtactgaaggtcgatgacactgagtcatggcgcagttggacatcattaacaaatgtctggtgttcggtcttgacgtctacctcgtacggatattgtggcgcgtagatagtttgggccatggcaggtgtcgggaattgggaggcgaatatgtcgtatgagggctccgggaacggacggccatattcgaactcaggggaagtcggcgagttggcagccatacttcgaacgcgactggcaggatctatcgtgtattggttagatggtaaggacgcgagatggaaagggtcgcatggcgggcatcggcctacctatggctaatgagccattgcgctcattcatcttcgtctgcttgatcttgttcttgatacgttccttgtgcatcttcctctgctctgcattcccccaccagaccgggcgtttgtactcgcatttcacgcagaggttgttgcaggctccacaggacggatgcttttcatcgcacttcttccgacgaagacggcatgtgaagcaaccttgttggtgggaaaactcgttagatgttcctgatagattagatagacactggatgtcttaccagagcgtgaccgcttgtgggatttggtagtcccctctggctttggtgtactctcgcttcccgaggacgcttgagactcggcggctcgctttgcagcggcggtagccttctttctcggtgctgccggcatcttgtgtaataaacggccgattcagaatcgtatgcgcgacgggctcgaaagtagatcagcgagggcaggtccaaagtcgatggaccaagttactgcagccgatagtagacagtaatattagggtgcaaagctggaccagcagccttggctatctatcaagtagaataagagagcgtaaggcgtggttgccgaagaacgaggcgactggggacgacgctggggaagcaaaagaagcatgatcgtgggatcgaggaagctttaaagctcgagggcgagtgcatggtgtttctattttcgaatcccagatagccgaagggaaaactgggtggagggaaaggattggagatcgcccgctggcttcaagttagtctggagcagggggacatgcatgcgcattagagaaccggtgagtttagcttagtttgttagtcccaacattgc

SEQ ID NO: 5520 - DNA, 3691 bp, Emericella nidulans
agatacttttcccatttgccaggagggaggtgggtcgtaaagaaacatagagaaagatgcggtaaacccttacgtccatgagtataacgtcaggcctatgatgtgtagcgggcgacgctgagagatagtcgagagcttcctggccattgtgggcgatggagacggtgcagctgagacgctgcaggaggcgtgtcaccagcttttggttcaccttactggtgggtaggttagtatctgtttctgcattggcggctgggtggagcttacttgtcttcagcaaccaggatatgcatcatgttgttgcgcagagacctgtatccggccggttgtgtcgagaggaagcggggaatgaagcgctaggcagacacgacatgccgatcagatagatcgtctcaaataccgtatttgaccaatgatataagattatatcttattttattccagtaaacatagttcgttaaatcattttgaaaacaaagataattatatttgtttagtttgatacacttttataaatatctctggaatctcaatataaacaaaaaaaatattctttcaatacaatagtttgaggtgccgcaagccagtaatgatatcaatgggaatacggcatccacaacagttattgctaactactctgcttggcaatgttctaactattgctggaacacgacataaaatgtaaaagcacgttcccggaaagcccacttacagatagactaaaaaggtcactataatgagaccccagagtctagttcctaatctgcctggatcacacctgtatagctagctcgccctggtataaactacctacccatcttgcaatggtaggaatatatcggttgaaaaagaaaaaataaaaggaaaaaaaaattattctaggtgcttgtggcgcatgatgtccattatgggttttatcatcaacagatatccgtaagactatgttggatttgatgtacctacggccggggtaaagacgatacactggagaactggaccgcaggcgaggcaaagtggacctttgctacacttggagatctaccagagccacatattcattagaaaaaggtaatggttcgttctggctaatcagctcttgcgttgtcctgataggtcactgagtgtcttttttcgttcggcccccgttgccctacttttgattccaagctatgggccacctcagatccccagacaacgacctagcagggttcaaaaacacttggggctctggtgttgggttattattattatgactgcattgatcacggaaaaagggttgatagatctttggataagcgagctagaatgagtggcgaccactcctatagttgtcgccatttgaggagcgaaatcaaatagaaatcaacgaagagcctctttgggacgcgaagtcgaagacagaaaggaatatcgtgccataccttctactgaagtgtggcgccacccactacttactgaccattgtcattgctaagtcttctgtttataaaaccactttttggcagtaaacttcaaaagactgctttaattcctcataccatcatatatgtatgtcaatcctttataaatctggtctcttttcgcttgatcatatgtataaaattggggtggaggcggttcagagaggctacccgtatccgtaacggatctgactcaggccctccccaaccgctcaccctgatcttacgattccctcacccttaccgaggaaggatccatcggtaatctacatgtggcgataggtggaagttcaacattcatctgtttgccagctcctctccgttggagcggccccaacttagtcatccgaatttcatccctgtcccagcatctcaacggccgtcccaacaaaatcgtcagaaagtggaatgatagcaggattgacgggatgaataggaaaattaaaatggagcggtttcggtcgtttacaatgccactgtgctgatttgcttgccttcctagccaacgtggtgcacctaggaaggaatagtcactattcttgacctcttaagactcctcgctatatacgacgaacttgtgctcggcagagtactcttatgccatggcaggctcgaaagtggtggagaaaggttcagtcgacggcgctccggccgcaaaactacacattactgagctacctatgacatggtcaaactggtatcagcacgtcaactggctaaattgcttctttgttctcttcattcctcttgtcggatgtataggggctatctggactccattgcggttgcatacagccatatttgcaattatttattacttcaatgccgggctcggtatcacggcgggtaggttcttccttgctgtttctgctatgggagctttgagagagaggattaactgaccgttcttgtctagggtaccaccgcctctgggcccattgttgctacaaagccaccctcccactacagatctacctcgcccttgctggtgcgggagctggtcaaggctcaatccgatggtggtcccgcggccaccgagcacaccaccgctatacagacaccgaaaaggacccgtactctgtccggaaagggttctggtactcgcacatcggctggattatcatgaagcagaactataagaaggtcgggcggtcggacgcgtcagacctcgacgctgatccggtggtgatctggcagcataagaactatatcaacactgcactgttcatgactctcatcttcccgacattggtctgtggacttggatggggcgattggcgcggcgggtttatctacggggggattttgcgagtgttctttatccagcaggcgacaaattgcgtgaactcgctggcgcactggataggcgagcagccgttcgatgatcgcaattcgccgcgggaccatgtcatcacggcactggtaactctgggcgaagggtatcataatttccaccacgagttcccgtctgactaccggaatgccattgaatggtggcagtatgacccgacgaaatggatgatctggatctggaaacaggtcgggctggcatacgacttgaagcagttcagggcgaatgaaatcgagaagggaaggctgcagcagatgcagaagaaggtggacgctcgacgggcggcgctggattggggagttccactgaaggagctccctgtctttagctgggacgagttcattgctgagtccgcgaaccgagccctggttgcaattgggggtgttattcatgatgtctcggatttcataaaggagcacccgggtggaaagacattcatttcgtccgcggtcggtaaggatgcaacagccatgttcaacggcggtgtttatcaacattcaaatgctgcgcataacttgctcgcaatgaagcgggttggcgtggttcgtggcggaggtgaggttgagatctggaaggacgcaaagcagccttcgaaagtgagctttccagaaatggttcgtgctggagagcaaataacaagaaggactgtgccggtgcttgatagatcgtagcctcaaagcctgcatcgatgggagtaaggagattagtttggcttaggtatggcaattcaattcctccgtgcatctgagaacggtcagctctatcccatttacacaactctgctagccaacaacgattggccaaactcggccggtgagctgtaaagcgttcttatcaacgaatgcccatcaaaggcccggcaaggctattctcccggcta

SEQ ID NO: 5521 - DNA, 2103 bp, Emericella nidulans
accttataaagctgattgaagtgcccagaattatggtgcatcgctaaggtaggaaacagctctttgcgcatccgccagcgtctggattgctcctgctcccatgtgatgtacgagtctctcgcatcaggggcgctttgtcgatggtcacagcagaaaaatgtatctcgggtgaagactatcttctcgccgtaaatccagttttcggcctcctcaccgtggttttcttccagatgtcggtcctcgatcctcgtcttgcgggttccaggtgagagcgtctccggaggaatcgacagctcgtccgcaagaatatagtcacaccactccgcacccagtgtacctgcgaatcccatgaaagacatatggatcggggccggcctcgcagcaaagacttcattacgcgcgcctctcgtgtagccattgaggttgatcaagatatgaataccatcatcgactatctgcttgacgagtcgctcaactggccatccgctagcatcatagaatacgggggcctctttctcaatttgttgccggtgtattgacttatcgctggccgttgtagcatagcagtacgccttgactttggtaggattgtgcaatccaaaaacagattgcattagatgggcaaggggatggttgttgaagtcagatgacacatatcccaccttaaggtacggatttggcggtggcggcggggggtaaactgtggacgggagccagggagatcgcaaagccgcacaggagatgcgaagcccatttcgttgggaaatctgtcgaatctgtttcgcagaaagtgggcaggtgaaggtgtggaacggaagtacagtgggtgcattaggagccgaaagaccagggggcagctgcggccttgggtactttgaggaggatacttcctaccatagacgtatcgatcctgatcccagtgccacgtaagggacctaatcacacgttccacgagcttgacgacgcgagaaccttcccactgggggcccgcccaagatttgagcaacgcagccaagttcccactcgcaggtctgcggcggctgtccgcgctggggagaagctgcgcgcacaattgttctatcgtattaggcgtcaagatgccacaaccccaggtctcgccttcttttagttggcgatcgacaatatcaaccacgcgcttgatccatccagaacccgcctccacgccgtacgaatcgcgaagcataccttggtcatcaacatgccaacgatctcgaaagccgaaaccattggcaatgcctcctcgacccacccaattgcataccgagttgagggcgttagccagcccacatacggcctctgcaaagtcagggttcaccttcacggcacgcttatagtatgtgatagcgtcgttgactcgtccagcatctttgacagcatttgcaaggttcgctaacgcaatgtcgaagttaccgtcacattgaactgcctgttcgtacatccggatagctgcttgtaactgaccaatatccttcagcagactgcccagatttgtgtaaagatgcgcatgtcgcgcgtccagttgtaatccataattgtaataagctagggccagagacactccgctgccgggaatcacaccaggtatgtctggatgctggatatccccgcttgagagagcagcgtccttcctaggcacattgttgtggataccggcaagcagaatgccaacattgttggctgtggacggacttggttgcagagaaagcgacaggtaataaagagcgagtatgtctcggacaccaggcgcagacctggacgaaccattggcaggagcggttgacatgccatcttggtaaatttttgccagcgagagtaacgagttgcttgtggtggataacgctgcttttctcgcaagcccttcagggacatacttgattccagggggtgttccacaaggtccaaataccaactttgatgtctgtaaagccttatccggatagagcaaaatagtctcttggggatcgtggcggtcgctatatatccagggcgcgattcttgagagaatgcggcgaaaatatgcttaatgattccttggatgccatagcgccttcgtcccgcgcttatcagaatcgcatcttcaaa

SEQ ID NO: 5522 - DNA, 5513 bp, Emericella nidulans
  unsure (1)..(5513): unsure at all n locations
caacacaccttggacaaagcgcacttaccttgagtcaatgtcgcccaggaatgcattctcgtttgcgatcaatggaggcttgaaggtggattgcgccttgncgtgggaaaccatagcagncggcattctggcggnttgatcttcacaacgggataaggacaacgagacggaaagagagtccgatcaactacttacctccatctgaaggtccaatcctggttttatatcccccttcattctgccgcaacccagtctcggcccagtctcggcccagcagtcacatcctgctacggcagaacgatcgcttcgcatccaccttctggagtaggacacccccatctcttcgagagaatcatttctggggccggatcaggttcgcaaaaatcacggagcgatacctctccaactaccataatgtagagcgcgaaggttagtcgagtgtggggcagtttgtctgcagcagttgctgctatgaagagggctggcacacatcgatacctgcctaagttagcttcattctcggatccagaaacctagtgtagttcaaagtaaatcctggaccatataagcgatagagctgtgggaaagaccagatgaggggatgagtttgataagaggttggtggcagatggagagactgatagagaggggtcgtgctggatccttttacccttctgggctacagtttcccacccattccccctcgcaggatgacaatgaggggaagactgcttctgcccccttctgatcaagctctggtattgagactgctttcccttgccttgattaacctcgattatgctcaaaacagaatggccaggaggtctccagactcagctagacctctcgaggcgagagtggcagcctaatcaattgcacttgaaggggagtgccttaccctacattctactaaaggcatgccgcgcatttcttttcaaggaacaactatacttaaacggtagtactatcactgagtgtcttgcctactcctggttggagtctacggcaggtggtgatggaagattccaagcattctaacagatcgtcgctagagcaggatattttgtatccgtggtcgtatgactgattgactaggacaaattatgcagcagaactaactcatgacttcttaatagttaaatccatgttacttccccttccccagagtttccaagccctgcattgcatgccaacccatctcgccagtcgacgggacgctcgcttcgttcaagtcccaaattcccaaagcaccatttagccctgtctagcgaaagacggaaagcaccacccaaagcaggtccttgcagaatcagctttatccccagatctgtgtgacgacttctcaaatccacggccgctcttgcaaccggctttaaagcatcaacgccccaacgcgaccagaacggccttactacagaggataagtagtacctatagccggtgcgatcgtcattgcctttgtcaacattcgagaagccagcgtcagagcgagaaacagtcaagtactagcagaacaactgaaagtgcagaatacgtacagcccgaagcagcaagtgatatccgtcaataccggctccgaccaatttactgattcgctatggaaaacgtgtagaccagaccagctttttcaacaagaccagcaaaccaaacccgcactaactccaagcccaaaaacacatgtacacccggcagccgactcccaagctatatatttccatactgccgcaactatgtcgactgtctcaatcacccgtgacctggaaccatatttggattcccttcgactgtacttggagagggatggtacggctccgctccgactagacgcgagaaatcagacgccgcgagaaggggcatgccagaagctgggggagtctagctctccagataaccaggcggctaatggcgtgaaaagctcatctggcgttgtcgtcgttaaaaaagagtgatcgtccctgcgtgtgtgtgtgctctgagtttaacctaggaatactttactcgattgttagtttggttgttaaagcctcagggagaacctcacgactattgaaaacttaccttcccaaccccattcttgcatcacatgcgcccagtggcactttccacgaaccgtcctttcaaactcaatattctctaggggtgagactgcagagcttcttcgcgagaaaaccccgggcccccggccggtgtagaacacattgtcctggtccgacgctttcccaacactgttgcgagaaaaaccagacccacgaagctgctgctgctgctgctgctgttgttgctttttttgagccgcacttgcatcccggcgagcccagacctcacgaacgacctcaatgcatcggtcaatagagcccaacatcagccgggtttgaatcgcgctccaacgtttgagcacccaatctctgtcctcttcctgctccgcctcacaaccggcaaccaagaggggaaacatctggatgattgttgtacgtgagctaggtggcacagtggccaaaagaaccagaatgcgtttggcaaggtcctgtggtggttccgaaggcatttcggggacagcttgttgaaggtacaacagagtagcccagcgataagcatgagctgtttgaatactatgctgcacttctgacgtgggatcttctgggggctcaaaccattctggcggctcccattgttcgaccgcttgcttgagctcaatggcctgggaaatgagagatatagagttcgactccgttctgcggacacgttggatcaaacgggcagcttggtcgatgagcggaaacagtgtggcagcacttcccatcaaaggatcaatttcatgaactgttctctctggacatggaaaagcaggaacctccgtctctagtttcccaagttcctcgcgagaagtcaggcgagcgagaacatccatgtagagccaggtgttatacaggaaccgcacccttctaaaatcagtctcctgaatcccgccctgcctcgccagtccaacgacttgcgccaccagcgccttcgcgcctcgaagatgctgtatacaagaccgagtgtgttggtcccaagtatcagcaaaagcaagagctaagctcgttgccaacgcagcatcagccctcatactctgaatattttgaaccatgcacgtaatgctcattctcatatggtcaactccaaagaccctcaatgaaggattatctttgcttccgtggaatgcggccagcgcgaacactgcatggtaaagggctgggtgtccttagccaatggccaaactaaagtgcgccatgggttctcgcgagcgccatcctttatggacagaattccacaggtaaacctatcaaagtgcaaaacaagcagttctgggcttgcaatacttagggcaggtcctgcaagaggccccgagggcatgatggtcggctcagtttgttgggggacgtatgaccctgggaggccaagattcctcactctagtacgacgatctggctgccgcacaatctcctcaatctcttcaccgtcgccttctagcagagcttcaaaactaaattcgtctgtttccggagacgcttccagcaaggtatggctaggggtattctcctggtctgtgctaggagtaagtggtatagttggaaaccaggaggattgctcctctggtgtgatttctgaagacggcgacgcaaaaaagtcatcactgaagcttccagaaaccgagtagccaaggatgtgatcaagtgagagccccaggtccgtcttgcctggcgagtgactagaacggccggaggaaatgtctcggggcgagcttcgctgaggttgcgagccgccaactgttcccttcccagagaactgattttcaaccagctcccggttgcgtatgacagtactgcgagtaggtggcgacgaacctcctgtgtcggatgatgcctatcagcctgctgtcaaatgctgatccgatgctgcatgtttacctttcttctcctttagaacggagcccctcccagggaagtcgctttctccaaatgaacgccatttgaaatcctttttgtatcctccacaatccacgttacgcttcttgcactggaggcatgttggctttgactcgtcgcacttcagtcgttttgctttacaggtgacgcaacctggaagcgtataacaggtaagaggtcagcgcactgcgcagcaagaattcattctgccttgtttcttccgcatccttatccttcagattatatctaggactgcatcttgtaaagaattggtgtactgtaccattacgactctttgactgcttgggcttgttagttgtcgttgtcacacggctctggacaggcgctgcgttttgagtggagtcggaacctgtggaacctccggaagataaagcagcaagagggttaagaatggcagacggggaaggaatcctgatcttttccatgccaacaagatagcgtgcaaatgggctatccaagcgaggagagcgatgacgggttggaactgaacgatatatgaacgaggcaatgacgattgtagatggccgactggtatagtcgtgggcggaagtgatataacaataatgattcgcgaagccggcagagttgatttctgtttaaggtactgttggtgcccgcagataaggccgtgcttagctgtcgagatagggacaaaacttggagtgagggcgagataaagtcaaataaggtcccaaatagcccctaggcgtgaggagaaaccgtcatcagactgataagggctggcactaaggcggcggagtgcggagagttggagcgagttgcgaatcgtggatatgccgatccaacgggcgtagcttgggcattgcgccggagtctcactggggcctcgaacttgctgagtacggaccagccatgcctccattatgcagtgtttagtcacattaacgaaggattgtggaggtaacggggaagctcttcttatttcctggtagccgttcctccgcttagactcgtgtccggatacccaaggagcttctgtcgggaagcagcatgatcagaaaatagaacacataggaaataaaaccacgagttctgaggtagcaaccgaagctgataggatgaaaagcgccactgagatgaggaacatgctgtgatgacgagaaaggaggccgtgctcgcagggatcccgtgatcgcttcccacaaagcaaacatttgcttttgtagatggcagttcgatagaatgtgatagatgctagactcggacactaatcaaaacttgtggtaatatctcaaatctcacagacccccacggtgtaacggcgggatcagtagctgaaggctaaacatggggtgcctttttcagaccaatttgaacatttctggaggttatcaagcaagaggctcaccgccgcactccatgacccttgctcaatttgggaccggtggcgtggtctagacagccccttatcgtgttcttctgtaactgggtcaaaccaggactggtgatcttgggatctgatgctaatgagctagagcgcagattccaataggaactctcgcaaac

SEQ ID NO: 5523 - DNA, 3628 bp, Emericella nidulans
tttctattcgatcagggaaactatttttggacaagcaatcgagtacatcaacaacttggagaaacaggttgcaaatttccgtagggacaatgaactcctacaccaagagcttcaagagatgcggcgccagctcaaccagcagcaatctaatggccagtcacgaacagcgtctatttttgagcaccaccagatgcctgtacaatcaaatggccaagtacatggccctgcgcatgggccggtgtataccggttatagtggatcgccgggagcggcagaggaacaaccccgtaccttacctccgctgatgaacggttctgttgcgccgatgcaaggtgtgcagtacaccgatgaccgccggtaattgtctgcctttttatatgaaggcgcgagtccacactgccaaaaaactgggtcataacatgggctataaccgttggaaacacatctcttccgttagctgcccttggttggtgaagaatacgccaatgaccattcgctggagatgcttgaagtgtcatatctgaaatatcatgatattgcgtttcaccccagcatggcaattgaggcattcacgacgcgcgtttcgacctaccgtttttcttccgtagatgaggtggcattctccttcgagcgatgattattactgccggcatcaccctgcgatgaggtcgatgaaggacacgactgtattttttcttgcgtacttatatatctccttgcatcatgacgtggttcagtgtacttttgcattgggaaggtatacctggtgaactggatgggaccgacagcatgtattcgagatttctggtcttggactcccacaaatggagctggtttggcttatggctattcgttagcagaatggacggtatggcggcgtctaggagttatcttcgtaggcgccgtgggatcgaaaatattaaacaaaatatagaacttcagggttgcttcagagtatcctcttctaaatagatcaacattgtgaaacacagctctgaccaatcataggctgcggaacaaaaataggtcttcagagcgccgccatggagtttgtcccgagcacggcgcttacagctgtgccaggctgctcttcatagccaatccccatcttcttcagctcttttctgcagcttctatcttcaagtcttgtccaatgaactccgttcaggctgcagtgggtgtctcccgtcgcagagatagagagttccggagatttgaagctgcaggtcagccgtccacagcatgctgtcaggacaagtcattgccactgtctatggtctcgaccatgtcctgaagcttgtgctggttgagataaacaaaatgggcgcttgctgctgtttctgcatctttctctccgctgtttattgaccttcatctctcagttcggagtcatcgtctcgtcttattctcttaattgtcccagaaccactgcgactcgagactcatggcttttgaatgataaaagtcctgcttctgggtttgagacagagaaggctggtcctttgttcgcattgttttcttttgtttcattcatccacagcgtctttctttcactgcatcactttctctttcaattgtgccgcatagaagctctagaccgtttcattcttttcactcatcacctgcttgaccagaaagcagatattcagaggaattctgtcttttgtgagtgggttcttcttccctctgatcttcccccccccccccgctactacctacattacctaacacaaccttgcaaaataccatgactaacgcaacacattatggacagtatccagctccggagagccaaaagaagaatgccaaccgggagctcgggctctgaccggccacgagctcaactcacaattcccagtgtgcccaaatttccgctgtcgtcgccaatcacagatgaaatcactagcccagctggtacctctgaagggtcctctgaggaggacagggacctggaactgaatcagccattcgagtttctctcaaaggttacgagcagaaatccgtttgtttccaatgctggtagggcggcgccggacagaattcgtgactttgaacggagatttgcaacacatgcacaaatacataatcctgaacgcgaacggcctgttgggcttaatctggagatcccgggatctgtccctcagccagagttgcagcagccgttgcggaaagaaacggctggtgcatttgtggatctaaatgacctcaaggtgctctcgcaggcgagggaggaggagaggacggcgcagaagatcaaagggattctgaagaagggagatgataagaaggagagggggagtacgaagggattccaacggttggcagatgattcttctgactcaaggggagggaagagactttcgctgctcgacgcagtttctaaagtttcaaagagaaaaactagggacgatggtatctcgccaacggaccggcccatcgttattgggttctcggtaccatatgactcccctgagctccaagacggtaaggacaaggaggttgacagtgcgggtacacagcatactccccttacgccttcaataatagtcactccagcaagggaagatggtttctggggtcatctcagtccggagaatatgatccacgcgcgcccacgagcggcttctagtgtttactcgcagccctcgccacgtctggggcataaccacaacgtaccacctgtaccaggctcttccagcgttctactccaccgggaacgatagtctagcaaccgcaagggtacttggctctgttcgcaaacgtcgctctatgtctactggcgcggtcagtgagaaaggcgaggaactaccggccggacgtccacggtctcagtcgaatgagaaggtctctcgaatttccgaccgtctcaccatcaacacttcattaaacgcgcgtgcctcccaagggtggtggaactatcttctttccccattactgagcgctagctcacttctaagtccgaagacacctactacgactaagacacgcccacacctacccactatctccactagctcatcgggtttgactgatgaatggtgggacgagaaggagaaagaaaaagagagagaagtagagaggtcatatttctcgccagacaccccagaggcaactcgtcggatatcaagctggcagagtatgactggtaacccctttgccgactttgattggagtatagacgagaagcagccgcagtctcaagatcaacttgagaaccagagccctgaagcgcaagatcggggagcggcatcgatgatgttctccggccaaagaattcagggttccgcggccgagtactaccaagcatgtgcgcatgaactgttcagtggaactccgtacttcgaatgcgttaaccacatctgttctatcacgccaaaggataaaataccggtggctgttgatggtactccgctgcaggatcaggatacacaaggagcaagaggtttgttgatagatgtggatgatatgcctcgctcgaaccacctcgagtctccgggatctggaatcacatgtataaattcaagtccatcggatggtgccgcaacgttgttgtggagttgtgaaagttcactgaaaggcttgagagaacgctctggcgagaggacttctggacttcgaaggacaattt

SEQ ID NO: 5524 - DNA, 4653 bp, Emericella nidulans
  unsure (1)..(4653): unsure at all n locations
tactctgcagccattaattatcggcggtagaaagagaccttcgttgatacatgcgccatcgctccttgcattgtctgtggttcagggacaggatcaggaaatccaccccgtccgaagtctagcgccaggatgcgaagatgcaacagttcacctggtctaagcctcctccaggctcgagactcgagccgtgtgtggattcatcaacactgccggggagagcccgactcatgctagggtacaaatatcatttctcgttcgttgcgtagaaaacgcccaaccactttagagtacattaagctcgttccttgtgtgcataagggtcctatgtcgcaacgctcgcctgattgagctaatgatcgtcctgagtacagctcagccacaaaagtcgtgactattcacactgtctttccctcaggtctacatctccagtcgtctagacatagaatgaccagtgatgcagcatctactcatgaacgacgtcgcgaataaagagtaccttctaccgcagagtgtcgagtatactggagaaggaaattgtggcacactgcctcctgcccatggctcaggcagagaacgacttagtagtttatggcaatcgttcgatttctggatgggattgttgttcgacaagccgggcgcttcgaatcttgctattggcccggtctaatacgtggccctggtatgcaaggcaacctaactatagacaacgcagcgctacggagtagtcgcagaagtacaacgcaaagggtccaagatcagcgtacacagccgcctgagcgcacgctggccggatacccgtcgagtcaccagtgggattcttgcttaacgaagaccggctggtagtatcatattgtgaacagacagacggtatgtcattccttctcagctcctatttaggtcagtttgaagtggactgtcaacgttggtaccggtgaatgtccgtcatgtgacaggtttgctagataggtttattaaagatctcaatcttctacttatgatctctctagatatcacttctatcgtttcaaatacggacattattagacggagatatcagtaatgcatgggcgattatatatgataacaacctcaggggtgtaatcgaacgaaactcaggatataggctcgggcataacctcgactgctgtaaagggcgctagatgcatctgcagacactgataaactatctccgtgcctttttttctttgagtggttagacctataatagcgcgtagaagatctgcccgtgacatgggtgcctgtcaaaaaaacgcattcaagacaagttcgagtatgctttcggccactgttgacctgggttggatctacaaactgcggcttcctgtctgcaataattcagaaaatgtaaatagttgtctttctcgaggtcgaggtactgtaggtaacaaaaggatgcacctacttcagtagttattgtttctgaggcccttctatctttttcttgtatgtctctgctagttcattcaacctatccgcagattcctctgagaggaaaaaggtgataaagatgacaagcgtcctatccagcagagaagagggctcgagggggcgcagtttcgctaaacacattatccgttgtttgtttatgttcgacggatgatctggtgcaaacttgctccaaaactgccggatgatgtatgcttgggcggggtatccaagacacggggccactctgatggctcatttaaatgcaggagagacattgaggccagcgaggattctgggcgtgccgcatctagcaggtctgtggaagagagcaaccacctgacgcagctgtggcttataaggcaccaaacgtctgctaagaacgcaacgattacagcctacggctactagtcaacttgccaagaagcattcaaagaatgctctgtcgtcttgtgtgtctgcggatgtaaatcccaagctaccaacagagtgatcgtataatccagggacgatttcaggctaacagatgcccttgggcttagaacagccattcgaggttctgcccctccgactgctgatctattcaacgagcagctgaacgaggtaaatgttagttcatgcccactagcatccggactttcggggctcgcaatatccctttccgcttgcaaaacgctttcgaatgttatcctgggccagggttcagctcagcctacacttacgcctctgggtatcccgacgacttcatccttgttcttgcgtagtgctactacttcaccttagtctactctggcctctctgaagacgagaaagccagacttcaggctgctctcgaggtcaagggctacgagagggaattctcaatgaatcaacgctagaaatagggcgacaagttgaggctcagggtctcttgcgattattctgtacgtcaaggtgggattttatctgtatatgagcagtcagaatatcaagagactttcctataatgactggagttctcttgtaatgttttaagaaaaaaatcatatgtgaatgccttgacctacgtagcgttatccaagtaccacaggttgtacgtcagggaaggatgaccattacgtctcgtctcatctatatatctgttaatagcctgatgctgtaacttgctcgtttagctactccgttttctcgatctggtgtatttctgagcccttgacaacatgagagagcatactacggaggtgttaaataatgaggtgaattgtattttagaacaaacacggtataaccctgtagtacatgatctcaatgaaaattgcactaaccatgcatgccagctcaactatacaacataaatttgtagtagtgttgcaatcaaaactgcccttttcgtaccgtccactaactaggtttaaacctgttctaagtcgaaagctcctcaagaactcctctgaagttctcatcccctcatataggttgtaaattagctagtcaatgccggtagctggcgctttgcagtgccacgcagttagagtcaacaaactacaggctgcatgtaagagaggtaaaaaagactatattccaagcgcccttagctcctgctaagtactgacaggcaattacgatcagagacgcaataattattatcctaggcctatcttgatggtttcaaagggaacaccgattctgtatctcatcttagatataactaggacaactcagccattcattctgttgataagagacattgaattgaactaggatttgctctctttggttattgtttgggacaccaaacccctacagtacctacctatatatatggtacggagaggtgaggcttagaatattaaggaggcgcctgccatgtttctcactttatattctaaatgccaagacgcgttccactaccctttcagaatgtaatatttagggttatactggttgaaagtcactagtaatacgcgtgcttgtgttagaatagctttatgttgtccaggtacagtagggttgattgagctacgtgaaggctatctaaatctagaggtagctccaacatagtctcttagtgccttccatgggatacttaaccctgtagtccattaagtaaggcacaacataccatagtaaggtctagaccgtgtgaaacatgatgttatcacaggcaagctcaaaccctacgccatgatgagatcagcctccccacttatttatcaggtatctcgattccgttgtcaacgaaaccgatgcacacaattggacaggttattttctgcagagtatgactgcatcgtgatgcgatctcaattcttgatgtatatccgccattttcccgctagagatcaaattcagattatcatcaccacccacccatagccgtgctctctttaaccacaaactaccacaatgtcgcgcatggcaaaagacaataccttccaggcccctgagagtgcccagacacaaaatacaccggggtaaccatatactctaccgcctatagacctgagactgccagagactgattgatcatncagcctggatagcaaaatgcaacccgccagcgacaaccaagctcgagacttccgacggaattaaagattacaagggctccggtaagctgcagggcaagaaggcactcattaccggcggagagtacgttctctgtacctgttctgtttcgcggttctattgctaacaagtctacggcgctgtacagctccggcattggccgctccgtcgcagccctgtacgccaaagaaggcgctgacataacaatcgtctacctccctgttgaagaagaagacgcgcaagagacaaaaagactcgttgaggccgaaggacgccaatgcctgctgctgagcggggacctccgcgaccgggggttctgcaagcaggccgtcgattcgcacgtacagaaatatggacacatcaacatcctagttaacaatgcctcgcagcaattcagctgtcccgacctggcgcagataaacctcgacaccgtcactgatgtctttcagacaaatatcatccagatgtttgcgatgacgaagttttccctcccgcatatgagcaaaggagatagtatcatcaataatacttcggtcacagcgttcagagggacaggtagcatggtggattatgcatcgaccaagggggcgattgtaggtttcacgcggtctgctgctctccaacttattcccaagggaattagggtcaacgcggttgcgt

SEQ ID NO: 5525 - DNA, 7975 bp, Emericella nidulans
attagtgtgattgcgttgggcgtctagacataatattttacctgaatgatacgccatcagggacatcgtgaggcgtccgttgccgcacgggtcccagcactgcattgtcacgctgtcgccattgagacgcggtcatagaccaccagaagccttatcgacaccgtcgccgtacgtgggatacaagcattgattattgagaccgactctaccggtttgctccaatgttgctttcaatgcgagggtgttcccgactgtcgacgggattgtatatcttttaccatccacgcaagaatgtgaacgaaacgatgaaggacaaggagcgatacggttgctagactgctggtatatcgtactgctcctaattcaggcagtgaatgtgcctgcagagggccgttcattacatcgacgaaggatgctgtgtttaatcgccgtgcccgttcaacatcacgatccttagtccttatacaaggcttacatcattactggggcctctagtacttattataaaagcctgacatgcgcctcggaatataaaaaccgagatttaatagtcccatgtggtcagtaagggtggaggatcgtatgatgttgcagcgcggtggaagcggagaccgggtttcagatctgatgcccgaccaacaggctgaggactcggcagaaaacatgcttgcatgaattatcgctgtatctactctagattcaggcccacgtagaagaatcaagcatgatcaacagtaattgaggaaacgggagagtcgaggatcgttgggtgtggcccacggcccactgatcggccatcttaggtacgcctccgcgtttgcaggcaaagaattctgcctcaacgcctcgacagtgttaaactgtcaacaactagactcctgcgcccctcaggatgcagcggttcgagccgccatgacgaaccgtgaccccgatttccgccatcaactgggcaggttccgtctccaaggtcgatccccctccatcctcgcagctgcccctcccgacctcgtcctcaacgcccgcgacttcgcttcactcgccgtcaacacagtcgacggccgctccccctccgtctctaccgcaccgtctcacatcgcgtcccaagcgcgtctcaactgcctgtgatttctgccgcaaacggaagaagaaatgtgactttcgctatcctaattgctccgcctgtactcgagccggtgtgcgttgcaccatcgcgccgcccggcccgcaaatcacaaactccgttcctcgcgaccagctcgagcggcttcaggaccgtgtacaatggctagaagagattgtccggcgcaagactggtgttgccgtcgcggacagaccaactggcagcgcgttggacgaggatggcgactcgaattcctggcaccagctgcctgccatcttgattaaggttgatcctagcagtccgcaagacgcttccacagtgggaggatctacaagcggtctcgattcaggcgcgagtccagcgtcaaacgatccgtcggctgtgggaactgagcttcccaatgttggtgagatctttcgcgacaaactcgaacaccgtcgcccttccatagcccgacccgtcgtttccgcttccccattgcattttctccgactggcatcgttagaagaagccgagcgagtggctgggcagtattttgatagcatggggtatcaatatccatttctccaccgtgtcgagtttttcgacaatcttcgacggatctatgctggcgaaatcctcagcccggaggtacaccacagctatcacatcaccatcggcatttccctgcttatcgggtctgcggaggatgctgagacgagggctatggagttttatcgcgcaagtaataaaacgctttccatagctttgcacaacgaagatcttacggcgctccgcgcactgctcagcctggctctttataccctgttcgcgaccaccggtcccagcatctggcacgttctgggcaccgctctacgacttactaccagcttaggtttgcacaaagcacggcaccccaccaatttacacgatgacgaaatgactaagcgcgccttttggagtctttacaacctggatcgactgatcgcaagcacattaggcaggccactggggattgctgacgaggatatcacgttatccctaccacgagagttaaatgacgacggaaccgaaacgccaggagccagctccatgaccattccaatacaggtcattaagctgcgccgcatcttctcccgaatctatcgttatcgtaagtcctccttgccaaatgctccgaacagcacagccttactaaagagtctaatgcccacagtatacagcacaaaccagcccccaccaacccccaccgaactctccatcaacctgcgacacttccgccaagaacttgatgaatggcgcagcaccagccctgtctacccgccagcccttctctactcaactagttacttcgactatctgcatgccacaacccttcttctcctctaccgccccagcccacgcaacccaaccccggaccaaacgagcatcatcagctgcggcaacgctagcgttgccgtgatccgctcctactgggaaagttactgtgccggtaaactgaaatggatttggctcacgctcagtcagctctatttcgctggcataacgatcctctggtgcttgaatcgaaactttcacagcgtgaacgaggggctcggacccgtttgggagccagacgagttgatgatgcgaagggcgatccaggccgtcgttgttatcctcgaagctttcggaaaacgtagagctggagttgataaactggctgagacgttccgcacgcaaagtaccactatcttcagccatttggcttatcagcggcagcagcagcaggctatggtacctccgccggtacctcaaccgcagccggtggtaaatccagtgtatatggcgccgccagttccgctggctccggttctggacgatgtgttgttggttgatgcctctaggacaatgcccgttatggatcctcagatggcagagcagttgttttactcttacgattggtttcaggaggaaatggcgacgtattataccttatagaactcctggatatggagcgttggatatggctgctatgccatgtgattttgtttcccgaacaatgatgcgatatgtacacaagattaccttagttgatctaaatattagatacaaaactccagtttagatcgaagcgtaattatttattcccaggtcgaaggcccgaaccgttcatgggggggaacagtcttccacggcgtgccacgaccatcggccgttctcatgaagacttcgttcccccaccacctcagcggcccagcaggtagcatgatgcaaaaaaagataacgacggtggaaacagcgacgcctgaatctaaggctgcgctgaggacatagtctgggtactgttagccgggtacacatttttgaagaaggactgaagcaagagatgacgtactatacttcgaccaccaagctggccgtttgcgcttgacaagaccgttgaagataacattgacaacccaccatgacgaaaagttgatccctgtcgcaggcgggaccatgctcattgcgccgaatgcgacgggccaagatatgtagtttgctgccttccagcggcgcccaagaaggtacgtgataatgacaaccacaggaccggcgaggaagaaccagaggagattcccgtagatttgacctgggctgaagttgcgggcggggcccaaggcacctggtttggtaatgacaattagttagaggtctatagatcaggttgtagaattcactacgtaccccagatcagagatgaggaaaatgtgactaaaccgtgcggacaggtgaagccgccgtccgcatgcggggtgcagatgccttcgaaacgggtgagcatgaataccgtgacaccgcattgcacaattgcgccaatgagtgtagcgagaccctgcgcgaaaaagagggtgcgcggtgcaatgtggaggtagtgcgccagtttcatgtctgcgacaaatctggaattgcatttagagacattggggacacatgataattgactgttggtacttactctagtccctgcgagaccgtcacatacccgtagaacttgaaggccatgttggcgacaggcttcccgagaaaggcatacccaccgataaattcagtgattagattcagttggttactcgtaatgttcgtcaaggctttaataatgcccacggggatgaaatatattatcggcaacacgaaggcaagaaggacgccccaggccggcaggcgcgtttcccatacctcattgttcacaatactgagtatgaacatcagaaggcttactgcaccaaaccaccaccagggtactggggtatatgattgcataagtcgagaatggatatcttttttgtgtcgaccactccattgctgaagtaggtcctttccatggtatagtgctgtgtgaacgaatatcccggtgagattggcaaatgccacgccatatgtgacggcaaacccggcgggtatgaacatcggagagtagtttcggtaagcctccacgttgactgtgccattgttaatgttcattacacggcgcgtatcgtacatgcgaccagtgttatcgaaggtgttggagtccagaagcggcaggtaagcggaataccatgtgttcgtataatagatgataggaaccagaatccagaagaaaaggacaaacgatcccataacgtttaaacctgcccagaaagggactaggagagggctgtcgttggcgaagacaacttgagaccaatccaaggtcaaaagcgacattcccaatccggttttctgcccgaaaagctgattgaccacgacatttgttggtgctatccagcacacgaagctgaacatactaagagcggtaaacaaataccccggaagaaaataccaaagggcgccgccaacgaagacaaggaggaagaacttctgcctcgtgattgtccatccgtcggcgaccttgttggatttcgagtgtaaggtagaaagaagggctgcatttgacaggacctgcggccagatcatagtcgctggttccacgagccagcgtgaaaccatcccagcgacgccgaacccgaatagttgagtcgtgatgcaaaggagtatttgaaagccgccttgcgacggcatatggtagaatttgaccattgcctcaatgacctgagtggccgcagctgatccgaaggagacattggccattatcgtgatcagggcatgctctttgatgttgaagcggcggtctggattgagccagcccaacggcatccattttgcccacgcacagccgattggatatgctaccagttgagcgaccagcgcactaattctgacactaggttgccgtagactaaaaaactgatttaatccactgccaaccttaagatagcactctcagtcagctccggaaagtgaaaaagtgagaggtcaaaccgctaaaggtgcgcatacaattgtgaaaagaatgccaattatccacattcggatcgtattgagaggcaattctacgtcgtctacaggccgaacgacagctcgcacctccgggaaaggcgaatcgtccgcttcgtaggggaggatcttctccgcatcgtggtcgtcaaggacggcatttctgtcgactgtgtcattgctctcgacgttattaatcggcgattcctgtgagaacgtgataatcgtatcagtacttggcctgcagaaggcggactcaggccgctgagatattactcaatgtagtaatatcatgaatcaggcgttgtctcgcagttgacgagaagcccaatgaaatcgcattgagaggcagaatcggatgcaacccaccttgcacgagcctccgctaagaggtttcgcttcactttcccgcatcatccatgacacgccgaagccggcggatgagatccagcgctgggagcgcgggatcgagacctctgctgtgggttatccaagaacgagccaggtggagtcaatacccctggggttgatcgttgatcaccgagatcaacgggggcgtcggtaattgggtatggtaataatcgggtcggaaggatcataaaacgttttcgggtcgtgttgttgccggtgaaactgagacggttgtcaactcaggaacgatttgaggagtggaaaaaagagcctgcggaggaggagattatgtgcctgaggccgcacatcctccaccgctctggctgttacacaggcgcttgcgttgtggccattgaaagtcgagttcttctacgaatatttgtatctatgcatacgaggctccagccatgtaacacgaatacggctacttctagcatactgaaagtccacattgcacgccatttgcaagcgagtcccagtccgatttgcgagtcccggttcccgtcggaatgatccgcccgtcaatcttctccttccagtttaagctgccaggctgcttggattggaaccacaaccagccagtcattcgccattccgtgacctccctttggcagagtggactgatggcgggccagaaatccgactcatctggcaaacgacatgcagaagaggggtgccaatatgagccttgaccgtgaaccagcggatacagccgaccgtttccatccgcatcgataaaccccacggcgcgatgtcggaagaggaaactgaaaatcaaatagattggagagtctctgttgcaatggcactccggcgctgtcccctatttccaccaatctacaaagcccttgctgctcgttgacggctcaccttttcattaaattctgtatcttgtccgtcgagccgggattcgtcatattatcactccctgaggtattcatacatatagagagcatcgcagcgttcgtcctcgctaggtaaagaccaaacgccatgggagactgcacccatcattccagcagtgttccgttcccccaacggccagtcgttatcctaggtgcaggaattataggatgtgcggcgacataacagcttcttctagacggcttctctggcaccttagtggctgaattccttcccggtgaccaaaacatattttatgcctcagcttgggctggagcagcatggcatgcggcgtctggtattagtgccgatcaccgctatatccaggctgttacccaccggcatttattgaagatggcgcgagacgagcctgattctggtgtctgtgtcgttgacggccgtgaatacgtcgagcaacctcctcccgagaactcttccgcttggggaaaaacagtacttaataaggtatgaagaccctggcggatatagttgtccttgtctaaaaaacggcgcagttccgtgatctcaatccgggtgaatatcctccaaatttcaattgcgggtgggcttacgaaactgtcgttactgatccctcacgacacctgccctggctccggggaaagattatatccctcgggggccagttcgttcgcaaacgagttgagtctttggaggaattatacgccatgtttcccgaatcgaggatcttcattaatgcgagcggtattggaagcaagtatcttacggacgtgcgtgatgacagatgctttcctgaacggggccagaatgtgttcttccgtacaagcaactgccgaactctctactttcgaaatggcaaggagtacacatatattattcctcgaccattatcccaaggcgtgatcctgggaggggtcaagcaaagagacactctgtaagctaggaaacctgctttgtggctcttttactaacgacagcaggtcaccagaagtagacatggagattgcaaaggacgaaattgcccgggcgcatcgccttgccccggagatcgtacccgcagatccgacggaagaagtcctcagttatatcattggaattcgtccttcgcgagaaggaagctttcgactggactctgagaaaatcggggaccgcacccgttatgtcagcatatgggtttggggggtgaggatacgccttttcata

SEQ ID NO: 5526 - DNA, 5773 bp, Emericella nidulans
atcataatgaggcttcgttcaagagtattcaggatctcatgatatttcacatctgtgcgaagatccagatggtgatgaccaagttgttgggatgactgataccagagaggacgttctggcgcggccctcaacgtgcttcccatgttgcgccgactggagtttctgggttcctctatactgaatgactgtctactaccaaaattaccgttgaacctaacttccctctccatcaacaactgtgatgatgtaactacggccaattttagcctctttcttggcactcacggccatagtctccgtgaattgagcctcagtcacaatcgtcatttgagcctctcttttgttgttgatctcaagggatcctgcccgtgcttggaaaagttcacagtagatatatcgatacacgacctttcgtcatatcacgacgttgagcctcattttgacgagctgctctctccttcggagattccatcgtggcctaccaccttacagcacctggagttgatccagttgcgcaagtggaaggagaacacggctgaagcattttttgcttccctgattgaagctgctcctgagcttcgtagtctacgaactctggtgattagcgcaattctcaagacaggatggcgtgaccgtgcctctttccgtgaacggtggattggcaagctgaagaaggtcttcttacggcggagcacgccacctaatccggcactttgcactctcgcacggaactcggagggcctgtcttcaggcaaaccaagcgagggttcgcagcccaacgacaccgagtttgcgtctccgtcaaaacgaaaaagcgcgcgaatcgccagcctcagacatttcgatggtgaagaaatccgaagcttatcgacccgggctcatcagataaatgaaaatgacagtgagcttgacactcccgccacacagggcatgtgcaatgttgtggaaattcgaatcgacaaccaacgcccgagggatacacaattcaatgaatcagacttcttggacgatgaattaagtggggacgaagaatggacaggtcaagacgttgacctgggcgacggaggccatgcctggtgaatgctctacaaggggccaatccgtctttactcgcgctcgcggtctagttttaccagaccgtcgcttctgtatatgccctttttcatgattattggcggctacttctctctggaactctcgatgttttgagctacaggggcgggtcatggcgtttccaagtcttgggggttacatttcatggttagggggctcttctactctagatttattagttatacgaagttcttacctcggttgttgttctctatagactgcaactaatgcaatactaaacttcaattctagctctagcaaggtacggtaggccttggcgcaagttccagttattcgtcgtcaaccctcagtgcatatagtggaagtcctatggtgcggtgacttatgccctccagcatatccagattgtatcatctgccaaatccactcttctgccggtagatctgtcttatatccccctgaagctttgatcagacaaatttgcggggaagccatcggtgcacctccagctagtgttccagaaccggattagctgactagcagtacatgcatgcatcagatacacggaccaatccacaggtctgtggtgaaaacaccaactcactcaacagcggcgcagaaatctgcagcaacacctacgctggtttccgttggacgttaccccgggacccttggctttttcatccaacagagcgctagtggtctatctgcaatgtttgtctctccatttatggcccagcaatgctccagcttttacgcccttgagctgcagttcttacccaaatttggaactttggacggatccataagtgataagtcgattctgccattgtaaccgtatgtgctcatggatactaagcgtgttgctgcggcttagggccgagctactagtacaactttccttcgctcaataacaacaatgagacaataccatagtcagcgcctgagttggagtcggcccgcctcaccaagtacctcttgcttttggccatagcagaattgcagttgagttggtacaggaaaatacgtgattgggctatcgtaagcagcgagacgccgtcgagaggagaatatgctgagcagcattctttagtgactttatggagtctatttcttgctgagttgctaggatggatttgtctccagttctccagtgtggtagaggggtaatgtctttgcaaacaagcatgaggggtcaagcctcctgtgctacgtgagcaccatcgaatcacgcagacgacaatctggagccttgaattatcatcccacccagcgtacaagacgaggcccaagctctcttggcttcgaaactctccaagggcttcgcgatttcacacccacacttgattttgtgtcctgggcttctctatttcatataccagccgttcaggcttccttcggcagggtagaagcatacctataacggttcatccaagtaatccagactctggatcatataacggcaccgtgtctttcgaggctagaagttggcattgtcgcaacggttttcagtcggagtcgcgaggccgccagccacagccattgctgctattttgtcttaatggccctgtaccaagctaagcatacgccttcagaaaccctatgggcacatctgtgcgccacaattaatgccgatctaatggatcaaaggccgttttgcagtggactttaacctcaagataaactcaagaattcggatcataaccctaatagactgtatttgtactcctcatattctcaatcacctcacgagctgtctggtaacagacctggtctgaatgcaaattctgtcagactatgttgcatggaatatgcacactgattgcataggtttgggtgtcacacgcacgcacctttcagagccatgacataggccgcctattactgcattgcgattatgtctgttacgtgttaagtccgtctaattcttccgtatttgacggcaatatatcagatatatacccaagtatgctgtgtgacagatggtgtgtaacccctgtgccccctcttaccgagtctgcccagccatcaagcaccactacagccaacggagggcatatacaggcttagtcaaatttactccccgacgatctttgtcaatgagctgttcaaactagctgaacattcgtttgaactaggcattgctctaccctgtttttacataagtgcaccatccgacgaaacaatccccgcccctccaaatctcaccctcgcggtttgaacaagaagaaatggatctcaaagaaagctcccttagatttttggcttctgatatacgaagcgtaatctggcggctggcaactttgatatcggtggtagccctactacgaacagcttgggtcgttatatatcgaatctatttccatcccctcgccaaagtccctggaccactacttgccaggataacttggctctactcattctggtacaatattgtcaccaagcgtttctaccttcgcgttcaagaactgcatgagcaatatggtacaatctgcacccgccggtgggccccctgctgagatttactaattgtcccaggcccggtaatccgcatccccccggatgaaatccacctaagcgatcccgagaacctagaaaaaatctactttgttgggtcacgatatcccaaggatgctgcattttacggtgcatttggcgcggacagatccgtgttcacggctccaagtccagacgtccaccgcgtgaaaagagccgccttgaacccgttcttctcgcggaagaaggtccttgaattggaggatatcgtgcaggataaggcggagaagctggttggacgcatgaagaaggctttcaattccactggtgctattgaccttcatcatggtttccgcgcgatatcggtcgacgttattacggactatgcatttggcgactcgtacaactttctcgaccgagacgactttggaatagacttcttcaatgggttcagagatacggggcccgcactgtggaccttccagcagttccctgtcatccagcgagtagcgaagaaaatgcccttttggctggcagagcgccttagtgccccgttggcattgaggaggtctcaacacatggtatttaaatgtctggaattatccagttactttactgatgttgcctagagttcgcgagcccaagttctcaaggtgaaggctgccgtggaaagagacgaaaaggtctctcgcactaccatattccacgaactattacgtcctgatgcagctgaagggtacgcagtgccaaatgtggacgagctctcaagtgaggcacagaatattcttggtgctgcatcagatactacagggaacgtgagtattgcgtataaatctgatgctgaattaatgacgatgatgcctgcaaatcgcctttacgagatgctgaccttcatggtttagaccttgacgattgcagcgtacaatgtcgttcgtaaccctgacatatacgcccgattgtctgccgaactcaaggaggcattcccaaaccccgagggccgtttggagtttgttgctttagagaagctcccatacttggtgagtcacttgcatttacagccgtccagaaatatatgtgctaatcagatagactgccgtaatcaaagaaggactccggtaagccccgctgaacgagtactatcatcttatatcaacagaagcagattgtcctttggcgtccctggccggcttcctcgtgtagtcccaccccctggagccgaatttaatggctaccacgttccacctggagtatgtttcattgttcccgctatctacgtaaactgacataggcctttcaagaccgtggtgagcatgagctcctggataatacaccataacgaaaacatatacgccaatgcggatagattcaacccagatcgctggctggatccttcaagggcaaaagtgctcgaacgatacctgttttcgttcggaaaagggacgcgaggatgtattggcatgccgtatgtgtctctagccatatccaatttctgatagtattaacctagacagcagactcgcctattgcgagctctacgtgacccttggccgaatgttccgcgagtttgataacctgaaaacgccggcaaagagtagcgaggagttaattgtggacgatggcttttcagcgtatcacccagagaagaacaataagtttgtatttagcctgtcttaggtctttggctgttatacttgatttggctccttgtcctatgttcaatagtgctgtgctatgttctcttttcttcaatggccattgtttagcttcaccttagttcaaaagcgtatcaatggcgaggtaaatagcgcgttttcccagtgttattctcttctcttttattcacactctcaggcagctgtgaagccactcatgttcttcaacatttgtctccctcttcatacaattcccgccagcatctccccgagtgcgtctttattagacttgaattaattgaccgctttctttctccttccatcatagcagcttcactcctaacactgttgacttgatttacatccacatctgcctcataccatctcatcctcacaaactagaacacagcaaatcatcgactcatcagcatcgcaccatcacttcaagatgcctatgaactggaacgcacaggcagatgccagggcacgtacagcatcgatcacttattcttatcgattctccctgcattgtcgtaaggcattgaaattaa

SEQ ID NO: 5527 - DNA, 4461 bp, Emericella nidulans
  unsure (1)..(4461): unsure at all n locations
agttctaagggtaagttagctcttatcttgaacaaaaacaactttgtcgtgttcgattgtgattgcgataggcaccgccagcgaggcgatgttagagcctagaaaaccaaaaatcgaagactcagttgccgaattattcacgactcaaagcaattgagttaccctagcccttgatcgggctcggactagtaatgatgattctgggctgaagtttggagtaggtgggttgtagaacactctggcgcctgtttacttaggtatgcctgctaggcagcatgcggcagcctggagcatcaggcaatgaagctcttctggttttgcaaccctacaatccttttaaagcttcaatcttccagtctcgtataatagttatcaatcaataaccctgttcactcgctgaagctcttgtttacttcatcgactagaaccgcgtcgccacgagtcagctggcttagtggctcgtattaaacgcctcgacacatctatccttcaactacccctcgacctttctccttagttggcgttcatcgcagcgtcaattgcacgtcctctggcacaatgcccccaaaattattcaagaaactcgtcattgctgtgagcggcactttccccggctacagacaaggtcggaacttctgcgatgtccaatttttgattgagttcttcaagagtacaactcgtgagctgacgcgccattcttacgcaggcgacttgaaagctattgtagaaagacacggtgctacattcacttcttctgtcggtacggattgtacccatttgatagccactcagaaggaggccgataagaagggagccaagtgtgagtcaacaagcgaatcttatctacacctttactcacaagttctgtcacatcagacaaacatgcatgcggcttgcagagttgtgagatagtgtctctcgactggttgcttgactcggacaaggcgaagaaaccggtctcagaagcgccctaccgtttcggagcatctcacagcaatcgaaacagccaggcagatcctgctaagtcagagaagaagcgaagcgctaaagctgtccaggatacggatgatgatagatcaaacaaaaagcctaagcaaataatggaagatgcccagatgataaccgcggagaaggcggccaaggtaagggtaagggtcgacgagtactatcacagcaacgagcatacatggcaaggtgagcagcccgttgcctaaattccgtgcggaagctgactctaagcaacagacactacagtgttcattgatgattcaggttttatttgggatgccacattgaacctgacagtgtcagccgccaataacaacaagttttacctcattcaaatcctgaactccaaggacggctccagataccagacctggactcgctggggcagagttggggagcgtggccagtctgtgcttctgggcgacggtactcttgacagtgcaaaaaaacaatttgagaaaaagttcaaggacaagtctggccttgcatggaaagatcgcctcaattccccaaagaacaacaaatacacgtttatcgagcgcaactacgaagaaagcgatgatgaggacgagaaatctgacaacaagctggtaaagcagccatcgaatattcctgcaagtaagctgccagcacctgtccagaacgtgatcagctttattttcaaccaaaagtacttcctcgagaccatggcgcaaatgtcttatgacgccaataaactgccacttggcaagctgagcaaaagaacactgatggcgggttacgaaacgctcaaggaactggcagagcttgcaaccaaaccaagtatggcgatgtctaaatatgggatgcaattgcgtcctgctatggagcagctgagcaatcgctactttacgacaattccgcacgttttcggccgaaatcgaccacctgtactggacaaccaagcctacatcaagagggagattgagttgctggaaactttgacggacatggaaatcaccaacagtatcttgaaggacgcaagcaagatggaagacgcgaacccgcttgacagccaatatgctggtcttggaatgcaagaaatgacaccatgtaagtcggtgctggtcaagtgcatgcggatgaaattgacaaagcacagtggaccacgcctcggaggaattcagagagcttgagaaatacctctcaggaacccgtggatcaactcacggtgtaaaatacaaggtcagttttgtgacctcgtgtcgctcagaagtcataataacattcgtctaggtgattgatatcttccgtatagagcgacagggagagcacgatcgattcaaatcatcttcatatgccggcctcaaaaacagcaaccgccggctcctctggcatggttcccgcagcaccaactacggtggcatccttagccaaggcctccgcatcgcaccccccgaagccccagtcagcggctatatgttcggaaagggcgtatactttgccgacatgtccagtaaatccgccaactactgctggtctcataacagtgaccacaaggctctcctcctgcttggtgatgttgaactcggcgatcccatctatgagctttacgactccgactataacgctggagagaacgcgaagaaagagggtaaaatcgcgactctgggaaaaggccggagtattcccgctggctggaaagatgccggctgcatccatccgcatttgaagggcattcaggtccccgacgcagattccggcactacagaccataaaacggaccaggggtacttgttgtataacgagtacattgtctatgatgtggcacagattcggctgagatacttattcttcgtggatatgcggtaatctactaagtttcctttcatgatttgtatctgtatactatagggacgggcacacaaaaggagttagatacttcgagtttataggtcatgttctttttttttcgtttttttttacccttctttactaaggcatatagggctttaattcggttcgttttctttctctaatcctgttcagaccatggagggccccagaaacattcagcatggatatgtatatatataatctatttattccggaagtggcaatcagaaatggtaatacacatagacgaggccaacgagatatgcttcataatccgtgcattattttccgtttaacgtttagcattaaagccatgattatcattaatccatcttcccctttcccatacctcttcttcctgtagccgtacgcctaacccagctcatcaggaggatcaacgcaagagcagaaagaatcaaaaccagtataaacccctgactcagaacgaggccaagtatcgccataccataacttaggcgcccgtaacacgcctaatcacaaaccccaacatccaccctaaaatattaagtgccacctttaccccccagaacatgagcttgaagccccaagacatcagcctgagtatgcctcgcgctaggcctggtagttcttcttctgtgcccttccttcccttcgtagtctcctttttcattgacatcgatgaggacgtgttgatcccatacttctctaaatcgatttcctcggcggccggggtgagcgaatctgctttggcttttgctcttcgacggcgggaaatggcaatacttgaacggagggaggataaggagggaaaccatttgcggtggattctggatctcggtggagtttgtagtagagtttggctccgaggaggaagggggacagagggggtatcattattatcgttatcagtatcgtcacgctcggcgagcgttgcgaaaagtctgggcctattggtatgtgcaggttgcggtggttgcggtggttgcatctctgtctctttctgtgccctcgcgagattgtagaaagccatatcagctagcactggattggtagagacatccgaaaccgctacggcgagtatagccgcaacaacagagtcaatggcgtatagagagggaatggtattgtttatagtgacagcagagactgagagcgtcattgtgcgtaggtcgagagaggcgaaaggctcgtctgattctgaatcggaatctgacagctgaagagtagatgtgcgtggtgatgccactgcagctacatcgactgagttcttaggaagagggacttgtgactaggatcgtnggcgcttgagactgccctaattctggttttggatttggttataacccttttggaagtgtgggccttcagacctttaattgtaagggccaatgtctgttgtaccacggttgcctacttttatatcgtttatgggttcaagaggttgacgatctatgcaatgtccctggcgcatggttaaactcgtgtttgtggggctatttgtggttgtcaatgtagctgtaatttaatgtgggatcataaaggggaaggtctttggggttcccccctcccttctaaaatgtgtttagggtagcttctttttttttacttatctgtgga

SEQ ID NO: 5528 - DNA, 7212 bp, Emericella nidulans
gtactagaaatgtgcattagttacaacatactgaatgttgattttcttcctcccctttggcggatttgaaagcctggttcaccgatttaagatcaatttagaatgcctattaaatttgctgaacgctggccaattactggacacttaggaggctttattccctgaaatgcagtaggaaattgatctcaatatgcattctggcttgcatttgtgaaactcgacgctgctttcccagtgtatactctattactttccaaggattatagcataggaaacaggttaggaaggagatgagcttgtgcaacttccgttaccagaacctcctgcaggttcttatcatcttttggagttttgagctacataccttgtttgctatacttaatatttgaagataagaagcagcaactgtatctaatagtaactagcctatccagtacttcggcctatcattttatctgttacaagatatgcaataagtacttaacctagtggcagatgtacctgccagcggaagaaatagcagttggagacaaccttgaccgagttcaactaagagccgtgtagttcttgaggatttccagactatgagagaacaccagttgtgacttgggtaagaaggaagaataagctatgatgactttaaccggactttgatttagggcggctgcacatcacagtcccattgtcaaagaagtcatgagcctgccaattaattatactgattgttgacattctcactgtaccattatccgcatttagaacgattcagtttagatctctgaattaatatccatgtacggcatgggtcatcctcaacgagcaagttgcacctccaagctccctctgcacaaactggtcagataaagaatcctagatcctgcgtaggaaactcttcacttatctcagcaatattgatacagggagcttaccacactggttctgcttcttcagtgctctctacaaccgcctaaattcagtgcttctgctgcccaagaggtcctctgaagaaatagtagatatgtgtagccatcagctcgccgcatctcccctggctcatatgcttataccttttcttggggttgcggccttcaccaatatgactctcacttttctaggatcccactcacgggtgtatttggcagtgcataagaagcaacgcccatcccttatcgacgatacgaggatgatgtatttatcctaagcgagtaccgtcatggaccctagcctgctgcgatcgctactgtgattcggactgcgagaatgattatcgtccttaatggcgctctgtgtgttttgctgcctactcttgacattgtgtcatatctgtcgagctaccaatatagccccaaccctaactgagtagttcacgcatttagtccttgctgggatacaacacagtgtaagatatcagcatagcattcacttgacatcggcacttattgatagataaatatttcagtgcctgatcaatatatcacgatttacctacaagatcccggtctcctgaaagagtcaccctccccagtggcagtacaatatcccacctcctcgaactttgaagtgctcagtactctcacaatttctccaagacagaagcagagatgtatctaacttcacgcaacatctacccaggccgctctcgtcccctacgctccgtgacctgcgagcccgatcctcccttctccacacccagtacggtacatcagggtcattaatccaaaacataaaagttaaagcgaatgatatgtatagaatgatatgtataatcggtgagtgtatatgagatcttccccgagtaaaccattaatagttggcttccgtcgcacctcccctccagctaaattggcatagtacaccctctcttgacccagctcctcattttcttcagctgcttagcgaggtccgcgatggattgacctcattgtggccaaattcaacatgtcatggtcatgtgacgtgatggattaatatcccatttatgaagagttcgaaccgcccattcactgactaatctacactgatggaacgacccaagaaagctatctatgatgagtgtcagcctgctgctgaccaaatcatatgggcctgggaggtgccgtatgccattactgttactctcgacaaagacccacagaacggcgtctgctgcttcaaccaagacgtgttaaggacagcctcataacggcatggcgtaaataagcccaggagttccgtaagtacctgatatgtgctctgcttgaggttcagagtcagccacccgtcctgccaatatgccttccgccagtcacgcagggcgcttgaccacttgtctccagtcgaacaggaggcttggaactagcagcattgaaaattgttcattatgaacagatacggactggatgtttctttttttggttgtaatagcttggctggtacaactgggttggctcggatcgtggctgaaggttcgggatccgtgggacgacggggcgtgcttcgaatccgagtttcctccttgaaagacgcgtgatttattctttgaagtttactgtatgagtgtcgggcattggagtgcctgacttcactgcttcttcaatatgatgcattggtgggcctgggtgtcccactagatgcagaatcgtaactatctgataggccatgtcccaagtatgtcttatagggccactctagccgaggcgccgaggcccctgctctcagtcacctttgacaagaacctgaatgactgaaagttgggtaccggcacagggctgggagcactgggtgcggggagccgccggagttggttagaggagtgcgagggtcttactgcctggaatcagctgatggagggatctacaaagccacgaaccttggacaatgggaggcgacgagggtccgagagatccgatgtctcactcgctgagacctggccaacggttaatggctgttcccataattagtaccgtcagcctctccgcaaagcggagaacggctgcgaccacgattggctgaccactggctgtcaaatttcatactactattcttgacagctttgatggcttttgaagtcatcaggattctgcttctttctggctttggagagcagaaagggaggcagggtgtccacggaaacacataaatacgggcgtctgcctcgcccagctcgaatacctggatatcccttcattccaacatcgtcagccctaaaacaacaaacagtcttcactccagcctcttctatacaatatctctttcatacactactctcatctgcaaacccctcccaaagacaaacagtcaacaccgcaaccatgaagctctcgctcaacctgctcctcgccaccctctccctctcttcgacggcctttgctgccccctcgtcggccaaatccatgatggtcgccaacactcaatggaccattacttcccttaagcgcgtctgcgacaccgccgacaccaaatgcacctggaccttcggcatcgacacgggctccgactctaccgactgtacctacgtcgtgacgggcacgcccgcctcgcaggcgaacggcggccctgcgcattgcggtgcttacaccgtcacctctggctggagcgaccagttcggtgcggaaaatggcttcaccaccctctcggtggtcaatgagggtacccgccagatcatctggcccgcgtacacggacaagcagcttgcaggaggcaatgttgtcacgccggaccagagctacacgccttctgtccttccttgaacggtttcttgatctgttgtttgcttgggtctatgctttgcaatatgtattacagctttacatcatcttagggaaaacttgtatcgataatctcaaaaataataattttggtttaccacgttgcctatcatgcgttttcactagtaatattgatttcttagtagtactgaggacaagcatgttctgaaactgctttcatgaatgttgcgaaaggattaatattctagaaaccaacccggagaacaaagtaaataaactagaataaaaatagaataaaatgaacgagaaaagagataaatcatttaccttgaaatagaaagaaagagcatgtatctgtcagtgctgacatgcccatgtgcagcgcctcaggtgaggaatgcagacagctgaatggctttcattgggctagcggaaagttgcacattcgctcaaaatcgtagacatttgttttactgcaagaatttgaatggatccatcttgttgtcttgagcgagccagctggtagttgcatcacggcatattggactatggggctaaagctaagtgccatgagtatagctgtcctaggccactaactgcccaggcaacccacacactttcatccagcagtgcagcctagaccgcgaccttgatagggaggcagttgttaagcagtataaggccgttattgcctgccttctggtacttttcctgacatttcgatgcaagctcactgcatgcctagttttcagaacgccaagccatcattgctgcagtatgcaacaccacgctggtccctgtttgcctctttgccagaagacaatgggaagcaaggcctttaatccatgcctgctctgattgggagcaagttcctgagacgctgcttgaaacttcagcaagctgcgatcgctggctttcaacaggacgtcaaccgtcaccgacagatactgcagcgtcgggaacaagtggactgattgtaagactacctgcacgacctgtggcacgtctcctaccaggcgcgcaggtacctcccgatgaagccccgagcacgatcgaatggtgctggccattctccgtacggagggcaaaagcccgcttttgtgtccctaagctgggcttttgaaatcgatcgcgcaacgacgcgagacggcacattctaaaaattggcctcgttattggtgtcggacatggtcgacttctgcgacaacctgttgtgaaaatgcctagcgcccagtggctcacgttaatctgtttctggctaagctggtctcgagtcgtagctttggggccagctagcccattgaatgaagcgtgcgtgggcaagggctaggaggtggtttgacaacgatgtgaacgagggtcgccgctgggccaccgtcccaaataacgaccttctgcacaatcttctccgcaataccaatacattgaacgtgctgcagtctcagaattcttactgggtttggcctcttgccccctcaccagtctctacattatgtctcgcccacaggcaggacgtcttcggtagtccagcttgtagatggcaaagtcaacatagcctcggagaggtaattgtttctgttaacgcatactgcatgccccaggtcatgatggttttgggatcggcccggcagacgaatattgcattgcacggcatcggcacacgaaaggggcagtagcttctcgaggctgaacgccacggcctggatccagtcacacagctgccgattccaccagtaaggaaattgatgcaaggccaaagcaggcgcgaacaaattttatccgtcttcgagtctgcggcattggtgaagtggttaatacaaagctgcccgtgaaaggcgtcgagggtctacggttcgcgaatgcaagcaagcgtcatcaaacggttcctgacgtatagagccgtgtttgcccttacttaccaggtagctggttttcatttggagtatttctctcattaagatggcacaaatggaccaaagccccagaatcatacacagttggtccttgtgttggcaacaatacaaattgcttctttgccgtgagaaacagccaggtctagctgcgttacgagcagggtttcctgcattggcagtcatctattcacccggaccacgaaagagtaccggcgttgactagctgccttcctatcccaaaaaggtgcggatgtagacgccggtccaaggcttcgactttggtaacggtgcggacaagcacgccaatcctgatttagtctatgcaaggaaagtcatgcgtacactccatagccaccgcgtatgccgacgtactatgcagggtcaagacggacgaaccgggcctaagctgatccggaactgcccggatcagcgcagttcaaccgtgctgaaaatgccaggggccgcgattccaagagaggtctgattggtgggaatatagttactctatgcccgtgcatggattattccaggatttatagtcgcggtgctacctcttggttgtcataccgaaagcacgaagcgaactatgctctgcatctggccgggctggctctatcaacgatgaactcaattcagttggagttaaactcgaaagaaggtgaatatttatgtgctacaaatggctgaggagatgaagtaatgcattgagtgagaagatactctcaattcttttctgtcactcccagcttggatcccccaataccctctgcaaccaacctcacccagtacccgtctcccatttacgacccaccacttacagacactgcgagtaccatgagttcaccactgtgcaagcccaggggctagcgcagaccgtcggaccagtccagccattcccaccacactgctcccagtgctgcgcctgaccggtagccgtcgacgtcgccgagctagttgtactagtagcggtactcgtcgtcaccgttgttgttggccctgagcctccaccgttgccaaaggtacttccaataggaccaaacttgatgttcgagtacacgacatacgcctttcgatattgggccttggatttagacggaaacgcccgagttcgggggcacgtaccgcgcgcgatacctggttgagtcgggtcccgctacgtgggtaattcgagtccagcagagattgttggaatagtgtcgcccacagggacagtcaaggccatgcttgttccacgcgtgcccatcccgccttgccgcgtggcgagaaaacatgacctgcaaaagtcttggactgaaaaactcgggagggtaccgttaccggcggcgttcgataggttacgacctttggataaacgttgtttcgaggggcttgttctttgtttcagacagtcccttggaagctactgttatgaaccggcctaaagtttctcaagaggttagtgtataccggagtgccgtaaggtttagcccatatcatctggattggtcggctattgggaggatattatttatatacttttgatttacacggtggattgtttattcttcattagttcaaactgtcatagaatataattgttaaattatttttta

SEQ ID NO: 5529 - DNA, 4824 bp, Emericella nidulans
catacgtagcgccaatagcatggagatctcaataccgaaggactgatcttcaggtctccacctcaagcttaatcttctcctcaaaggcccgagtcacatcggcacccttgtcagtttccgtccacacgctgatcttgtcgataagtttcgtcgccagcatgtcgactcgctcttctcgcgccttttgtctctcgagttcgaaggcttggagtctttcggcctgttcacgtgtaagaccgcccttcttcttctcctttttcctgagctcgcgctcctcctctgttacaccggcggcctgcattcggatttcctcatcggacttatccatgatagcctgctgtcccaagcgaggccgaggagtgcttgtaccggaggcggcgggggacggcgaggctgcgctggctcttgagcccgcacctgaactggtggtttcacctacagacgtgccttcctgctcattgatgttcagcttctcttccgtcgacgcagctagatcttcttccgcctcttccgttgtgatttccatgcgagtcgtaaggtcttgcagcaaagatatttcgccgatcagatcgtaaaacgcgtctccaccaaagatcataccaaagaactcgttcgggtcctctgcgatttattagcgcgagtcgtaaaggagaatagtcctctgaccacgcaccgaaaccttggtccgggacagccccttccttgccgtgggtatcataacgcttgcgaagttcggcatcgctgaggacttgatatgcttctccgatctggtgacggaaataaatcagtaccatgtcgagggctgggctgttgacagcgtaccgcttgaaatcgctcatgcgcggtctcatcgccaggattcttgtctgcgaaattagttagaccgggttaacgccataatatcagccaagagatcacaccaggatgagtgacgacggcaagctttcgatatgccttcttgatttcaagttctgtggcagtgggcggcaccccaagggcgtcgtaatagctagtatcaacaaccattttgagaatgcggcaagaccgccagttgtgattccggctgacctctggactgcaagtggattggagtagagtttaggctaagaagaagcaccgagacgagattcctgttataggagaggcctgcttcaaaagaccgtactatggtttgggcgaggattattatttttttctgcctggtgaagcttccgaagggcctttcgtcatggcggggagaccaagaggaccagcggtaagagatgtcacggtttgttatagattacgccgagccccctattttctatggcataagggcacgtgtcaggggtaatgaagcgttccgggggccgatatgatccggctctccaaaggacactaaaattagggaaattttcttcttttctcttccaccactcaattccgcactcctttcctctcacctcatctcctctctcttctcctgatatacctgtcctttttcttccccctcggccgctgccgatttctccgaccctgcatcttattgcttttttcttcctgtgctctcatcaccttggccgtcttcattactctcctgcttgccaatcggtcaagagagccttatgtacattacttctctattgtgtactaatacgccaatttgctgctaattttgcctcctttggtgtttctcaaatcgcctcgcattcttattttctccccttcgtacagctcctacccttcaccttctcgtgtaatatatccagttaaacaccatgggcctcggcaacatcatttacttcgcttttcaccttcagaattgaggtcgatcaccaatggtatgttcagcttcccaatcgttcggttcaatggctgacaattcctcttggggttggttaggaaagtctggcataaccctgttcatgaacgtaacgagaagaacgagacggagacgcagaaggcctgcttcaagtttctggacctcacaagtcggagtttcagtgctgtgatcaaggaattacatccagagctgcttttgccggtctgtgttttctatttggcacttcgtgggcttgatacaatagaggatgatacctcaattccccttgaaaccaaggaacctctactgcgcaacttcaaagacttcctagagcaagatggttggacttttgatgggaaccgcccggaggagaaggaccgtgagctgctggttcagttccacaacgtcgttactgagttcaggaacatgaagcctgcctaccaagtcatcatcaaggatatcaccgacaagatgggtaacggtatggctgactacgcgcgcaaggctacctttgaagatgcgagtgtaaagactgtcgaggagtacgatctttactgctattacgtggctgggttagtgggtgaaggcttgactcgtctctttgtggaggcagagtttggcaaccctgctttgctgaagcgcacacgtcttcacaagtctatgggtcttttcctccaaaagacaaacatcattcgtgatatccgcgaagatgaggacgatggtcgacgattttggccaaagtccatctggtcgaagcacgtcgataattttgaagacctgtttaagcccgagaaccgggaggcggctctcaattgcaattctgagatggtcctaaacgcactggaacatgtcgaggactgtctcttctaccttgccggtctgcgcgagcagagtgttttcaacttctgcgctattccccaggccatggcaattgctacattggaactttgcttccgtaactacactatgtttgaacggaacatcaagataaccaagggtgatgcctgccagctcatgacagagagtacacaaaatctccgagttctgtgcgacgttttccggcgctatgtgcgacggatacacaagaagaacacacccaaggatcccaatttcctaaaaatcagtatcgtctgcggcaaggtctgtaccccgtcttctatatctgtaccgtcactcactggcacagattgagaaatttatcgagacaatcttcccttcgcaggatgctgatgcggccaagcgtcgggttgaaggcactctgtcggaggctgaggctgagaaggctcgacaggatgcggagacacgcaaagacgttttgtttatgatgggtcttatgggagtaatggctttgatagtcaccgctattatggtatatccgtcttcgtctctctttcacatggatactgacctttccagattgcagtggcgtgggctatgggcgcccggttcgaccttgcgtggaaagagataagagagggtaacttcagtccgaaaaaggcagtgcagcacggcgagctctgaccagtattacgattattttattactaattataccccttcactggtggcacgccacgatgccttatgataagtacgcagatataatattactaataccacctaccgcaacctgcccccgctgccagcgtccctcaaacaaactgtccaactagcacggatgtcaaattgcaatccagcctttctatgactgtggttgtgccgaagaagtgctgatatgaagtggatttatccgaccagtgacgtactagatgtgtgtcctgcagctacggctgagatggcatacatccattgaagatctggaacatcgttcacgtatttaacgttcgtatcatgactatactacttttcaaatgacttttctttatcctgttcttggataggcgcttgtcttcgtagaaagcgattggcaaggattacaaatcgctttgcttgccttacaagctttcctctacatagatcctggctttcgaaaatcaatctacctattccctgactcttatcgtcagctccaatttctgtcgttccgcacacatcactcaccagaaaataatttgatggaccaacaaagccagtcagaatctctaccgaatatggaacccctctctccagccgattttcgcatctacaaccgtctcgccgaacagatggaaaatatcgtatgtgatcaacatccaacaccatcgtaattcagactagattaacagagctcaacaacagcataacggcttccgcgccacctgggcagagttaaaaaccgcctgcgatccacctccatcccagtcccagttcccaacaccatccgcactggcagcaggaaacccggacagcacagactcagagataatcctcctgggcctctccttctgctccggcctctcaagccaccactccatcgaagaacgctacatcttcccgctcctcgcagaacggatgcccgagtttgcggctggcggtgttctaaccgagcaacatgaggttattcatgacgggcttacccgactaggtgcgtacttgaggagctgtgagcgaaaattagacgacgatgaggatggatggcggctagacaggggtgttctcaggaggttactagaaggggaggacggcaagtttgagagtgtgatttgggagcatttggatcaggaggtggagttgttgaggccggagagtttgaggaggatgtggggggttgaggatgttaggaggtttgcgatataggcagctaacagctaccagtcacatcggtggaggttcaagtaggactttttactacttagcagcctaatcagtcagcgcatgattaactccaactatcggcaaaagctcaagtagctgtgcagctggccctgtaggtataatgtgatctacggggagcgcgcgcactgtaccagtccacgggcaatcttgtactaaagaaattgcagacgcgcaggtaggtaccttgtaagcagatatcccgggttcctagtgcctggaagtcggtaacaaccatacgaatctgtcgt

SEQ ID NO: 5530 - DNA, 6087 bp, Emericella nidulans
attcacttcacgcgttgtaggtcatggttgacttgatataatttattgcaatacctgttatacaagtcagcttgttctctcctgaccatagcttgaaggagtggcaggctaatagctgtttccaggagggacttcttctggtcatcatgccaatccatgccacctgtattcagtagggctttgttgaaattgtccaggaactcgtccaggtccctgttgttctggcgcatggtattaatccgtacgagagctctttgttgtcggtctgcatccaagtatgctttatccatcgcctccataaggccttcatacgagattgttggtccgttggcttccatccatggcagcattcgtcggctagccttcccctccaggcgactaaagatgtagtaggcttttgcggagctgtcagggtaggaattcccatcaattgtaaactttgtacggaggtttatcttgaaggcaagatagttgtgggcgttttctccattaaatgttctcacgtctgggtgcatcggacgggggcgcatggttatggtaggggcaggtattgcggcaggggcagctggctgagcccgtaactgttggagctctgcattctgttcaataagttgtgtatgcaactggtatagttcttgccatagtgtggcattaatattctcttgtccttccatctcttatgtagtaggtcaccttactacttccaatccagtctgttccgttgagagtgaacaaaccctaatgtaaggggatgatatgcttgttctaagctatatcctgccgtatatacaagaagggtttgttaaggaagagaaaggtgtgtccagtgtgcgtgggtagaaatagggatcttgttaagcgagggcccgctagtacgaggcctcccattggccgagtcctgacaaaaagggttcttcgtacgaggaacccataacaataatagcctgtagtaaggagaatttgaatagacttgttaaacccaacccacgaaacccgccccaacccgccccgacccgccaagaaatgggttgggttagaccttctaattatccattgggttttggatatttttggctgccccaaagcccggcggacgaacccgctgggttgccaagatatctaaatacgtatattactgtatttagattacatttgcttacttagatagtttataatactgtatttaaatacagtattttatttagctatgtagatcactgcctatcaaagtaatgatatgcataattgggttattttgggttatttgggttgggttagaattatttgctaaatccatgggcggtttactgtgaaggtaacccaccccaaaacccgcatgggcggatcaggtaggcctgaaaacccgccccgacccgtggtttaacaagtctagtattaaggaaagatctgttgactagtatgcacaagaacatcctagccacatatttagtatattactataataacaggcagcaatcatgaacttataggtctcagcatcaagagttcagtaaatatgaccagcccttcaaaaattataacgctccctgctgtccctttccatgtattggaaagagagaggataattttttagcagctgttatgggatgctcccataacacgcaccgcgtagcgtacgcggctgtggtcacgtggctccccatccatctccaatctctgatctgtcctgtcccgctttctcttcttcagcgattccttcttgtacatacggcacgtttagataggaagatccgtctatatacgtcccttaacagcagcaaactaatttagctatctatttataattagcagcaagctggctagtgatattagatcaagttgtgcttgctttactgttaacatctttcacagtagaatccatagactggtagagatggcggcaaagacagcattggacatgttttgttgtttgccttgctgttcaaacacctgcattggagcattggttgatttcaaccagagggttaactcagatgccagggatataaattgagcatgtcacccatcaagccaggccctttctaactgtccattctattgtggctcacactcaactgaagtacatgcttctgatagatactacttattatggaaactgagtcttgtctgacagaccaggccatcttggccaagatcaatcagttaagagagctgaatgttggcttgattatccctctccctcaggtaattcaggaaaaccagttccttgcctacatgaaactatctaacatttataacagctcgttattgtcggagaccagtcatctggaaaaagctctgtccttgagaacttaaccagattttctttcccttgtggtgcgggcctttgcacttgctacacagcgcagattacatgccacaatgaaccccagaagagtgtcttcatatccattattcctcgttccgatacagacaaagcgctcaagttgcgcctgcttaagtttcagcgccgccttacggagattgataacaatgagcttgctaagatttttgatgaggtactttatgtgcatagctgtctagaggcagcattaactgaccttcattttaggctcaccgtgtgatggacatccgtatgagcacagatggctcagatactggcgtcggcgcgtttagccgggacattcttaagatcgaaatcagcggacccgaggttagcttccacctgctttatcactaaattaataacatctatggtagcaaaaccatctaacagttattgacgtccctggcatattccgtgtccctacagatggcaagcagatcttcatcttggcaggatgctcggttcggaacatctcctctcttcagctgtggtgaaacatctgtgccgtattggtgtcactggctttcatcattcgcttcctgacagagcgggacccccacccgtgcaggccctcggaaccacaagcctgcaggacactttggcgttgtgaaaccaatcctcttggttaaatatccacagctgaattcgaacgcaagatctctaacctagaaggcttgattaaacttgcaagagaacgtgtccaggcaagaatcctcccaactgggactagaaggtcattttaatcatgccctatcgtctgctgtgcctgcattgcacctatatagctagcctatccgacacagataccttggtccgtcccggcagtcccgcggccgccacataacctggtgacgcctagaacaccggaagccccaggtgggggccaaaagcatgtcagtgccaactttggagaggcgggccaagcccgcccggccgcagagaccgcgcctgggcggcgctagcaaacgtcctgcattagcttatatagtaaatttatgtcagggtgggtatcaatttggggcggcgtcaccgctctgagattccttctccatacgactgcaaatcaagagaataagcaagaagagacccttagaggtccttgggttcaaaaaaaagattaggaatgttcagatatgtagggtttttcatagtaaagggaataaactggattacttaaagaactgaagatactgttggcctgatatagaaggctctcagggacctttcagcttgcttttgccttccttattaggaaggaaacatgggaggcctaattgcagtggttaatggcggtgttacagccgcacgtggagcctggtggcactaattaaaggttctttcatcacagtcttgcatgctagcatgaatcttctatcaaggccatcatccccgacgcagggttgtgcatactcggtattactagaacgcgagtgagactcttagcagctgcgtcgagctcaatctttcattctacgggtaagactgagtcccatcactacaaatacaactgcgtgcgtcacaccttatctattttacctctagattatcacatgctcgaacttcgaccgataactccaatgattcccaatgcacccgcatcaagcacgggccgtcgacagcagaatgccatcgcctgcgaggaatgccgtgctcgaaaactgcgctgtgatatgggagagccgcagtgtaccacctgttccaacctaaacattccatgcatcgtcaacaccgctcgtcgcccgcggggtccaagaaaaggacatgttaagatcctcaaagctcgcatctgtgtgtgctcacccggtaacggataagtaaacagagcctctcactaatcctacgtgcccaacctagccacccttgaacgccaactgaacgagcacaccgaggcgcaaatggctaccaggaggaatgtggaaggaggcagcgtgacagcagcccagccagtcttggacgcagagcagtctttgaatttggaccttgacgacagatgtattgatggggacggtggtgtccagtgctcgctgaatttgtcagaggacaataccaacaactacatggaaggtcaggcctctggggctctcacgtggtcatcgtcagtcccgtccgtagatctcgacagtgagtggagcaaacacatcgagtcccttccggactccgcgtacttttcgtctacactgtcgctaccaggtgatactgtacccaactccacgtcggcatggcccatggaaattggcatgcagccagtagaactggacccttcctcaggcgttgggtatccgctcctcactggcccgcctcctgtgcagatgtctgccctggaacgtgcagatctgtaggttcctaaagcccccttcccgttagcttagacggttatgcagctgacggcttactatagagacgaccttttctttgagcgagtttacgtcttcgccccgatactcaaccagcaacggtattacgctcgctcggctcgcgagctggatacaggtgagcccttcgcatgcctgcaatatgccatgcggaccgtggcggcatcaatgtgtagtcgatttaagggagtcctgcccctcctttacgaacacgcacactgtattctgaatgcttgggagcagaagttaccagacgaggcagtccccattgagctggtgcaggcccgtctactgttagccatatatgagattctcaaaacaaatccgcggaaaggctggatcagcgccagtcgctgtttccatctcgttcatctcgtgaagctggacgaaatagataacccaaagtcctggaagacttctactctctcttgggtcgaggtagaggagcgacgaaggaccttctggactgcctacgcgctggatcgctatgctaattttgtcaatggtctcccaataattttgaacgatcacatggtaagtctctttttttttgttgagcaatagagctttctagctcatcatgaactaatatccaaaggttctcacctgtttacccgctccagaggcggcctttcgacgccagcaaggggtcaaaacggaattcctggccacagccatggatcgaataaacgacaaacagctatcatcctacgcgaaatccatcgttgtcgtcacaatcctggcgcgctgcctctcccaccacagccagtgcaaagtggaaggcatcatacatccatcatccgagcaatccctcgtccgccacaggacactcgacaccatcctctgtcaggaagttcgagtgtcaatgactgcggcctattctgacatggaatcatgtcatcccgagtacatctttaccaagatgctagcgcaagctgcttttctggtcctcttcaccgcgctggaatcagtgccacaccatgacttgtgcagggagtacgagaagaaggctttcaaggccgcggagacgatacatagcctggcgcaaggactgccacagctggggtgcttcagggtccgagtcgctttctctgtgctcattgagtatttctaaccttttgccaggtacaccctttcacgccgattgccttgtttatctgtgccgatttcttgcgctcgcacaagaagttgaatcggaataacgcagcgcaattcgacaccatctgtgctagtctgcggcacctggctccggtcaacaacctagcccaaatgcttgagtttgagctccagcgaaacaccgagactttttcacactgctcgggacatgtaacccgccgcctcacgtgagatagcgccatagccaacttt

SEQ ID NO: 5531 - DNA, 6092 bp, Emericella nidulans
aaaatatatagccattgaccgatcaagatcggttgccgcaacacagaaggcccatggatgtacatgacgcctgcaaactgagacagaaacaagatacagtagaagcgtagagtgagagtaaaatgaacgcagggctaagatagggaagatggtgacaaaagggaaatggataagatagtgagagaattaggctatgtgcaagtgtaaatagggcgtgaccattgcattgggaggataatgtactctttcggataagaagttcgattcggtgcataggtggaattacgatttggacgtgagatggtcgatggcctgttacggagaagggttagttagctcaggcaaggcggttaaagatcgaagggcaacataccttgtcaatattgtagtcgaactgttccagggctgcaagggaggcgtccctggggaagcccattcctgtaaggcgctggaggttgggatcatcctgtgtgtcagtctgaagggcccaaccaggttgcttcgagctgggggaagaggttgaaggggcagttgcgtttgtcgcctctgtgcctggtgatttcatattatccagcggtgcaaagagagcgtcccaatcgtgatcttcggatttcgcgttggggtttactgggccagaggacgcggaagcatgggcattctgatcgaagctgaagaaatcggagctcgcagttccagatgtgctggtaggagcggcagccttctcatgctgggaagctccggaatcaaacgagaaatcaaaatccatgttaggtttgccttcagactgagggaagtcgtcatcatcatcatcgtcatctgcctcctttgcgggcgcaaggttcaatcctgagaaggcggcctcgaaatcaggcgccttgcctccgtttggggcttgagcaggtggcgctgcttttgtcacgttattctgagcctctccgccgacaataggcgctccggttgtagtctctattgaatgaggagcgtctgggggaagagttgggtcggcccttccgggaagcaagccaccaaactctggaggaatgtttcctgaagcttgtttttcagcgtcttcatcatactttggaggactgggttgcgcttccgcagcaggaggaggcccagtcggggtacttgatgcccccggagccgggaaagcatcaagttgcgatggctcgatctgatctgatttcgagactgcatgactctgagggaagacaggcgtaaagttatcgtcaaaacccaactgtgtttcactatctgtgctatcatcgtcgtcatcatcaatctcacggataggcgggaactcagactctggcgctccttgggtatttgccgcgttaggtgccttcatggcagcaaaagcctcttcgaagtcattattttgctgtgatttagaccgctgatgagccggtccgccaaacagttcgtcaaagcttggatcctttgtgtcagctggtttctcctcactaccttgagacgtagtggttcccgaaggggtctcaaaggcgccaggcactgtgggaaatcgctccttggaatcctcagtctcatcgaatggagaggcagaagtggggcgagcgtcactgccctcggcttgagatggagttccgacgctagatgcttcttgggtaccgaatcgactaattggtggagaaaccttggtggaagtggtctcagagagcgttccagtcaatggaagagcattcggggtcatctgcctagatagagccggaggtggtggttccgagccgaacgcaccagccgaggatggaggaggagatattgaaggggttggaactccagagccggacggagaccttactgagtccgttcgagaatcggcacggaacgaagtcggaggaggaggagtcgcagccgttgctggagcagcgccgaaggaagggccaaagagattatcaaaagcacgttgctggtcgttcgaaatctgaggagaagtaacgttattgctctcactcgagccagtcatcgtgcgtttgaagaagggattagtttgctggctagttgtagaggtagccgggcttgccactctaggagggttgctgacaggggacacaaccccctcgggctccactgtttgctccttcgacaactcgccaagttcttcttgaatcttatccctttctccctctacggtagccagttgcttcttattaattgctgccaagcccttctgttgccgtgcctcggaacggatcttctccaatgcaggcttcaactgagccactgccgcattagcttcccggattttctccttcaggcttgcattttcctgttgatcagccgcaagatccgcagacacctggttgtactggttctgaagatcctgtctactgccgtcaatcaaagcgtactcctgctgcagtttggtcgtctcagctttcgaggttctcaggcgttcctccaactctttgaaatgcttgacctcctgttcgtacattgcgcgagcttgcgcaagacgagattcaaaatcacgtttttgctgagaggtctgggatagctcctgctcggtagcacttcgttttgtctggacgttttgcatctcattcgcaagggagccgatctgattggataagttggcaagctcggtagtttcttgcgtcaacttgttagattcttcaggatcattgtccccgagaaggtcatcggagggttgaggagatttagctgtggaaggaacggatgatgcaccagttgcctgcggctgcaggctttgtccgaacgttgatgtggggatgaaaggtttgaaggctgttgcgctgcccggtggagacgtttggcgggttggtgagctcggagttgcgaaaggtgaatttgagttgcccgtggactgtggaacttgagcaggaacaggagccggagccgagggtgcaggacctgttgcaaatggatcgagtccaaataggtcatctgcagcggtgtgaaccggagcaggagggtgggacgaagctgcaactggagcagggaccggcgctgcgtgcgtggaactgggtcggcgcatacttgggggtatcaaagcgggtggtaaagtctgcggtagggggcccttgttggtgaattgctggcgaatcaaatacatggcaacggcaaactcatccctcgttaactggccatcagcatcaatatccgcaagatcccaaatctgcgccaaggtctcctcgggtagctgcgccttcgtaaagaacgctacagcttgatcgccgcttataaccccagatttcgtcgtatcgacagtattgaagtagttgtcaaactggagtttctcctgcggagaaataagccagtcgccaccagtcgattgtgttgaaagaggggtcccaaactgttgcctattgatggggctttgggtccgttgaggtcctgtgaattgtttggggattgccggtacaggaggaacatcaagtccaggccttgggccactgaaggaagggcggctagcacctcgtcgagcagctgcttcgtacaaacccggtggcaggacttgaggaattcctctcataataccagatttaaacgaagttagcaagtgcatggcgatgatgaactccgtcgtatcgagtactccgcgttgtttggtgtccgccagattccatatccggcccaggatctcattcgggagtcttgcgcgttcgaagatctgtttcgcggtttcgcctggtggtagagttcacacgtcaacgtaaagcaggattcatggaaccagatctatgcttaccagatatagttccgcttctggtaacgtcagacttctcaaacaatgaaacgaacttgttaacatcctcggggttcagaggtgggactcgaatgggccccggggctggctgcggactgcttgcgccagcatcgcgcggagaaggcgcagcggcatcaactgtaatcccatcgaatttaggtaatggaccagctatagttcgtcagcaccacgccggaagtcacgggaacgtcccggaacgtagcaaatgaagcagttccagactgcaagaccacttacgttgtaatgccagttcatctgtgggtgcgcgaccagcctgagcgtgtcctatcagccgcatcacgatgccaaacccagagggagtcaaaagccccctgttctccttatccgctatttgccatatctagcgtcgcgaacgaatcaaaccattagacgaaatgcatcttgcgcactttacgatgctgggatttcgacataccaatccgagggtttccgggggaagcttggttttctcgaagaatgggacagcgatctcgcctgtaataacgccaaggtttgttgtatcggcagcttgaaagagctggtagaagactcgcttctcttcgggagtcaagttcaaattcggttgccgcgctattgagtgagcaggcgtccgtcagttccgttcgtaaacttatcgctacccaggcagtctcctgagagcttcaagggctccccgcaatacgagctggctctggttgtaaggacttacagttgtcagccatcatgaaagctcacaaggagcaagtccctccttaagccaacgttatgtatgtgcggaatggtatatggagcgggacagatgtcagttgacgagcatagatggtcgggccaggcgacagctatttcggagcggaatgtatggggttaatagtggtcgaagtaggaaagtgaattaatcaagcccacacgctaccgaagatggaaagggttagaaaagaaggatcccaacaggggtatcggagtagtagggagattattattagaattggggttcggttggagtgagtaaggcgccttgggtttggatttggggtgatgtcgttcgagggggccgcgttggctgggcggtcagtgccgcctttactcgacctcctgttcctgaggccggttgcggtctaaattccgatctacgaactgtaaagtctgcttgaaaacatattaagcatttacaaggcattatgaactgtgaatacctttcgtgataccgttatgcccattacattacatctcacagtactccttcgaagcttacgtattcaccaccactctccctagcaaggccagcagatttaatagtcaacgagaggtaaattttcgctgtttcgggaatattaaaaatatatcaacagaaaagccacaagtagtctgtactaagccaagttctcctatttgcatgtcgccagcgtatcacctagactaccctggctcccaatagaatcattaaagaagcattacacttagtactcaacttcctcaccctcctcctccagggagtcgctggcgacttcctcgtagtcgcgctccagggcagcaagatcctcacgggcctcagagaattcaccttcctccataccctcgccaacgtaccagtgaacgaaagcacgcttggagtacatgaggtcgaacttgtggtcgagagcggaccaggcctcggagatggcggtggtgttggaaagcatgcaactatgcacgaattagattcagatttctctttctcaaggggtaagacaggaacatacacagcacggttgaccttggcgaggtctccgttggggacctgctggggaggctggtagcagataccaatcttgaaaccagtggggcaccaatcgacgaactggatagtgcgcttggtcttaagggtagcgacggcagcgtgggtctccttggggacaacatcaccacggtacagcaagcaagtggccatgtacttgccgttgcgggggtcacacttgaccatctggttgttaggctcgaagcaagacatggtgatgtcctggacggagttggcttcgtgagaggctttgtcggcagagatgacaggagagtaggccaccagagggaagtggatacgggggtagggaacaaggttggtctggaattcgttcagatcaacgttgagggagccatcgaaacgcagagaagcggtgatggatgagacaacctgggcgatcaggcggttaaggttctcgtagctggggcgctcaatgccaaggttgcggcggcagatgtcgtagatagcctcattgtcaaccatgaagctgcagtcggagtgctcgagggtggtgtgggtggtgaggatagagttgtagggctcgac

SEQ ID NO: 5532 - DNA, 5615 bp, Emericella nidulans
agcggaacgggaacggccgggattttgatgagtgtcaatccttggtctccaagacgccgtcaagaacgtcgcaggagtccttctacgagcgtaacgcggaagtggatgacgatgggttctctgatgttactcccgactcacgtcagccagacatcaggggattggcaatgctccgtaagatcgagttctggcagcttttcctgaccatggcactgctttctggcattggtctgatgaccatcaagtacgttcccttctacccttatttggttcttggctaacatcttccagtaatattggcaatagtgtaagaagatttcccactgccctggatcctgtattgactacccataggccaaatcactctgggagcactatgatgatagtgcgtcgcctaaatttatccaggaacgacaggttatgcacgtttcgattctgtcctttggcaactttgctggccgtctttctagtggttagtatatagacaggactgtcacggcatgccaggctcacactcgctaggcattggatccgatattcttgtcaagaagttcaacatgtcacgattctggtgcctcttcatgtcttcggcggttttcaccctcacgcaactcgcaggcgcatcgatctggaacccaaaccagctggcaattgtgtcggcctttaccggcatcgcatacgggttccttttcggtgttttcccatccttgacggctcatactttcggcatcaatggtctctcgcagaacttcggcgtgatgaccatggcgccagtgctgagcggtaacatatttaacctgttttacgggatggtttacgaccatcattcaatcgtggatcgcaacggagaccgggactgtcctgacgggctctcgtgctaccaatccgcgtattacatgaccttcttttctggagtcggtggaatcattgtgtgcttatggagcatttggcgcgacgggcggcgtacacggacccatgctaagcttgagcatgatagacttgcctgacttgatcctccctcaacacgacgacagatataccgtgaaatactttgtcgttctgccagcttctgcactggctattgacttggcccgttgcagggtacccggcaacgtttaccatttccttggctatatcttctcgacatatagacttttgctcctatgacattcttcacatatacttcccttgttgtttcgcacgcactgtacatattcacattgccaacacaatcatggaggcatccaatatccgacataccagcacagacagccaaccgcctcttgggttcttgccctccccttccaaaaaaagagagaaaaaaaggaaaggaaatagatcaccttatcaaggttgataagcaacagattccgatacggggaatcgaaccccgagctgccgtgtgagagacggcgatgttaaccattacaccatatcggattatgtagtgggttgagaaaaaattggctatagggcaagaaaccttacgaagcgcgaatgtggcctagtcacatgaccgagttagggtatgtcggagcatgggttcctcccctgtccttggggtgcccggtctgcacagtcttagtcagcatctcattagtgtttagcctagcttccttgtgcatccgcacccctgaataccagactccttcatgcttctacaggttatgagccctttatgctgagagaattcagtttcttgctggatataaatatgcagaattgattctcgaagctctgagcaacatgctatctgtttctttaccccctccctgtccgaaggggggtagcatccttcaacgtggctttaacccctggattgggaccacgtaggcattttaatatgccgattaagagcctcacgaggcatcaaaaacaaccttggaaggccagtactgcttattatatagtatgtactaggcaaggatgtctccttactgttgaaatacaccatcacaacttttacttcctatgggaatattgagagctttctactatggaggcttatatattggctccaagccactcttctagcagccatgttgctgcaatttacaccttcttacctagagatagtgtgttttcccaggctctgggctgaggcctatcctgatcaaactcatgctaaggaagtcctttcttgttattattgctatacagaataacttccgatacccatgggataacctgacaagcccctgctattaccaaaggggagattttaacatgacattcactggtcttgtctatcaactaccattgttcgagcctccaaattcaaccagccaacgagccagaatcgaccgtgccgacgagccagaatcgaccgagcctacaagccagtattgccgtgccgtacgagcctgaatcaatgaagccaacgagccagaatcgaccgtgccgacgagccagtattgccgtgccgtacgagcctgaatcaatgcagccaacaaaccatgatatcatcacaagccagccagttctatattgcaagacccctacctttcgaccgagatacctgtaggaaggacacaagggatattatattatattggacatgggaaaagggatatagatcctttgagactatattaaggcctttacaaactatatgggatattcagcatgtacctagcttttcttttgatgcttccttgcgcctgcgcagcccgagggggggtgtcggagcatgggttcctcccctgtccttggggtgcccggtctgcacagtcttagtcagcatctcattagtgtttagcctagcttccttgtgcatccgcacccctgaataccagactccttcatgcttctacagggtatccacctcagccgcagcctcagccgcagccgcagcacgcatacccactatcctctttcatggctgatcttcgagtcattgggccgatgctgaacgtatcatacagtgcctaagaaacgcactgtgtagaccctcgatgcttgtagtagcttcatggctgctatgatgtttttttacgcgggtggggtcagttttcagccctgtctgacacccttggagtgataccgagctctgttgcacaacctgcagagtaggattacgatcactagtaagttctgagttcggcttcacacctcactgggtcgccgggagagttgtcgttgtagcttgagcctcacggcagtgagcgggccgaggggccggttttctagggaaagttgaccgagatcaaagacgaggctctaaggattagggcaaccacgattccgcttaaacggcattttgctggagactggagtcctgtcgaaacgcgccggcctttgggtttgttggctcctgatcctgcgctgaagtaaagcacacaaaccaaaactgccctaggcgcaccctaacctattaggctcactggcgcgggccggcagggtgcagccagcccccctcccctgagacggcatgttactgtgattcatgggtaacaacacataacacagcctacggatggtgctgcctatcactggctaagcgttctccgaggttgaaaggatgggactcatgtaggcgagtgcgacgatctcttgttagggttgggggccaaactagtcttcgagagaagtataagatggtatacggagtattcttttcttcaccgtcctctcttgactgtaaccactttactactatatcctgatcacaatggctttccggtcgcctctgttgactctgtttgcggctgccctcctgtttctgggcgtgtgcaccgctcgaagcatccctacgcggcgttcgccagtatctctttcctccttcgatcatgatctcgattcggtagagatctggacgcgtcgggtacatgattctggatctgattctgatgatgcatctacctcgagtacctcaactacttcaagctccacaaccaatagcaacaacgacaactctgaccacgacagcgatgccacctcatccagcagcaccagcgatacatgcctcaaggcaaagaacgtgactcgcattatccagaatgacgacggctacggctcttactactcctctggaatcggcaggtatgtcattgggctacaaccccttctggagttgtctctaggtgccttggacacttgttaactgcatctagcgaaaacagcaccgccggcggcacaactcctgatggttccggtacagcaccacgcttcgataacagcacgggtgcctttgtaacgcttgccgatgacaatgctgccaacgccgtcgacatcaaggaccagcattacctcagctaccttgccggcgcgcccgtccccttcaagtctggcgaccactcgcccaaaggcgtctcgcccaagaagctgaataacctgccctttacgaccgttgacgaaaacaatgtgaaagacggctcctgtgctgtcccaaacacctcctacgcctacgattaccagtccaaatacagcctcggttccgctggcaacgttcccgtttactgtctctgtgatccgtatgggttgtgcgggtgtgacgaccaccacgggaacagcagctttgtggatgccatgctggcgtatatgggcctgggagatgaagcgaagaatatctcgaggatctgcaccgtctcgttggacggcgctaccaccatccttgttgatggagggttgtcgaatgggtcgaccaaggcggatcctgatgctgatgaggtcctggctcgtgtgcctaggacgaaaagcaccaggtgcggtggaaatggtgggactggggcggctgtcgctgtttcagttaacagttggtcacttggggtgatctcgctggcggttgcttcactcgtctggctgtagaagggtttcagcctacaatgtatattaatagatatgtaatgatgaagtccacagcatgttctcatttttcgttcaacctccaaaagagtctagctagccacgggccgcctggtactcatttctatatctaactcatgatctacgctcagtgccagcccaggtccctcttctgcctttcacctcaagaaggctcagcgagccagctacttcaaagttcttcagacgcaagtatgtataggccctaacagtcgacaaaaatcaatttatgaactaccttcatctagtgaaacaaaatattattccgatacggggaatcgaaccccgagctgccgtgtgagagacggcgatgttaaccattacaccatatcggactgggtgttgaaactatgaataaattggctatatgaggctacaaaaatctttgatagtggagccgcaaatcacgtgacacaaatggctcccgcggctgctattacgtaagtgcagcggcacatgacgaaggcagactggctgatcggttgcatcacaggcatcactggctgtctccatctttaatctgcaaacaagcgacttcaaactacaagatacaaccctgttggaaaataacagagatataggtcgagatgggggctctattgtccctgccactgttggcgctgcccagtgctggaacggtatgttgtctaattagcttcgtgtctctgtctgttcctgtaccgtaggaacgtaggcaaggcactgactgacaagttctaggtgctgacggcggttggatcctgttgtggagctcaacatgttcggctgtatgt

SEQ ID NO: 5533 - DNA, 8371 bp, Emericella nidulans
aataattgccaacatagagcctcatcaactcctcaacagtaaggtcgagtgttgcaccgagcctcggtatttctatcagtcagtccgctactgtaggctcaatgcgtcgtcaagcccttcaagcgctccgttcttctcgtcgtgccccagcatggcgggtcgacggcaggacgccggcccattcgttcacaagcagtccgtctctcggtctccgatcctactccacgcccaagctttctgcttcccttcagtcctcgatgcatcttcgaactttctctgttgcagcagtctcggcagtagtagcatctggggcttggtacgcttaccaaggcgacggctcccagacaccagcagccgccggtacctcctcgcaaactcggtcgttcacgtcgactgcccacgccgaacagccttcggaaccgtcgcgccgtgctctcctggtggataacgatcaattctatacggcaacgctctctggagagcagccattgcagaaaaacactgacgattctgatcgccgacttctagagatgctgactcctgaacaagcgacgcagaaactgaggaagaacgaggaatcatatctggtgaaccgaggtaaaggggttgttcgatatgatgttgttcaggttccgagcaactcccctatcgaagatgaccatgcggagaagatagtcgaggtacctgcctccacgtctgcggcaaacgaaggccaatccagcagtgactggatgttttgggcggtatttgacggccattcgtgagtgtccatattactttcagacatgtactatcatcgctaaccttcggccatagtggctggacaacgtctgccaaattgcgcaacgtcctcatttcatacgtcgctcgcgagctcaacgctacatataagtccgcgtcttcggacccttcgctagtgctgccgtcatccgaagccgtggatgccgctattaaacagggatttgttcgtttagataacgatattgtccacggcagtgtcaaccaggtgttcaagtccaattcacgtcgcgccgcagccgaattgcttcgctcctgctctttccggctcctgcgctctcctcgcattttacgattcacaaactcgggatctgaaggtagcctgtgcaggagattcgcgcgccgttctcggccgtcgctcagaaaacggtaaatggacagcaacacccctttcagaagaccagacggtcggcaccccctctgaaatgaagcggctgcgcgaagaacacccagagagcccaacgttgtccgaaatggacgtatcctcggccaactcgagcctagtcggtctttcggagacgccttctacaaatggagtaaggaaacacaggaaaagatcaagcgccagttcttcggtcggacccctcatcccctcctaaagacccccccttatgtcaccgccgaacccatcatcacaacaaccaaggttgatcccagccaaggcgacttccttgtcctcgcaaccgacggtctttgggagatgctaagcaacgaagaagtcgtcggcttggttgggcagtggatcgaagagcaaaaagccgctgccggagccggtaccggcaataagagctgggtccggagtctcttcggctcccagccgacccagctacctgtagaagcaccgaaggaaaccagtaccgacggacaacgtcgaccgatacgtcagcagcagtacgacatctcaggtgccgctagtcgtttcgtcgttgaagataagaatgcggccactcatctcgtccgcaacgccatgggcggaaaggacaaggacatgctctgcgctttgctcactctcccaagcccttactctagacgatatcggtatgttttaccttcctttgcgctgagaaccccccagaagtactaatttacacctgctagtgacgatgtaaccgtcgaagtcattttctttggcgagagccccgacaatcgcacgatctccatcaacgaggaagccagtgcatcggaagataacatcaaagctaagctttaacctgttatataatacccgtcgcagttcgtcttactgcacctagttacttattctctatccttcttaaatcatcgtagacgattggatcgaaggcactttgatatgctctgggctggtcagtccaacaagtgaagtctcatgtatgactgttatcttcgctatgaaagatctatgtaagtaagctacattttttttttgtattttcctctggctgttccaacaaagaaagagtagagtctttctgcctggcagcctttactaggtgaggattatgttgagaagatatcacatgagtcacatcaaggtggggccacgtgaactgtcgtgccctgaatgatgaatttaatggcagtaccagcaaagactagttagctagtccttcttgtggtagtaatggctgtagtgcagccagtgagaaaatggttcctttaggttatattgcagaatgaaatgtattgatgaaataacaagaggttaagctttctcaggcatacttcagtgagggaaaggcaactgaatcgttcagttcgcattgcctgaggaacacagcgaacacactcagaaaggccctctctgaatgaagaggtaaaaaagtcctttttcccttctccttcttttctcattgtcttcaccctcccttcagtacaatgaaggactccccgtgcttctgcctatctttcaaacccgagtctctcgcttcgataccgcaaactttgcaaagatacttcttagctttgtttgttggctccgcgattggatcaaatatcgaccgaggcttggtgaggtccgagcaagagtgagcaattcgtgttatattctgcttgcttcgaaagaactaaagttcacttggaagtaagtataccacctcagcgttatcgacgttcaaggtactgccaccctggaaattgtaaccgaactaaccatactcccatagccgcaatgtcagtctcggagcgtcatgacgacttgaccggcgaggagcatgagagtgagaacggtgaatctctcgaagtgacatttcactacgcggactgttttgaacgggatgaagctggatatatgggcgtgaccctccgcagggatcgcggtggggacattatccctggatcagcgacaccattcttcagagccaacaacgagatgatcattcagagagccatttcagcagctgttgacgctactgaggacgaaagccgtcgttctcgtgtaccacctgaaagacctccacgctcacccttgccgatactatcttgggaccggttggtgagattggagagtaacgtcgaaagagagcgtgaggcagccgagatcgcctcaccacgagagctagatattgaacctgaccagtcaacttggccacgcaactgggacacacatcatgattatttcctctggacctgtcgggggactgtcgatgtcatcaccgaacatcttcaggccgtctttcgatttgaacctgccatcgatgaggccttcgttgccgcgagactttgtggagtaaacgcatataaacaactaacatttctccaaaagtacctccctggtgagatccactccttgcagcgggctgaggctcgtggcatcatgtatgaggcagacatctcgcatcctgatattcgcatgggatcgcaggactttgatttagagcagctagatgccggagatccaaaatacattgagcccgtccttccttgctgggcacctcccaactggggccgtgccgacgacgcattcgcagctttgtacttgggcgaggatccgattgtgtttcaacgtgaatatggctgggcttgcaccgagataccaaccattgaatttatcagcattcgaatggctcaaatcccacacttgaatcttaactggatggagttgcgggctgcgaaatcccgccatgatatccttgtcactacctgccagtcagtccccctcagggtaccagttcttctgacttatgtcttcatccgccttgcctcttgtttcccattgaggatgacaattttccgaatttccggctctccgtaaatagtcttttgtcgcttcaagcactcgggatttccagaattgtgggctagttctgtaacacagccttttgtccccgtttagaataagcaatgtggatctgcctccatggcttcaatgatggagtggggaacatgtatttttgaagaagatatgtttgtgccgtcgcgatattcgtgctcgtgatccagtaaatcataaccgctaccggcattccctgcatataacatgccagcccaacatttagagccatgcattggatgagcaaccgaaatagagtattcgacatctgcttccccatctctttgaggggcaagtcggcagcactcctcagtgtcggcaccttccatccgttgcggatgttgaccaacatagtgacggtcagtatagccggcagaatgcccgtcgagtcacttgctaacagatcagggaaccagagggctccctctgctgcgaacgatggctcaacggtaagacgaagagcggcggatccttgcgattccgaatcccccgatgaaaacagtgcaagcagggtctgagccaggcttttatcagcaccgctcatcgccctgaggctttccatgacagtaatccaaatcggcacctggaggatattggctggcctataccatcggactaggccccagcggcggcggagagcatcatactggcccttgacgtttttagtggtcatgattttggcctctctcgcaagtatcgggccattgggaccagtctgattctgtgctttcttctgataatgctgtcgccaagccataagtatcggggataaatcggattctttacgagcttggactttagtgaagatctgcaggggcaaggccacgcccattcgaatcaggaaagcagtcaaagggattgagagagcccatggcaaatggctggctgagtgtacgccatgaatgaaggacgatgctacttccagcgactcgtttataaatggagcctgtctcgtctggtggaagcggcggacatgctgcagaggcatcatccgggggagatgatgactcggcctcattctgagaagttttaagtctcttctttcaaattaagggcaactgcatgcagaacgaaagacaagaacagtagtctcacacagaggtaaacaacacaaaagagttctatggcagaaagattccgagctgtgccatctgatgcgatttatcacgtgggcggtgaccatgctatagttagaaataataccaactataccataccgtaccatacagggcttatcgatagcgaaaagaccagaaagcaaacatcagcatcattccactcatcaccgacaattatttatctagtagacagcttccactgccctcagctagtatgctcccaacaaaccgtttacaatgatgcttttccttcttaaatttctgatctctgtgatcgccctccttgccgcgtgcgtacttctaccccagtttcccctgggactgctccgtattgtgctccgcggcgtgggatgggttgatccggaagaggacacaagctcgcagggaggtcatcttgtctcgtgtccgggcagatgaagacgaactactctcaaaacagtccaaagtggcttgtaccagcacgacgtcagcggatgatgaggattgggaaaaggtcgactccagctcgggtgatagcagctccgggtcagctagtcagaatttccagcagtcagggacagacgagtggactgggatcataggcttcttccatcctttctggtatgtggtctctgctggtagtagctgagtatgtggcgcttactttttggaatatagcaacgccggaggcaagggagaacgtgtcctttgggaagctgtcagagctacgcaaagacgatggcccaaagctgtctgtgctatatacaccggcgatctgaatgtcacgaaagcagctatgctggaaagggtccaggtatgtccccggcggtattgtctatatccttttctgacatatataagacccgtttcaacattcgactgcacgcgccaacagtggagttgctctacttaacaacccggaaatatgtccagagcagcatgtatccctacatgacgcttctaggccagtccctcggctcactaattgtgggctacgacgccttcacgcttctcgtgcccgacgtctttgtcgacaccatgggctacgcattcgctgtggcattctgcaagcttctctttccctcagttccaacaggtgcctacgtgcactaccccaccatctccaccgacatgcttcagtctctcgacgacaaaactggcctgaagggcgtcaacgccggcgcgggaacaggacttaaaggcacccttaagcgcaagtactggctcgccttcgcccacctttacggctggattggcggccatattgacgtcgtcatgtgcaactcctcctggacatcagcacatatccgctctatttggggcccatcccgacacacgcccttcctatcatcgaaaaccctcaaatacaaagatcccgtcgtcgtctttccaccgaccgccgtctcagacatccaatccactattccagtgacacctgaaacagaaacaacccgcacccctacacttctctacatcgcccagtttcggccggaaaagaatcaccctctcatcctgcgttcctttgcccgctttcttgaacgccacaagaaaaccaaggactcttcgaccaaggactcttcgaccaagaaacaaaagccagagccccagctcatcctcatcgggaccgtccgcccctctagcccagatgaaacccatatctacaacctccgcctcctcgcgcacgaactccggatccgcaacaacaccaccttcctctgcgatgcctcctggcccacgatcctttcgcatcttggcacagcttccatcggcgtaaatgccatgtggaacgaacatttcggtatttgcgtcgtcgagtaccaagccgccggcttgattgccgttgtccatgactcgggcggtccacgcgaggatattgtgatcgatcttcctgaatccgagtctggtgctgattctcttgagagcaagggcacacgagcgacaggattccgggcgacgaccgaagaagagtttgcggatgcgtttgagaaggcactctcgctcagcaacgacgagaaggttgggatgcggttgagggcacggaagtctgcattgaggtttactgaagaggagttttcgaggaaatgggttggtgaaattgggaaattagttggcatgactcattaggaagtatatcaactccactctcgtgaggagaaaagcttcagaactaagccctagttagcactccaacctcctacctacagcaattgagcaggatccgctctgatactggagtgcttgatatttgctgatgtaatcaatcattgtaaagatcttgacgatagaagctgccaaatacagacaaaacgaaatttcaaactcagggtatcaaaatatcccttggaagtataggactaactaaaggcaaatcaactgaaacaaacgacaccatctcccaggggtatgaagttcatcgtaaacacgtgaataggcaagctgtagattggcctagtcggaatggaatgatatcgaaaaatgaagggtagattgtccaaggcaaaggcattttgaaatcctgtatccgcaacgccgaacctctatacaccagaaacagatccagatccagccataatagcgacagtggaataagaaattcccctactgaacagagaaataggtagcaaagggatgcaaaagatgtgctatttcccccagttcggatttgcgtagccagcttcacctggattgaccccaagcatctgcccttgggcatccacattgtagatattgccctgatcgctggcatagcccgtactcataccagagacactgatccccgattcatcgtcgtcgaaaccgaactctccgccggaactggcgtcgaaactatttcgaccgccaatatcgcttgtgtcatcagttccggctggtatttggtcccactgcaatgtttgcaaagctggatactgtgctagtagcgctgcaggtaggatgaagctgcccgtatgttgggcctccgttccctggccggggagcatgagtggttggttgaccggctgcagatgctgctgttgctggtttatgagcgtgcgttctcgctcttgagactcctcatccaatagaggcttgatgcagattcggccagcttctgatctgaagtggcgccccagggcatcggcacgagcaaatcggcggccgcagccccattgcccgcctcgcgagagatcaccccgacaaacaaacttcttctcacccgaatgcaggccttcgtggcgcttacggtcat

SEQ ID NO: 5534 - DNA, 4730 bp, Emericella nidulans
gtctcgccgtataatgaccctgggcctgggacgcggcctgggaatacggtgagcacggcggcggcgctggaggatgaagtttgggagttgctgggagagagggggtggggtgcttgatcatgaagccgcagcgaggcgaagcccacggagtcgcgaacgagcaccaataacatatgacattgaagacccttaaagtaattcgttcaatgcgtaaagtgccgcactggcgtcgtagataaggggcggcaaggctgagggaggattggaggagatcggatcccttgactaatatcgggttaagggcggcaatcaaaagacactgccaactcttgtcgtgtgtctcactttaacttcggcttcagacttctcctctccttctggacagatttaaaggctcctcctcatctcggctctttcagtcgtttaaggggctagtatgtcggccatcctcgccgttattttcagtactttcacttgaccttaccgtatcgctcttttgttctattcatccttatcagtcccggtcgccttcaaactccgcttcacgattatcaccgttttcacccaagatgatggacgttgaaactgcggtcggcgctgtgccctcagatggctacagatcgaattctataaggtacgaacccaggagcgtcctgtttctatacggccgttgacagagctaggcgcggagtcagagggaagcaaaatccggggtcgcacggacaagctagctggattagctgtgtgattaatttggtcaatacgagtgagtatctctcgattcagctaaatcggcttatggacttgatctaatatatactacgtcagtcgttggtgccggtgtcctcgccatgcccctcgccatctcacacatgggaatcgtcctcggcatatccgtgatactgtggtctggtgtaaccgcggggttcgggctctaccttcagtctcgatgcgcgcagtatcttgacaaaggaagcgcttcattctttgcgctgtcgcaaatcacctatcccaacgctgctgtgatatttgatgcggcgattgcgattaagtgtttcggtgtcggggtcagctacctcattatcatcggggacctgatgccgggagtggttcagggcttcgttggggaggcggcgtatgatttcttggtggatcgccatttttgggtgacggcgttcatgtatgactattggtcctaactggtggtatgcgttgctgaccggaccaggttgattattattccgctctcatatttacggcggctgacatccctcaaatatacaagtatcgcggctctggtttcaatggcctatttggtgattctggtcgtttaccatttcatcattggggacacaaaagagggccggggtccgatccgtgtcattcgctgggcaggtgctgttccgacactcagcagcttcccggtgatcgtattcgcttttacgtgccatcagaatgtgtgtctcctcttggctggtggaaattgacgtgctaacccgtgcagatgttttctatcctcaacgagattagcaacaacagccactttagaacgacagcagtcgtgctcgccagtattggaagctcagctaccacctatattctcgttgctattacgggttacctgtcatttggcaacagcgtgggcggaaatatcgttggcatgtaccgccaggcgtatgggctacaattggacgtgccgctattgtcatactcgtcatgttctcctaccctctccaatgccacccttgcagggcatcagtcgatgcagtcctgcattggagacccaaacgcttcacgcgttctcgaagcgaaggctcccctcaccgccaccctctacttgccgctggtccccgaggctctcgaacaccagaaccaatgagtgaccttcgattctctgtaatcacgacgtcgatcctcattctgagctacattgtcgcgatgagcgtctcctcactcgaagccgtccttgcctatgtcggcagtaccggaagcacaagcatcagctttatcctcccgggcatgttctactacaagatctcagctccagactcagcagcgcaccagcgtctcatgaaagaagacgatgaggctgaagacggttacatctccggtgcaagcgaggaagacggcattcaatctcgttcactcactgagagcgggattctgcgccgacacacgcgcaactggcgcagggctctactcagaaaactgagtctagggcttgccatctacggggtcattgtcatgattacctgtcttgtcacgaattccgtcttccttgcatctcattgatctcttggtatctttgcattctttcaccctcacctgggtcttttttctttttccacccattattcgaatattctttctcttcaactcactctactctcttttctttcctgtcttctttctttaccgcgtatatagatccttccttgctttgcgtgtcccttcaacattgcaatggcgttggcgttgggttggatgggaatgtccgtctattctgaattctgatatgattttgcattgccgctgtctctgggtgggtgcaaagctggagtttacgatgatagagcttgaattgattggaccctatcttcctgggctggccatcatacctatcctttagaactggtttcatgtgatcctgcagaagtaaatgtgaatgattctgcctagcagacaaactttcaaaggctggctgtgcacaagtctgcaaatccaagcctcttctagtcaaatcagccttcggcttataacccacaacattatcccaactccgacaagtaactagaagtgggtagataatgccaacacttgccccatcggtccgcatgacgtgctgctcatacatagccacccgggcaatgcgatcgtcacagggccgagtcaaccgcaaaagacagtgtgcaccacattatttcagagttccatggaagaagattatgcgtaacatgctggatgtgattcgtgcgtgtatagtattctattcttagttggatttttatactttgtgttgaactggatggcggatgtacaaactggcaaacccagccctgcttgagctggtatatatagtctagaggacaagaaccagatatcagcaacccgaagcaaacccacgctttttctaatctatttaacaaaaattttattcgttttcacttcagagagtgcaaaattgatctatgatccatttactctatctcaagtcttaagtcccaaccacgtcctacttcggctcgagaacagcattggtaccagataaacagggcctcaccaaacatagtcaatccatctgaccacaagatacagtctaagcattagagatgtgcttccgtgactcccgcaatagctctatctcggcctgggaagctccacagccgcattacggctacaacccaaactttagctacaccgaccacaagaagcagctgaagagaattcgcagaattaggtatggatatgggaacagttactcatatggaggcagttggggcggctttggtggtggcggaggtggtgtaattggtggtggtggagttggttgtgggggtgggggtggtggtggttgtggtggaggaggaggaggaggaggaggaggaggaggaggaggaggttgttagtggtaagggacttaaagtgaggtacggatggtgatggttgatgatgataagtactagtatgtatgtgtcacaacaattgtataacccacctgacctgacactaattgctacaaatgtatatgaccaatgtagaaacatacctacccttgaacccagaatgctccgaagcaccattgtctgcgcaggcgctcaaacagtatatgcaatgcaagtcaagtcaagtcaacccatgacgccaaataccaatgcgttgtcgtgagattaaaccacaaacccctccaatagatctttgtttttgctttgaaagtttcaataccccgttatggcgaccatgctcgccccatcctctctcgctcccactcgcgtttctctttctgataccgctcccagagagtctggctttgccagtataagtactgtacttcttgaagcgcgtggcttcgggcttgatggttgacggcggttgctacgatcccagcaacggccaacagaccaacaattattccgaaaatagctagccagctgtactcgtcaacacctgggggcaatgggatattgttggtcttgtaataccgggaaaggcctgatatggcaatatgttaatgaagacgctgcattagccaggccaggagactcacatgagaaacccctccagtcaaagtttcctgatgggtcgcagctacatcggaggtccatcctgagttgttcatcacgaggacaatgggtaaagggtatgtggtagtaggaaatctcgtcccagaagtgcagttgttctttcttgaggagcaagccagcggcaatcgaatggataggcgcgtcaccccatctttcatagtagaagccgcctgcccggtcgagaaagtcaaagtagtccaggtactccttggatctcaaccaatccaggctgccgatctcaaaattcgaccactttgcatatcagctatgaaacaagtcacaaggcaaagggagcatacgaagtggcatttgttgtaggttttgccattgtcatcgctcaggaaacgcaacgagttcccttcgacgatgtgctcagggtgatcatccatgaactgcttgaccgagcccggaagcgtcggaaatgtacct

SEQ ID NO: 5535 - DNA, 8930 bp, Emericella nidulans
taaataattattaaaataattaatataactagaagttctctaaactacctgttatttataatcaatatttgaatattatagattatcataaagttaattaagctattactgaatattttagaacggctataattaaacctagtatttttgaatatctaatctactagaaaggctataggccattaaataactaatatataaatataagaaatctgataactataaggagcttatagaaaaatataaaaataaaatatcaaattttcccaagaaggtatatgtaacgggtgtaggcagtatttatttcaactggctgtcctgtataaacaagtatcacaagcttaaagaaacaaaagatagaagcgcagatatctctcctccctttatcaacctttctgacttcccggacctgtatgccgacggatcccttttccaaagttatgaggacggatctcccttcctaagcttcgaggccgcaatttccgaagctgtacactggtgtttcagaaaccttatttagaaccaggttgagggcatggccgacaaccaagatccaggccatagcctgtgacaaatacaatatattagaaaaggcaatggaactcaacaagaaacccattgtacagcacgccatggctgctataatggtagggttttcagcatcagaatattcaatgctaaaggaaagctttattttagactctggcgccacagtatatatatgcaatgacaaaaccaggttcaaggagtttaagcaggagccagcagaatacctgcatgctggtaatgctgtagtaccaattaaaggtactggagttattgagatatcaccaaatcgctgaggaacttcaaatatgacaatatctctgcaggaaactgcctatgtgccaggttttcataccaacattatctctgcaagccgcatgaagcacgcaggctttatataggattttgcaggagatagggtggttaaaaacagccatgagatttgtcgacttgcgaaatatcaaggactctgagtggtggagcagaacagcaaaaatcaggtttctgcattggccactgagaatgctcatgcggttagaccaaagatgcctataaaacactccaacaaaccactaatgttagcaggtaatatagatatatggcataaacaatatggtcacctgagccatgaagccatccgacatctgccaaataccatcaacagtacccaaataaatgatgtcgaaccaaccaggagctgtgaaacatgccgatattcaagtgctctgcgtcagatatctcgaagctgggcgcttaaggggggtatgccgccgtccctcgccacgagccggggacaggcgttgatataaagccatgatctagagaattgaatctgaatagcttggtggtttcttttggatgggaggagaagaagaaagaaataatcaacgacggagactgaggaactgaaacgcccatctggctggtccaatcaacagcaccccgttctcgcacacaaactcgatttgatctgcctcaaaaggaaaaacacgccttaatgtgacagagaacttgttttgcataggtgtgcaaaaagaattggctgccatctggttagtatcaagcctggtttgcctatctctgcaaggctcagccttcatccccacctggcgcaacatattcagaactacttcgatgggtctaaaacgactaaatataccatttctagctttatttgcctgtggaagcttttcttgatcctgcttcgccagagcgggtcttgccaggtggtgtgcccaaagaccttggtggaatctatcggcgattgctccagcaggttgaagacaaagaacaactggcctccattcttcaatgggccgttctcgctgctcgacccatgacagtgaacgaactggcagtggcagcggatatcaaggcgtctgataccctgacgccagcagaaatcctgaacggcagactcgcatcttgtgggttgctggtgaaaatcgacgtaactatatataaagttactagaagaccaagctagagatactattaaatgttgtaaactgcaggatagtacatgaagtcctgttgttatttgtgttacccagatattaatattgattacaacacttagaaggctctctggagcggttatttggaaaaaaggacattaatactgtggattccgacaaaactccaggcaaaggcgagactagtggtaacccgtctctgcctatcgttcagaaggggcctcctgatcctcaacacctggttttgctttatacctaagtatgtgcatggttgtatggttgcggaaagacacaagtcttagacgtagctggccaaacccggccttctattccatccatacgactcttgtctcaccttcctgcgattgtctcctctcttccacccacttagagatgtaaaaagcgcggtcagaataccaaagccagcaaaggtactggctctgtgctatcttctagcagacctcaactcaaatcttccttccatgaagcagcataaggcaacccaattggtgacggagagcttgccgcgcacagtcaatacttaggactcgactcttccgctctgcggtagattgttgaccactatcgaattgtactggagaagccctaatggccaagaacaccgagcgcggtctgttagttagtatatcacggacaatcaacgggattgttattgccccgccctcacttccaacgtttaaaagccttcaaactatttgacggctcctatgagagcctaaatactgcctaaacagaggaaatctttatatgatgttcaaagaatctccagatgtcatagaattgacgacgcattgctaaatgatgcctttgcggcatcccactgtaccaggcacgtgatgatccgtaccctacctgcacccacctgctacaaccaaaacctgcagtatggtccactcctgctggcgaataagtatagcttgtctgtacttgatgatattcgcagccgagatgatcatagacccttctcggactcgagcgtgtagcggatgaagagctcatacgcaatctgtccgttactactgtttaagctggtccggattgtctaactaccgccttgggacttccagccttatagcgcacgcatttttctgaatgccacttagattagtaagagcagaaattcgttgattgcgtcgacccccactgttacaccggggtcagcaaaagcagacctacactgccactggtgtcgatgatctcatgagaagagattagccttgactgacttagaatagatataaccagcgtattctcatttatatcatggtggtgtgccgtaaatttgcaaggagataatatctacaatgaaaggcacctgttgatatcgcaagatgacgaggcttaattatggccattacatattgcctcgtcgactgctgttattgcacagattccaagtaccaacgtagtacccaggggtataaatcagtgcgtaacctgcttaagccgtttcccagtaggcgccctaggatcgaaggttggcctaattgcacgcctgcatcacgacttgcaacgtggacactgtaaatatgcgcaaatcatcaagattatcagagtaatgagacacaggcgctggttctcagaccatctatcaccctcttcacacgaatctggtcacgcccatgcaagataattgctcttaggaggattctcatttaccgcaacaccggatggagctggctcagctaggcgctccgctaatgcttctgagacatttttcgtagagatctgtcactggcagcaaggcatcaacacgtctgcaacacttggactgggagaagctttgtagtgggcacaaagtgcttcgtatgatcctgttcttatatttagcagtagtggaccgattgatcgcccgtctgacaggtttgacaggtcaagcttggcccataaactgcctcaagggctggcataccttagtcagccacatacgggattcggagcgggcattggtcgagttcgtgtaggagtcgcaatgaacatgcaggtggttaggcactattaggaaacgagcgatcgctggtacctcccttcccctccgcctcttctcggacttctcaatcagcagccatttcgaagccatcatgaagatcactacatcgtagaatgtctcaatcgaggacgttctgcttctttccatgtcctctcaccgaatgtgctcaaccaggatcagtatccaccgtgagattcggcggtggcgatgcggctagcttggtacgggttctccccgatgattccccctcctactgagaaaggcgagggaccggaagtcgccccgctgttgacgcttaaaggtaatttcccggcgcatcccatctaatcgaaaacggtttggtgcgctcgtatagctgcagctagcaatcacttgaccgtccgcgcctttttcagctccgcagagcagccctcaacttccttccagcaatcaccttttggggtgcagatatagagctcgacatgacagagacgccttcccagacaccctgggccctgaccaaggctcacatttttgccatactggacgaggatgtctaccgacccgataagaacttgggacttgcccccggacttatcccagcggaggtacgacgcgcggatttcacggaaagaggcccagccaacgacagagaaaaactgagcaccttgcaaaccagagcatggattgagcagtggtgcagagatgcatttgtccttgtcgaggcgaagcaggagaacgagaatctgaacacacattttgaacaactcgatgcgctgttctcgaccctgatgatctgcaacttccagctcgaaaggcataaaaaggacagggctaccgttgtggacagcgcttataccgtgctgcaacgcctcccacgacacccgcccgaactgacattcgaatatagtcggcgctcgagaagcaacaagacagaatcggtcggcaaccaatggccacctgaatacttttgtggttcctctgcagtaggaatagaggaagtggatgcgccacaggggtacaggtggacagatctgcgagttctttccagaccctgtaccaacgtcgtccgcactgctctctggctgtgcatgaataggacaaatgcaatcgcaatccacgaatacgcggacacaatagtcaagctccttgatacagtgaccgacctccaaaaagcctctacgacagaatctgacgcgcgagcatggttcgttctgactgctcttttctggtcagcttggcagcaaacagtgatgctacagctatgtttcgatgccacaattcgtctggactacgggtacgcatcggacgaaaactaccatatcatagcaagagagactccctcggtaatgccgccgcgcgagatagtggagagattgagaccgaagtatatgtgccaatgggcgtttgaattgctgcgcgcagacctgagctctgtcacccaggactttagggcacttttcgaagtatatgagcgtcaatttggtggtcgggaatcgcgatgtaacgtcattgacagtgggagggtatgtgatggcaaagcgcctgcaaactgtgagagattcctgtcaaacagggtggaggatcaatccgctcatgatttccaatgccctggctcttcctgcagcctcttgacctgggacgagcagtcatacatgagtatcaacggagcgagggcagtctgtctggagaccacggacgacaagcatattcgatatcgccccgtatccggcgaaaacatggcagtatcccatgtctggagccatggacagggcggacgaccagagacgggattcaacatctgccttcatcgcaggtataccgagcttgcaagatctcttggttgcacgtcatactggatggacagcccatgcataccaacggacgatgagctccgcgacgaagcaatcggccagatcaatgacaattttatcaatagcaagcttgtactacttgttgaccgcgacctcatggacatagacatcgagccgctgactttagccgcggaagaggcaatactagcaacccttgtggtgtgcgactggaacgtccgcgcgtggactctactagaaggcattcgcggccgagcgaacctgcatattctctgcaaggacaaccgcgtcatccccctaaagactgtcctcacggatatcctctcaaagagctgcctcagtcttgtttcgccctgcctagcggtccagcattacacaccgactagagacaaagttgacctggtcaagaccgagcaggcaacgtgcctcttgaaccaccgccacccaaccaaggatagagacatcataatcatctggagtctggtctgcggctcaaacaaagtggtcaagaccgcggaggcgttttggaggtccatggtgggcggacggcttgccacgggatttcttgtctcgagctcaccacggatcaaggggattcgcgggttgagctgggcgcctgaaaggccaaatctcgttcctcctgcgtcagcatcgtcgccaaaaggcgctgctagcacacacgccaaaggcagtctacagcaacagcagtacccggcgttcaatggggagaacagcgttgccggcaagatcacgccggacgggtttcgggctgagtggctggtttgcaagatccagcgccgcagagctcttcctggcgcgggcctcttctggctgcacggcgcctcagatgatgatgatgggtacttttatgtctacaataaaggcgctaacgataagatggatgtcaaaagtcttttctatttgcgttctgtggtcgcgccgttgtttaagcggtatcgttgggtttcactattgctgccgccgtggtcacaacgagggggcgagcacattgaccctccggtaaggccattcaagtatcagggcgagtgtgagggtcttgtgatggctattgttgcgagtaatgatgaggccgggtcggaatgggagtggcagggcgtccatgagtgggatgtcaagtttaaaatgcccgaatttcccattgctaacattttgattgtttagcgatgcctacccagtaatgaattcagtaccctacagtcctttagtcctgtagaaagccgccgtgtctctgactatatactgcaggtaatttagcaacagggtagacgcacaatactatttcactacaccaagagagtgtaaggtgtaaggcaactgctattccttgtaataaaaaggcctacgcacactagcttactacctcactggctagcacctgagcctacaaccctggccctttactacagtttgttagaccctcttgttatttcatgaaaccctaggattaattagtgaaccatccattattgaacagatcatgcctaggttggagctggtatcactttaattctctttatcagtagacctgactagtcagtaaagaagtgctacagttaacacagccagcgaataacaaaacctggagcaagtgaaaagaataaagaaagcagcatatttgtgcaagtggagagaacaggaagtatgacaagtgatactggtaagagtaaggatagaagcaggaaaggacatggctggcatgataggacgcacaactgaagagaatataaaggtttacagggggccaatttggttccaaccccagggtataaatgtctaggtaggagaacgactggggattctgggaataagcaataagttgaacgagggttagaaactcaaaaagcgtgatcctctgtaaaagctaagcccgtggccgagtacctaggcatcttgcacgcaatcattcagctgaaccagtgcactcaatggtttgtcgaggtgaagacggacctctacatctgtgggagatcccggctacgtcaccctggctcccatcaccaggcacggggttggggtccattgcatattcaacatgcttcgcggtccgcagtaaagcactctttagttgctatatttacctacctgtatgaataggcgcctctctgcttgaccaggggtctcccatgcaagcggccagaggctcgagtgtagatgggacggcaaccatgacggagcgtcgagattttctcccagctatacaagatcatatccatggagaaataggatagcatgttgaggttgtgatctgagcttgacttgacttgattcctttcggctcagaactgtagacagtttcatacctcagtcaaggccaaaccgtacagcgctatcatagtcgcgggagcctgggctcagcttcacaagctatttccacatgcttctgtgcccaacaatataactgttcagaaaattgtagatcgcgtgcagatatggttactccaagtaaagtcagactggctttcatagcccgaccactcttcgtgccaactgggcattgaaacctcggaaaaatatcattcagattcttacgtagccagttccaggcagagttcatagccggccgatggatctgtctcggaatcaatctgcaggagcctgatgctgtcgcattcgtagctgcgccaggagcaagttcggaggtaacctgtagcctggttccgctatattgtagctgtgtacctccagtcaagtcggcaggttgtgggggttgttgcctgggaggcaggaaggcatcttgattttgctccatctgccggtagaccgcgtagccgagggcgttggcgaccgaagaccagtcgagggtgacggagctgtaatcggacgcggcgcggttacgtcaccgggaaggcctgcaacgtagaagcggtaacatctggccggccttgatcagagggtgcacctgagccgttccatgacgcctgttgacccttcgtgtcaagtcgcgtcgggtcgaacacctagcgggttttgttaggcctgtgtgtctaacaggaagcacctgtatctgacttgtacatgtaagtttgcgaaactcggggccgaggaacttcttcaacattatgaata

SEQ ID NO: 5536 - DNA, 6282 bp, Emericella nidulans
  unsure (1)..(6282): unsure at all n locations
cgacaggcgcacatgttacccttttcacgcatggggcttcaccacccacccagcattttggtgtctcggcaacagacgagcccggcgcagtttatttacggcatcatcgcgaacggcatccacctgcacccgacctccatcgcatcgcatacaacgcccacccagacggtctcgtcctcgtcacggatgccatgaaactctgcggcctccctgatggcatctacgactggacaaacggcgagcgcatcgtcaagaccggcgcgcgcctgacccttgaaggctctgacaagatcgccggaagctccgctacgcttattgagtgcgtcaacaacttccgccgatggtccggcgcgtccacggcgcaggctttgaatgcggcctcggctgtgccggcacggcttcttgggcttcagggcgtcaaggggtcattggatagtggcgctgacgcagatctccttgttctcagtgatgaggatgatccttactctggaaagacgttaaaggtaaaccaagtctggaagcgggggacgaagatttatgattccagcaaagacactggtcagatttgaagcggcgttcctggctttctgtaattggcggtggcttgctttagaatgtgattctcgtcatgcattgaatagacattatatggttggtcaaattttataagataggatgcgcaagattgtgttgaatatagacgagtttgttatatattcctctttctgtctatacatacccatatcgggtggtatcctaaacaagcaaaatcgtcaatcataaatctcataacgcaataggctgagagttttgttccttcagagactattcttgcctctgctcaccaaaatccaactcctggcttttaaatacgttccaaatagcgcatatactggttacatagagaaatttacagcctgggctgctcgcgcttccagccagcttcctcggcaataagctcggcggcgcgctcgccgatggccaagacagtcagcatggggttgatggttggcatctcggggaagacaccggcatcggcgatgcggacgttcttcaggccccgaatcttcagcttgggatcgacaacggccatagggtcgcgggtcacatcacccatcttggttgtacagcagggtggtagacggtgtgagcaacgcgacggccatactcggagagttcctcgtcggtctgaaccttggggccgggggcgacctcgcgcttgatccagtccttgaagggagattgcttggcaatctctcgggcggccttgagaccgtggacgatggtggcggcatcatagccctcggggtcggtgaagtagcggaagtccaaggccggcttgacggtggggtcggaggaggtcaggtaaagacggccgcgggagcgaggacgggggatgttgggggtcatgcagaaggcatcgacaggagtgtcatagcccaagcgcgacgtgttgagacagaagggaatctggtagcagtgcatcataacgtcggcggcgctgccgtcggagccagcggcgttgggtgcctcgcggcggaggaagatacctgcgtcggagtccatagtggtctggttgggaggcacgggctggttgagctcccagatgatgatactctcagggtggtcaagcaggttctcgccaacaccaggaatgtccttcaccactgggatgccaagagaggccagctgctgcttggggcccagaccggagtgaagcagaaggcgaggggtatccacggcaccggcacagaggatggtctccttcttgggacggagagtgtgcttggcaccggactgcagggtgatatcaacaccggtgacggtatcgccgtcgacgttgacgcgagacacccacgcgttggtgaggatcgtcaggttgggacgcttctcgtcaccgcgcaggatagggtgggatgtaagcaacgctggcgctgctgcggcggccatcgtccgggttgtacgcaactgagaagaaaccaacaccctgngtcagctcaccgttggaacggatctccttgttgaagtcgtggatgatgggaatgttcagggcggtcgagcaggacctgatccagtccttgcacaggtggttgcggtgacggtcgtgaacggcctggacggtgttgcggaggctatcgagcacgcgcgtgaaggtctcgaacgaccaccccgtgcacccctggctttcccaccgcttgcagtcatactcaaacggacggaacgagatcagggtgttgtggctggagcagcctccaagcaccttggcgcgagagtgacggatatggctgttacctgcgagaaagtcagctagtgccttgaattcccgccgaataagtgttcttacccatcggctgctcaactgtggggtagtcgtagtccaactcgcctcccaacaagttgagccattccctaaggttgaggactcggtcatccatgtaatcgctgggaccggcctcaatcaagaggatcctcttgttaggaaggtactgagccagacggctggcaataacacagccggcagtaccacctccaacgatcacatagtcgtagctgttgacgtcgcttgcggggaactcggtagtggtggccattatgggaagaatcgctgataaagagaaagaaaaagagagacaaagagactcaagaggacaaaacagattggatagtggattgcgagcgaaggaacgtgaggagaagaatataaattctctgaaaccgtgaatttttttccccaccacgccctggatcctactgtaagaggcgccgagtccgacccgcctagtcggagattcccccccggtggatcctccgcctgccagaatcagcccatgaccagtgaccatcagctttccgtggttatcccgaccccaagaaagattccttccatgttctctctttgttcaggatggggcatcgccatccagtgttctctacgactcccttggacaactcctcctctcccaggtccaactgccgccttatcgttgaccgcccaggctacgtcatccgcgagtccacacaaggtccagcgctaaagaggcccacgattcgctagagcgaagctgcagcacaacgcacgctaaacagcggttatccgtcgtggtgctgaatctatgcccttttatggtctagcggaggccttatggtctcacctctggatggagtttcccttcgggtccgaactttgagacgcccagcaggctcgtaccgcataccagaatgagtaaaaatattactcaatggatccagcggcggccgaattcgactgtcatgccataattatctcgccggctgtcttatcttagacacaaattgcggtaggtatcgggtagatacgtgcaaggcaagttgcaggattgcgatacctttttttttctgtttttataacgttttatacttccagtagaagttgattggtttgcacagttctgcagtggcctctcggtggccattcgtggtcggccgagggaaaccgtcggggtttattggcggtgtggtgcagcgcgcatgcagtgggtgcgagtgggacccagatcttggagatgaccaactttttgggcagtctgcgtttctctcctcatttatcctttttatactcttccaccatactgttgccccattgttcttcaccgacaaaagaccacaatatagatatgactccttcgctccagcgccagctcttctacgacggcaaaccccagcacgcctcgtccggccggactttccagtccatcaaccccgccgacgccactctgctggctgaaatccccgtcgcttcacagtcagatatcgacgctgccattacagccgccgagcgcgcattcccttcatgggcgcaaacgccgcctattgcccgtgcgcgtattctccagaaggcggcggccttgctgcgcgaacgcaacgatgagatcgcccgcgtcgagactctagattccggcaaagcgtattcagaaacgagcaccgtcgacgtcgtcactggagctgatgtactggaatactatgcaaacctcgtgggcggtggcggactgaatggagagaccacgcagcttcgggaagaggcgtgggtgtattcgaagaaggctccgctaggggtctgcgtgggaattggcgcatggaactaccctattcagatgtaggctcccttctccccgttcagagagaactttttgaaggacaaacaataaccaaggctgactgactagcgcgctgtggaaatccgctccctgcctcgccgccggaaatactatggtctacaagcctagcgaattcacttcccttcacggtcaaaccctcgccgaaatctacaaggaagctggtcttccagacggcgttttcaacgttgtatacggtgccggcgatgtcggttcctatctcacctcgcacccgaccgtcgccaaggtctctttcaccggccaagtctctactggcatgaaggtctccggagccgcagccggaaatatgaaatatgtcacgatggagctcggtggaaagtcgcctcttcttattcttcctgatgcagatctcgagaacgcttgtgacggcgccatgatggccaatttctacagcacccgcccaggtctgcacaaaccgcacgcgggtttcattcccaagtctatgaagaaggactttgagtcccgtctcgttgagaaaatgcaatatatccggccaggtccgctgttcgatgagaacaccaacttcgggccccttagctcggccgtccaccaggagaaagtcaccgcttatattcgccacggcattgagcaggacaaggccacccttctttacggaggccttggcaagccttctctgccgaaagacctcgaagcaggcttctgggtccgtccgacgatcttcaccgattgcacggacgacatgcgtatcgtcaaggaggaaatttttgggcctgttatgtcaattctgacctacgactctgtggaagaagcagtcaagcgcgccaatacgacggagctgggtcttgccgccggtgtcttcacgaaggacctcaacctagcacaccgcattattgaccagctcgaggcaggtatcacctgggtgaacacatggggcgagagtcctgctgagatggccgtcggtggctggaagaagagcggtcttggcgtggaaaatggtcgtcgcggtattgaggcctgggttcggaataagagcacccttgtcgatatgggcaatgctgttgcgacggtctttgcgaagctgtagagtacgaagtgaattaagccagagtacgtcattaagaatatgcatcaatatagagcgtgcctatgacttacattgttttgtttgccgatctttatagaatgcgaaaagtcgtactacgcattatgaatctgtaagacgcaggacttggaccagagcataaaagtttgaaattatagacgcggacatatcaaggattgtgaaaatgaggcgtggggtttcaggagggtgaaaatcaagaattcaggtcgtttcaagggccgccgctccacaacgatcggccctggctgtctcaatgacatttgcttcagtcaatatgccgactatgcagccgcagctgcgatcgcaatgccacatttgattgtaccaccgtgctgcattgacatgcagacgttgacattcttcaggtttatctatcagggctgagattgattgaccagttccttgaaatgttgccagaaggccggctggggctttaaaaatgggtatcttgaactacttcgatagttcatttcactaacctcactaaccttactaaccatcgccaagtgtcaatttgcagacaacacgatgctgggaccagcccacgcctgccaatcgctcgccctggcgctcgccggttctctcggacagccatttgagactacgccgcccccagctgagcgcctctgccgcagccaatctgagcatgacagcaaatgagcgaacaggacgctgccccgatgccgagatgacaaaagaagcaaagcgttctcccaatcggcgactcgagagtcgactcgacgagacgttcgtgtcgaaaagaccgtaagcaaatctaatctggatccctgaagctccaaaagtcgacgaggcccacctgcaccggctacttgtatggccaatggacgaagactccgtatgatgtgacaatttgatcaacaggctggcactactagcaagatgaacccgatataaaacctctctcgtggtggatccgtggttctgcgtcgcaaaatccggcttgtccctggatccaaacgggccctttccgaactgtttatctcgccaatgctgcccttttttttc

SEQ ID NO: 5537 - DNA, 5559 bp, Emericella nidulans
aaggcaaggcaatagcatattagagcatggctgatcttcgtactttgctcgaacttggaatttcaatccgcctttctaacttgtattatcaggccagcaaagatatagggtatatacaccaagccaccggcatgttattatttagccaaatccataaagctagtatgcagtgattagaagacgtttctaactcccgctaaatgctgtctttgtgagtcacgcgttagttggtttcgtactggcacggggggttcctcccagaataaccagcccttcagttccatatcttcagatgccccattgccttgcctcatggggcattgcatctacccagacgcatccgctggacgttctacgcacaaggtgcgtccacggtgcgcccacggtgcgcccactacggaggcttgtaggtttaccctgcttagaccccttgttctccagcaagccaaacacctctgccgttagcggcgagctaaagttgcgcatgcgcctaaacgcgtgcccaagacgtgcgtaatgtcgcaagctccttgtaactccttcacacatggatcaacctggaagcaaatcgatcatgttcaagccttgacatcaccatcatccgccttctgtggagaagtcatcctcccttcggactctaatcccttctccgcctcccgcaccatggccccaagaaccgacctcttctccttctcaatgcccaacaattcttgcagtgtatcacaaagttccacattcccacacacacatggctccttcctcacccatcgatatgtgatactccatcgatcacccctcggtctcaacgaaccgtctggcatgtgatcattcttcttcttcgcaatcccatgcgtccaatacagtctggccggcccgctgaagcacatcatgctgcgcccctcaagatcaacatcaaccctctcttcacccgtcttgccatgccggaggcgcattaatacgggcgcgccaatagacagcgcataaagctggtcccacccgcgatgggaatcgacgtgcggcgggatccctgcgccgggcgggtaatattgcagacagacttgatccggcggtcggctttcggtcttcggaagtaatggaacaagccagtcaggaaaaggcttgtatggaatgtcaggatcgatgccaaaggtcttgtagtcgaacgtgtagccgtagtggacggagatgcgaccggggcgatcgggccaggttagctgggtgcgaaagagggtgatgagttgttcttcatgatcacgagtgatgaagtcggattggtagtagaggccatgtacaattggatgctctttgaaacctgggagagaggcttgggtgtccattgtgtgggtgtgagactgctgagggtgagaatgaggggctaaaaaaatgttggcaagatgcggggagaaaagcacaggcacaatactgattatataagcattttttgtacctttattgatactgtattatttcctgaggacgacctatgcaagccaagatcagtgtgcctggatgtcataggctgaacgcggtatgagaatgctgcaaaacttcatttatggacactcgtgataccaggctaagccgcaatatctcccaggaaatccttcaggtaatccatcttgcccactggcactcccttggccctcaggatatcatacgctgtcacaaggtggaaatagaagttcggcaccgcatagctattcgtatacgattctggtgtaaattcaaactccctggggcccaagggagccttgaacgtcttgccctcattggccgcgatggtttgggcatcggccttctcgagcacggcaagagcctcgtcaatgcgcttatagaagtcatcaaaggtcttgtcggtgtcgctttgagctggtggctccacaaatgtcgcgcgagaaacgagcttgacggctgtgttggtggcgatgaagacctggaatgagaggggcttcatgtcggcgatcagggacgcattgaccaagtcctcgagcgggatattgtttgcttttgcgtgctcctcgccttttttgagaatggcggctcacgccttgaggccctgaatgaagggagtgatggcgtaggtgtgaatggtggacattgtcgggaagtatagattttggaggagttcgttgtgattgcgcaattgattactatgattggtaccagactgagggggaggcgaacaatgcagtttatatagaaatgcagtttgctctgggaatcaatggcttccttttttttggtacgcattattaatcaattctcttctgctatttctacgagcttcgaattcgatcacaaatcaatgatttgtcttgatttgtcatacccatcggttaagttactatttatgcgggagaaaaagcggtaaggatcaacgacagctgtatatactccggactccaaatatagaggactaatcatctgcaggcaataataataaaaggacatcgactggacaagaatccccacggcccttgcgtgatctggggtagggagcgtggatcctcgagcagacccaaccacaagaagtacagacgccaggtcactcccagctgcagagaagactagggaaccacaaagaaatcgccccaagcatctgcaaccgcctgcgcaactgcatcctggatgaccagacctggatgatagtcattgaaccaaagacaggtgacgccgtcttcgttccagcagtccgccgcctcgccgccagcgtcgagtatctcattgaacacgggctgagtgtcgatgactttgacgactgcatcggaatgagcagctgcaaaggcagctgctttttcggtaaattgggtattccagctcgcgatcgcagccttgagatgtgtcaccgtgtagtctgcgttttcgccctgggtgatgtacggggaccggtccgtggctggtatgatcagcgggcttctttcgttggtttcttgcacccagttacttacgtggaacagtcagaagggcaaacttgcgagcgccaccggcgtagatgagctcgatctgctggaagagctgggtgaggatctcagtcgcgagggcatccgggtttgtctggtaccatgaccctcctacatcgttgacgcccctggtatgcctagtcagccccggtgcacactgtcgcgttgaggagcatacttactgccagatggcgaaaagggtattgtttgtactccacggcgcaaaattgggtggtggcacgagatactcgttgaactcggcgacctggtcgatcaacgagtaaacctcaggcgtatacggcgcaactagagaggcattgactgtggccccgccataggcgaaattatagtttaggagcagcgagttgttgtatgttccgacgaggtcgccaatccagttcgcgccgccggctgaggtccagcctgggaacggggggttcccgagtgggttggaggcggagggcttctcgccggtaatgttgaagctggtagaagtgtacgaatcgccaaaactgatcaggtatttcgtcgccgattgtctcgctgggtacctgttgtgttgaggggggatcgctagggccgttgaggccgaggcaaggagggctagagggagggttttcatggtcacgctgtggcgcgctcagtatgtagcaagaggcactctcggggccaaggaagagagcttctgcgttttatatcctatgttttattcacccatctgcctgtgcagaacatcatctgccttcctgtcaaggaccagagtccctgtcagagaataatggctccgtgccgagtggggaattcctgaagaactcgacaaacagatgtcgacacattctcaggaagggattgagagtactccgaagtagtcaaaatccatatacttgagacgccccttgtttgaagacggggcactctccgtttcttggccgcgacgaaacagggctggagccgtgcggggtgtaatttaggtctgactagctacgggccctcctgaaaaatagcccgatctgacgcatttgcagccgatgtgaagaattttggcaggggtgtgccactagttcggtgacgttgatagaactccttgtctaggatagagttctgacaggacatgcgggaaagttttgaaaacgacaactagaacaatactaaataaatgaaaaaaaaaaaaaaagcacaaaagcttagtattgataacttcgatgaagcaagtatattcaatcgaagtcgaacttctcatgcttagctacgttcaatcataaataaaagacgagtgccttgcgactaaaacggcgacatactcttacctgccgtgcatattcgtgcgcgtattgccgtaggtagaagctagatttacctaaacaaaagtctgtcactcgaacctattatacggatttgcgaggatatgccccttgaagtcgcccaaagcagttgtatgtgcccacggtttcaactccacctcctcggccaccgtagcagcaaaacacgagctccatttgagccgcgggtaatgctcaacaacatctttgacggtatcgtcatggaccaagcttgcatggccgccgacgttgtctacaatccgtcagcaggtccacctgtcatgtaagggagcggacgtaccaaagatggtcgccagttgcaccaactggccgagcgcagtaatacttccaacatccctcaagtcttgatgccgaatgatggcctcggctatactctctgcctggtcttttgatgcgatcgcatcgcccgcatcatactgcgtctggagcacatcgagcgcgaggtacccaccatagaactcaaagctcagtttggtggcatgcagattctggcgcgtcgtcccaatatcatgcagcatgcacgctaagaaataagtctcatcactaaaagaccaatcgggaaaggcgtagcgctttatggcgagcccgtagtggtagacgcggaggctgtggtggtatgtgggctgagggaggcgagtgcgggcgcactcttggatccggcggcagagaggagtgtcaggtataggagtctctgaaacagggactgcgattggataggatttggccttgagatctacctcgctgaatagcgtgttggtgttcgcagggacggaggcgaagccatgttttgcgattgagttcgacatcttcacggtcagatactacctacccgtcaatttctaacatatagcaaagcgaaataataaagagcgggtatagtggtgcaggggaaaataggatgcttttatagacttaaaacgctacccctctcgtcagctgtatgggcacgatccagccatgcttcctcattactaattcgtcctctttcagcacgaattcgcataagcagccagacttttgtttcgcagagagagagttattataaatcaagccccagcttcgaatgcttgttcgcactgttcactggtggtggatatgtctgatgtgtcatactagcctattgaggctgaataggctattataaccagccgccatgccccacgatattactttcattaagcttatttagtttgctcagtttgaatgatgataccctaccgtgaatcaagattgttcttttagctttaaccttttggcaa

SEQ ID NO: 5538 - DNA, 3754 bp, Emericella nidulans
gtgtgccacggcttgtgaaaatagtacgggcatggccatattctcgatccaataggcaccacgcagcgaacgcgaatctatataatcacccgggtgtacggacgaataccatgttatgccactgatggcatcctttacactgatattacattcctctaacgcgtccaggtaaggcctgcagcagggctccatgtggtgagaatggtaggctgtgtcaacttgcaggatacggcagaatttattttcatcttttaactttttctccagtgactgtatagcattggcgtcaccagagaaagtcacgctaaaaggcgcattctccgcagcaactgtgattgtacctttagacttggcgcagatgtctgcagcttcttgcgcagatacaccagcagcgagcattgcacctggttgactgtttctcccacccgcccttgacgccataaatcctcgcaagtacgcaatacggattgcgtctgtggcagtgaggtatcctgctgcataggcagcagcaatctcgcccgaggagtgaccgattactgaggtgaaagagacccctatcgccctcagaaagttgacaatgatgatctggagcgcagtacaaagtggctgggatagggtggcacttttcatcttggacaccgagttggacaattcaccagtcaaggaaaaggatggccgatacttggtcgggaggtcattcagagagttttgcatttcttcaagccaggcgcgggcgactggagaagccccgactagctcccatcccatctgtgtccactgggcaccttgtccagtgaagactcccaatatccgtggcgtgtcagagcaccggcggctgttggttgtcttcgttcttttgccaatggcctcggcctcctcttccatcttgccaatcagttcctcggtgctagaagcccagagactaacgcggaactttagagctgagcggcgccggagaagagttaccgcaaagtcgacgaggttcagagcgggtttgccctttaaatatccagcataggaatttagaactgctgcaagtgagccctccgatgccgccgagaagacaaatggaagcaaggctgctgtcagcgactgtccggctgcaacagtgctaccgctctctttcacattggcatcgtaactctcaagaatagcatgggcgtttgtaccgccaaatccaaaagaattgactgatactcgccttggagcgccagtggggagagaaggccagggtgtaagttcagtgacgactttgaggtgcgaggcaaacggctccagagctgggtttagcgtctcaaaaagaagattgggggaaatcagtccatgctgcaaattcagtgacgccttgataatacctgccaacccagcggtaccttctgtgtggccgacaacagttttgactgaaccaaccaggaggatatcgttgtcatcagcaaaggccccgttagcggccccgttcacgctcacatcacacccattgtagacgccatttttttccgggctagcaggaggcccgaagaatgcatggtgaatggcagccgcctcctgaggatcaccagccagtgtacctgttccgtgggcttcgaaatattggcaacgatcctgcactcgccgtggatctaatcctgcgcgtgcgtacgtgctttgaatcagctgcagctgggagacgctagacggcatggtcaaccccattgttcgtccatccatggttggtgcccgttgccctaataacacactcaatgtcatccccgtccctgatcgcatcacttaatcgtttcagaacaattgatatgaccccctccccgcgcgcgtaaccatccgcgttggcatcccacatgcggcttgcctgtcggtgaaagcatctggatctttgtggtagagataaagatatttggtgcctggatgagattggtacctgttgccaaggctagcgtacattcgttctgttgcagcgcagtcactgcatggtgcagcgccaccatgcttgatgagcaagcagtatcaacgacaacagagggcccgtgccagtcaaagaaatatgagatacgatttgcaataatgctccgtgcggctccagtggccagatattgcgggagagatttatagtcggctgactgcagctcaccccagtcgttgttcatcacgccgcagaaaatgcccgtggacgaaccttgaagagcatccagacggagccccgcggattcgagagactcatatactgtctcaaggagctgtctttgctgtgggtcaatactctctgcttcagtggcggagatgttgaagaacggcgcgtcgaatggtcgggggtcatccgaaatatagtacgcttctttgctattggtcgtgcctggatagcccggatcctcgtggtagaatgcgttgatatcgaaccgatcgccaggagtttccgatgccacgacccgcgggttcttgagcaaggtccacaggcgcgaaggcgaagaggagccgccggggagtcgacatccagtgccgatgatagcaatcggttccactactgtattatcgtatgccattgcggtgggccgatatttgcagtcaggattctgctcaatgtgtctttgtccgtcaggagcgctcagtgagggtagccttctatcggtctgacatagtcatggaactacccacatttatcatccatttagtgcttgactatcttgcacacactagttcaggccaacagctaggaccagtagatactgcagctcatatttgccatgtgatggtaggtttgtcacggaccttaggccgacgaggtgtgacgtggatatttcgggccaattaatggcataagcccaagatcaaagatatagccgctgatctggattgtcgagacaagagatttctcttctcgtctccgtcatctccgtcacatggaccgtcaattgtacgtgctatagtgtcacatttgtaggacgactggtatgctggagtgaattctgatccaactgcgaggccaagcaaacgtactgcagcggacgttggactgcgagaatgactggtaagacggatgttttatggcattgcttgctctatcacatccaaattatgttcaaaagctttaaactttaaatgcaaagatatggatgaggtgcattcacgactggcatgcacttgggacattccctacgatcgaaacagcggaatccagaagagtatcgactgtctaatgcaccctcctttttccagtgagactcttggcaaatatacgccattgtggagtattgctttactagttgtgatattccctccaacttccaggtcctgaagcaattcagttgcgacagacgacgctcatcttactcaaaatgtctcaccaatctacaatcaacttcatcaggttcacgttcgtcatactatcccttcttgcaatctacacaatcttgattcccagtatcagaaagggctttttccaacatattactgagtgcgaggttaccgggaagctgtccaggtcatcaggtgccgatgccaggatgatagagagcttcaccggtgtgccggtcctggatatattcgtcaaagcacttgttaccagtttctggccagtcatcaatggtgaaaacccggcattgtctcttctaggggtcccggctgttgctcgatgggtgtctcgtatcttctgcttttgctggaacaaggagaacgaggtcgttgctcagcgtaacatggcggtgcgtatcagcccttagacccttatgtgagtgcaattatacgatcactgactattgcaggc

SEQ ID NO: 5539 - DNA, 5916 bp, Emericella nidulans
atgccagccagtacgagaactaccaggaagagtcagaaccctacgccaggccggcgaggatccgtaagttccaagtcccatatatggctataccctcgttaacacgttatacagccacggtcacctgttccccgatttctagaccctctaacgagtgatgatgaaatgaaattcacactagagacggctctgactagaactcaaattctactctataatgaagacgtgtggaatggtctgctgagcgcaagttggcgtaatgataatcaaggtcaattgtgccgcctgttggtttgataatcgctggtcgaataagaattcaagtgtttgaaagatgagtcttgccgggccttaccctggccttgaagtctgcatcaaaagcgtttcacgcgttgagttgtcccttttactcatgtgagggccacttactcatggttggggagcgaggttggtgtccgttatctttgtgtcagatgcttggttaggttgttgatgtggctcatatatttctctatatttctgcttcgcgggcaggtgggtatgtctacgttgtttggcttgaaactcaaaacacttctcacattaccgaccaccgcattaccgctgggttggacaggtgctgttcggtttgactttcaccaattttctggatattttcgcagatagccggtgctattttttgattcttgcctgtggaggtctgtacaatcttatgtaaatacttcacaattgtcttctcatgaagactaaaccgagaactgcctgccttagacaagttgtatactatacaacagtagcccccaaagtccaaaaacatagcacctcaacgcatgcaagttcagacatcagccccaactcaagtaaacctagtactttatacattccctccattcatattgtacatgttatgatcttctccgagagttcccatccggtatgtcatcaaccacctaatcaaccgcctcgcgtcacaagttcacagctccgtagccatcgcattcgccgcgacagtctgcgtagtcgcgcgagcaatatacgccttgctggcggcgttccagaactggatgtacttctccatacagctagacaggcaagtcgattcgctggcggacaatgaggagccgggggctgtgatacagttctcgaagcagttctggttaactttctgtattgaagttagccagtgcaccaaactcgaaaataacctaacggagatcaagaaaaaaaaaggcaatgaaaaggatagagagtgcgagcgtacgctgatgagtttcttagcattggccatagccatctcctgttggagctgtgcgatgaggttggctttggtttgctggacgtcctcggcggagttggcgggcgccgcagcggcgggggcagaagagccaaaaagagccatttttagttgtgtagtctatgtcggttccgaagtgaaaaggtgaaaaaggaattgtatgcctgaagctgtgattgttcagacgtttggctacgacaggatctgaagtaggccgatatggtatcggaaaaagctgtggcggtgccaaggctgagtgaggctaaggcggagcttggaatgatgcatcagccactggtcgaagtggacacctaactcctcaggctgtggagggatgtgtgaactcgaagcttgggtgtgtttgtcgctgtctctgatctgtccagttctcgttctctctggtgccgaaccgccaacacttgctcctgaaagctattcaattctcctgtcattgttcgtcaactgacgcgctattcctttctttaacttgattcttatctcttcccttcccgagtacttgtaaccgaacctcgatctagtactactccgcagttgatcgctaggtgccaggtggaagtatactctgctatattgaccacgcacccacgcaacagtgcatttaatgtcccggcgacattgattgagcgctctctacccaaaactagtctattgttactcttccattatcacgcccacgatcgtttgcgaattgcgattagtttacgaatacaatgttgttgccgaggttctcgacactcttgtgccttgctggcctgacggccgtgcctgcagtcaatgcctacgacggcgatgagaacgtcaagagcattccggtgtgtatatattgcctctaatgtcttactggtagctaattgctgttgtacagctaagaactcatagcctctccgccgtgcgtctacttacctgctaccgccccgctatgcaccatgcttgatactgactcgcggcatagccatacttggactcagacttccaaagccgctggttcgattttggtggtgatacggtcattcgtgccgacaagtacgtcccgcctctattcacttggccatctagcttgatctgttggctcggaagagttcggtgctaagacaactacctagatacatccgtctcacatcagaccggccgtcgcaacaaggatggatcttttctcgcgttcctttgaccgcgactaactgggaggtgagcatgttctacaatcatgctacagtgaccgagactaaacatgggggtagatcgaatttgaattccagatccatggagagggaaacctgcacggcgatggcttcgccatgtggctcaccaagcagcgcgcgacacaagaccccgtctttggctcgacggataactttgagggtctgggaattttcttcgacacatacaagaacaaccgccctggcacatccttcccgtacgtcatggccatgatgggcgacggcaaaaccagctacgaccaagcacacgatggcaaggccaatgaattggctggatgttccgtatgtcacctacgtgctaaatcctattctcctactcttaaagctaacaattgcaggcccgcggtcttcgcaccacctccgtccccacaaaagcccgcctaacgtatttccaagacaagtcgctaaccctggacctgcaatacaaatccgaaggcacctggaccaactgcttcactctcacaagccccgagacgaacatcgccattccctccgtcgcgtaccttggtttttccgccgagaccggcgagctcagcgacaaccagcacatcatatccgtcaaggcccagaatctatacaatgtcgctgcatctaagggcactggcggtagtggaccccctcgcagcgccgaccggccctaccgcaagcccaagaaacagtccggtagctggtcgtggttcctgtttaaggtgttcttcttctttgcggctgtggggggtgggtatgttgcatggaccgcctaccggtccaggacaaggtattctcggttttagacgaacgcgtcgtcgatttctgtggtctcatgagaagtggtccgatgtctgaaagtgaaatggttaaaataaaaacattatctgttattctgtatctgcttgcctgactcgattcttcatctcatttactttgcatagccatgatatgatgtacttgtatcttactgcgggttctacatgccatcgtgaaataactgccgcgtttttatctgtcaaaaaactctgtataaatgctaaactctaatgcaatctagggtatcattcctattaacgcccaataccatgccaatgcagcaatcctcttaggtcggtccgtgtagatgccagttacttcttaagctcgttccacatgtggtcaataatctgaaagacctccgtaacgctccgcataacgggctcatcaattcccattgcaccatacctatgctggatcttgtccggatgccaccgaacgcgctctgccttgagagtatatagcagcgtatcctcaggtgcagtgccattaccagcaccagagcgagaaccagatgactgcggatgacgaggagcccgtctcataaactcctccacattttctttgctgacatccctcctctttccagactccacgggccaaaagagtagattccgcaccgttttgccttcatccgtgctgtcacctttcctcctcgcctcctcgatctcctcccaagatctaatataattctcccaagccactctccaaacctctttcgctctcttcctctccattccccgccttagactgtcttccattgccctctcgaaccttcttctctcctcttcttcctcagcggccttctcagcacgtacacgcgccttcttctccgcgcggatgcgctcctgctcttcaagcatcccctccctcgtgcgtttccacatctcagcccgtatgtacgccgcgtattcctcttcatccatttgctcgagtacaccccgtccatcaccatcgcccaccggtggaggagtaaatgaatgtatagattgtccgtaaacagattcccagaacgcggcgccttcgtcgtcgcctagcgcgtcgaaaagagattcacgaaaggccgtgttgggagacaagggggcacctgggtaggacgggacagtgccgggtgagggcgaacggggggttgtggttctgtggcgtttgtgtcgtcggtggccgcggtagtcctcctcattgtgccggcgtctgtgtctgtgactatgccggtgggattcatttcgcgaggatttagagctggatttcgacttggaagacttgaagcgaaatttccctctggctttactgttggcctggtagtcatcgggttccgtgtctggagcggcggaacgggcgctggattcagagggcggattgtgatcgcgatcgcgtggtgagtggcttatactgtgctctgtatccatggccgcgttatcttcacgttgggacggctcgtataggaaagtgaggatgatatgagatcatggcctgttgaggttgcggatgttagaatcaaacttgagactcggcctatatttctagaaagcgcgtaattcaagttatcgagctcttgacgctagtaattttgggaagtcgaatcgtcggggaaccaacctaactccctcttaacggtggtacagatagcctggaaatttaaattccgtggtattaatattgcagattcagcgtctgcgaaatatcacagcaacttatttaccgagaccctgattgtctaaagacgaaagatgagacatgacatcatgcgattattctgatgatcagataagataagaataaattacgcatgcgattttaccgtaatctccagcctccggccaaccttgcaagtgccatcttccgtccataatccaacatccacatcacattccataaatacagcaaaaatggtcctcgtcgcatactctgattctgaagcctccgactctgagcaagaaaacaccaccccggccgcccgaacgtcagctaccaaggccactccaaccttctcaaacacaccctcagcctccgccccaaaagtcacacccatcgtcgacaagtcaaacccccgcaaaattcgagtcgccctgccagagatcagacccgaaagtgaggaaggggaagaagatggccccgcgcgtaagaagctcagaatcggaggaggcggcgccggcgcgttcgcgggcttcaattcattactacctgcgcccaaacgacctaatgcgaaggtggaaacagataaattagccggcagcagacccacgcgtaaggtgtttagcttgaagaccggggctgcgccgggttttgatcgcgaggccgatgaggagatgaggagagatatggcgtttgagaatttgggaatgggcggtgatgacggtaatcaggatgagacaatccccaaggcggcgagtttgaggggaaatgaggacattgaggcgaggaatgccgtggaggagaaaccccaggaagtggtcctgaaggggaacccaatgatgttcaaaccgctgtccgtggcgcgagcagggcagaagaaaaagaagccgattattccgacgccgttagcatcgtctaagccaagaacatcagcagaaaagacaatgaatgagccagaagtacagc

SEQ ID NO: 5540 - DNA, 8472 bp, Emericella nidulans
cttcatgtcaatgaattggcaaattttttgtctggggtttatgctgacactttcgttgaatagaactaagaggcctgaagtaatgaattcctatcgcttggttccctgtggcctcgatagtggcatctacgcggtccctttaatatagtaagggataggccagctacaagtctcctttggccatctaaataaataaaaatgtaaagcccattcaagaagatagctagggcacacctcgaatcgacggtcagcggtgcacgagccacttccggatgtagtagtccaaactccgctggaaagctgcaattatactgccgagcaaaatacaacttctgactaatagcttagaagtgacttaatgtctaactgctcgaattggcgtcgttcaattctctataaactgggtactcggagcatcgtccagtgttcatacatgtgcgttagttcttgccggcgcttacgtccgggtacaagtcgaaccgccgttgggtgtagatggggataccctttcgcgtactttcaatcgtctcggggtcgagatcggcgtagacgatagtctccgactcttctgcctctgacagaatcttcgcactgggatctgccaccagactatggccgtaggcatggtaggtggcagttgtgtcccgtgcggggctgcacaatgccacatacacctggttgtcaactgcgcgggcgcgagcgagtaactgccagtgcaaaggaccagtagtcgtgttgaaagcaccaggatagatcagtgcgaatgcacccttgcgagcagcagtcatgccgggctctgggaaacggatgtcatagcagatggcgagaccgattttgccgtagtcaggtaggtccacaatagtcagttgatttccaggcgacagaacttcgctctccttgaatgtaatcttcccgggaatatcgatgtcaaacaggtgggtcttgcggtgggttccaatgagcgcgccggacggtgagaataccagcgacgtattgtaatatttcttggatgtggtttcaagctccgggatgctgcctcctacgaggtacgccttggcctcagcggcgagagctgataaggcgtgataggacggagactgttcctttgttggaggagacggaagaagagtttcggcatattttggaaaatattgagtgccgtatggggagttaaagcactcgggaaggacaatcaaggaggcaccggcctttgcagcctcgaggaccttcgtacgggcgtgggcaagattagcggctttgtctgcgcctgtgttccgacacctattagattgaacgctaagcagattgaggaaagacatacctgatgcaagctgcaccaaggcaagtttgaggggcttcttcagtaaggcggtcatgtttcgatatgcgtgcagcaaaatatccagatgaatgttgtcattgaagcaatgcggtgagaaagccgggagttggagatgatgatactgccgatcttcgtccttttgggcttgatgtcatcttgtcagcttagtcattgccggcgatgttctgctcgccaataaggatcagcaataagtacaattgcagagacatcaagtgcaggacttgctgattgaatcctattgagcttttttctgttcagcctcccctcatcattatcgaggatactctgaacggcaggatggggcgctacccatatcttaactgaagacggttgttctaatcttttctcctgggttcagctcagcctgtgcagtactgccgttacggtcatagatactcatccgtcgctatcgtcagtttctgcttgagtgcgtcaacgtcttacaatgtcgcgtcaaacgataatgagatatatgtcagtatccaagccatcaggcgttcagggctagtatgcgctgcacttgcaccggcttgatgatggcagtcttgctggtgtttatcgcctgctgtgatcccattatatccaagcacgaggcccaaccgcaagcgtacgaacaattgacaactactttaattccctttggctactgatactctgggcagacgtccgacttctagttgcttgattggttcctgtttgataccgccgagcttcttaatccggaaggcaatatcccgcgcaggagctcagtttttctccaccaacgtatcaactgtgtgcttctcatgcggtaaatggtgggaggatgccgatttcacgggtgcgactgctcaaccttgaatatgggtgtggaacaatcagcaaaagttcgatacgaacgcacacgtgcatgtagcttgcatccagactaggctgaaatctgtgtctatagccgtttggatgtcagcaaggcagcctaacgagcaaaagcatgtcttcaccgccgtttccttggtctgacccagtatcactgccctcagcgtctcggatatcccgcggatagtcttggatggactggattgtgcgcttccacggctttatcatgaatgctttcctaatgggtttacctggtgaagtatttccagctcaatcactatcattcaaatcgtttaaataccatcaatcttgcagctctctagcctgatctttgtcgtgtcgtatggctaaaggcttatcagagcacgtaattctccccacccaccccccgaaatgattacattggcattattgcggctcttcttaatctaaatcacattgcgccgggccggcgctatcattttgtcttgtgctaattcggcggcgtcaatgggcaggtcacaaatggctgggttgtctatctctattaccgagttgggcaaacattacaccggacttcgtcttactggccgtgggtagcctttgttgtttagtagccttgaacggcttggtatgggttgctacgtgtcagcgtaagcagcgtaagcttgcccacgatagagctgagggtagccctctctgcggcctacagcccaagagagacgatcactttgccgcagcctcgaatgatgatgatgagagtaagtccggttcaaaaagcggaaattaggaccccatcaagatgcacaaatcagacttaaagccaaccattatcctgaatagcatacatgttatctattgtccacttcctgctcatatcaagcggctgactccgcgcccagcgccaaagccttaccgaccgggtaaacatcgcatcttggttcgaaaaagggcttcattagtcccggggaaaattggtaatgaacgcaacctgcacagcggcaaaactattcacagttagcttccaaacagaatcccaaatttctgacatacgctgtcgaagccgcaaacacctcaactcgcctcgccttcgccaatagaccgattattatcgaaaacccgatattgtacacaatgatgatgatcaaccgagcaaccatattattgacgaggtataacaccagcatggaactcgctggtatcaccgacgacgttataatgcttgttagccttgtagcgcggatgattttctcatcatcataatataccggcccagtctcgatatccccatgctagagtttcccacgtcagtctttatccaagcaaagcgctcaatccagtgagcgatcagaagctaacctttttggtcccaaagagccggcggaaatgcacaataagcctgtcatataatgggatcacgacttggaaaacccagtttgtcagcaaatcgacattctcatatctccctgacagcgcaacaaggtcccccctctcctcgtcattctccccaaaccattggagacactctactggaaagacacaaatgggattatcatccaaccaatctctgaatgtgtccagatcccgcttatgtggcggtttaagccgaagcagttgtgcatgctgcgtgaaggccgtatctgttccaccgactctgcataagcatgtgttcttttaagtctcaatcctcaatcctcgcccaatatctacagaaccttttcgattagaggtgacaagcaaaccaacaacttactatacttctccaacagctccctgatttctagccatttccgccattgctctgaaggctcatccatgcccttcagtaaccgcaccgaagaagaatatttctcgcggtacttatcccccgactgtctatccttgagcatgatctctttaaattccttctccttgatggcaatctcagcctgcaggaagagtaggttcttcgtattcaacattttgaaagagcggaagatagacaggcccttgtcgccagccattagggcggcgagtttgtcgtagccctccattgtctcggtcctggcgcagtcaccggctcaaatttgctctgactctggctccgatttaatgtagaaatctggatgtggttcacagatcacgtcatgtcatgtagtgtgagaggcactcaccttggtatgaagagcgctgtcaaaacttcatctttatacgcagcccggccagatctacaccgggattatactgtaaggctcactcagatccctccttccacttacttcacacaccttgagcctcagccttccagtacaacatcggacaaaaagtgcaccagaccgtcatggattcgggcatccacagccacagcctggagacctaagaacctcagtaccattccctggtgtattgccagtgtacacctacttaagtagttgtaagcctgagccacctgtggcttgctcatagctcactggttcttataacctgggctctcaagaaccccgcctctagtgagtggatgcatggcctgcttgttctttgaactccttacgtggtcatgcagcgaagtcatgcacgtatggttggttgcccaaggtgcgtcaagtggtggtctgagctcaaggcagaatggattccgtgtgcgacaatgctgctgtggccatgctaggcttgctttgacgtcgatacccagacgattctgtttaagcgatgaagtgggtgctttctatgttggttctttcctcagaagagtcagtttttatggctgttttggtctatgcgaatgtctatttgtccgtctatcagaccaggtctctttaactcttaaatcatagtcccaaaaggtggtttaaggtattcccacgtatataatgctcgaatgcaaatgtcggtatggaattgcctaaggacattacaatttctccaagatggcattgtcctcttcccagagtctgtaattatgaatcgaaggccttcctaacagcatatcataagggctgttctcgatgaccagaaactgggtcttatattgatgctggcccttgtagagatgccatttgacttgaatggtcccaagcggcttcacccaatgcccagtgggcaactttacttttcccccagcgtatgaagtaattggaatattcaggagtcgaggaatttcgtcagataccgcgtcaaattggacgtggaagtcgagtttcaagcgacggtaaacgaatctctcactctcgattccgaaaagtatgatatcgtatatgaaaattccttccgctgtttcctcctcattaagctctatcttggaaattgtttctttcttcctgctttcttcatgttggtgtgttcgttcaaattcggcttcatagtctgctctccacctgactttctgttgcgtgcttctttttctagtggagattggccatgatttcaaccaactgagtccacgtttagacacagctgcatgttgatagctatcgtcagagtatggcccgaatatcgaccctgttcgctgccggtcgcagcaggagacgaatccgtgagcagcattcttgaatggctgaacgaaaggcatctgggataggcgctcgttgaagcagaacattagcgctcttgaataatcgcatatcataatggctgatatggactgtggcacaaaggagaaaggaatggcagtcacctcttcctatggtccatatagttcttatatctgcctgatggccgaggttattgcaaggctctccagcggctgaggctctatgtcgcggcgcccttaacgactcatcatcatcaacattatcaggtcccgtggactcggggccggggcgaggctcacttctctcagaggcgtctggaggctgatatgtgatgatgatgcttttggtcgaggaagagagccttgggcggaatagcataatcttggggactgctagtcggtcccacaagctagactactagtgtagcctagtttcgcaaacgttgcattggcgtcaacttatgcaggaagagtggttatacaaagcagcaagcatggccaataggaccaacgcataatgtctcatcgatggtgagaaatccctgttcttgagacaatggagtcttgttggctgcagcaaaagtccctgtcaatggcaatggaggaacaagtcttcctgtagaacccataggatggcgggaagaggtccaagcccagcgcaatgcgataggctggccttccctatttttcggctcacagccacaaccgcatggggaagcccaggtgatcaggagcgtaatgaacgcacgagagagattttgaagggctaagtttctaaaaagcgtgatgattaaaaattgcaactcgagttaccgtgattcagcagtgcggtgtagaataggctgcgggggatggcaaccaacttaggattcatcgactactatgtaccaagtcacccatatgaaaatggcggggaacggggtattttccagtcactgcccagtcgaggccccctttcctttctccttctgcattttcgcgtccttccattcagcttcgagtttagctgcatcttctaagttcttcttcgatttctccgaagaattcttcttccactctgaaaagccagtcagaaccaattcagacaaagctcatattacacattcgcctgccgtgaggttgaagggctatagttgtggatgtactactaagaaacgaggtaacagtagacttactttcgtcatcaactccctttcgatacacagtcggagccgcacggtaagtcttgataccatccttaccatcaatagggaattttgtctcccagctctttgcaagtatgatatcgtggccacccgcaaccaatactgtctctgtctcgacaatgtagaaccagaaagtttccgtccgagtcccatcgcagggtctaaccagcaagcagaccttgctttgcgcctcatatgacatgttgcaagagtcttggagggctttggcggagcccaggggctttgcagatactttcagcgagtcctgtagttgctccaagcgatttcgagagatcaaattctcctcgatagtctcgtcaattatggcgcgaagcgttacatcgtgcccgcagcccttaggattgctcgcggacgtggtgatagtggctcttgtctaggggtttgatcctttagtatgctttcaactctcacgaggaaatgtgcgcgcctcgctattgtatggatacaaacagtggaacataccatcttagagtctttgttgagttgatcttcatgcatataatcgccgtgcagccggtggtaattctacgtttgtgccggaaaagcttcttgaaggactgtaacctctccttcataacgacaacgaccggacgcatattgcccttcatatcttcaccgtagagagcgagttggggctcagaatactgttgagccgcatagaaatggcagttgatcggtcatggggggtgacacgcatagcagacatgtttgtttcgaattgttgtccgctcctgtatggttgaccataccatcggaatagacctctttacttcgtcgacgaggctattgttgagattgtgcagatccagtgagactaagtcgtctgcaactcggctaaaggcgttcaatccctgagcgcaaacgatgctgacggtttcaccggctcggacggaatcgctgttagtggtgaaatgtaggagagtatatctctgtcgcccggactgtatggtgcgcgaaagtcagctggactggaacatgactgtgggatggatatgcgctttactttcctagaggaagagccgacccccacgaggaattcgcacccgatatcttcgaaagcccgaggctggagaggataaactagttgttctaactcactacccccgcagtactagtgaacacagtcctgattcctaacaaataagaaagcatgttcagccggcatgactccggccccttgtaatataaacataagccttcattggtatattccctataaaagccttttctgcaaggtcttccggtgccttaaaaagcaacccctaaaaggcacccaaacaccgatgcatgaatgcctaaatcactgtgttaaatttccacaatcctgggggctcggttggctttataccgtgcgcccggcgtgtaatgaaatagtggtcacaaccactgtctgtgtggtcttcctcgcccaggtgtttttaagttatattttggtggcaatatgccatccccccccacttatgttttttggttatttgttgtctatcttttttatctcctctttctattattattatattctaatttattatatatatttc

SEQ ID NO: 5541 - DNA, 3438 bp, Emericella nidulans
atgtaccaacgctcgaagagctgtccagcgcagaaccaccgcgaaagaaacgtgcaggagtggagaagccagcaagagatatgtggaggccactctcggaaaccttctctgaggaggaagatataataaccccaaaggcccccaaaataacaagcaagaacgctgcgaaagcaaagatggatggggcgatactgaacaagcgaacgtagtatatccactatgtatctatatatcctattctagtggtggctggttggtgtctgtatatgctgagtatgagtcgtgccttccttgctggcaaggtatgcctatatgttgctaggtgtggccttacagctcttggattcgcaccctatatacttatctatattagagctggttcgagcacagattggaattttatgtaccgtctgatggggcgaagactgctatcatatctctagatatccttcccaaccctcgaggataccaagtccggacaaattccggcggattatgcaaagcatgatcttggaacttacttaggtaaccgcaagagtcagatgaattacctcatctgacccatttgtaatgccgtgaccagtgtgtgccgaagtagcaaagcggcaggagcaattggctctgggctggctctcggcatccgtaatccacccccacgggtttctccccactcggcgtcccgggtattccgagggggtcataccacgagagtactccgcacttctactgggttcccgggggtttgtcggagtatcacgacgatgatcactttattgtggagcatggttacagtctccaaagtagtatggcaaggttttagcagcgctaacttcaaagactgctcagaaccttactagattttaagacgagggagaccccgcaccaacaccctacccaaactaaagacaaacactacgcgcggtcagcgacatcaccaaaatgcgcgcccgcactctcctcctcagagtcagcatcttctcagcggcactcgctcttcaaccatcagcaccaggcccagctccttacaccgaaccttacagacctcaataccacttcacccctgctcaaaactggatcaacgaccctaacggcctgctctaccacaatggcacctaccacatgttctatcagtataatccgggcggagtcgcgcacgaggcaatgtcctggggtcatgcaacgagccaggacttaacgcattgggatgagcggcctgttgcgttgacggccaggggttttcccggcaagaacatatcagagcagtttttcagtggcagtgcggtttatgacgtggataactccagcggatatggaaatggaatgggaacggctgctcctatggttgccatgtatacgtctttcgtatgttacccatctctgcttatagaatggtcattggatgaaatggggctcgtactgacgaagacagtatgtctacggccagacgcttcccagcggcaagaaggtccgcgcaagccaacaatctcaatcattggcatacagtctcgactctggcgaaacatggactactgatgacgctgtgaatcccatcctcttacagcctccgcacccttacgaatctcagtataaagaatggcgtgaccctaatgtcttctggcacgcgcctacaaaaaagtggattctgacaactgcactgtccgatctgcacaaactccttatctacacctcgactgatctcaagaactggacgctcgctagcgagttcggtccctataatgccgtcggtggagtctgggagtgtcctagtttcttcccgctacctgtagacaacgatgagtcgaacgtgaaatgggtcgcgatcatcggcctgaaccccggcggtccaccggggacagtgggatctggaaaccagtatattctaggccaatttaacgggactcattttcttccggacgccgaaagtttgcatgagcaaggagaggcgaattggctcgattatggaccggacttttatgcggcgctcgtttataatggcctgccggagtttcagcgtactgttattgcatggatgagtaactggcagtatgccgagaaggtcccgacgacggtttggcgcaacgcaatgactattccaagacgccttggtcttaagactatcaatggaaaggtgctagttgttcaagaaccggaagcaaactgggctgctatcatgagcaagccacaaaccacgcgtattttgtctctcccggcaaatagcacgcgtaacctagggtctctagggaagacacttgctgctaatctcaccttctctgccggagaacaaaatggctcttccttcggaatctcccttttggcaacccagaacttcacaacccagacccttatcggctataacttcgccacgaagcacatctttgtcgatagacgggcatcaggaaatacctcttttgacgagacatttgcgtccgtttatcgtgccccgcttgaaccagcggatgatgggactgtgacgcttaggatattcgcagactggtcgagtgttgaagtctttggagggcagggagaaaccactctcacagcccaggttttcccgcccgagggagcgacacatgcaaggctctttgccaacggtgccggtgtggaggacgtgctactgagtgtgagtaaggttgggtctgtttggaactgaaggatctagctagatgttttgttgtttggctcgcattgaagggtcgatctgatgaccaaagttcagcagtcttatacttatccacaacctgatccaattcgttgattccttcgattagttttgagggcagcctgtagcgtgacttcggtcaagccgagctcactcaactagcagatgctacagagccagctggctgatccacgccagccaaagggactgaacaaacagtctgtgtctagacgggagaatggaaagcattgatagcagcatctattgtccgccttcccagaagcccctggtgaaagctccagtagggcgaatcacccacgactatgatacgttgccattgagctaggatcttagtctcatctttctgtggatcagaaagcatgttctaagcctgctaagttttggagtgcatagtattatctgcttctgagcaggcttctccgaaggcacatgtagaatatatatctgagctgattggtgagaccagcagtgaatgtctcacttgtcaaaccgtttactatacagctctaactagactcaaactccccctttcttatggtttatctacctgccttgacgtagctttatttctctatgccctcttcttttctgactttctcattctgattttctcactatcattacactctgagaaatgagcctctgcggcagatttcggcttcctcaagaaaaatttcggaatcattaccaggtaaacgtcaagattgacaacaagcatcgcagaataagccctgcggccgtaaaggcgctcatacgcc

SEQ ID NO: 5542 - DNA, 7208 bp, Emericella nidulans
tcctcagctgacatctcgcaggactcaaacaccgacttgagctggtcacaatacaatgctcacccagtggccagcaacgtcttcccgggacaggatctccaaacacgcttccacctcttgctccgagatagggttccgcgtggagtcttgtacattccggacaatagtctctagacaaaatggagtccgctgggcgactgttctcgccgtcgggccactgcccacatacccggccggccgcagaagagcaaggacactggcaacttcctcaacgcgcccagccgcagcacgacgaagcagcacctctttcgacggtgggggaggcagcttcgactgacgcagctccttgttcttgatccgatcaaacagaccctgccgccgacttgtcgtcgcgtcacgcatcctcgcgggcgtaattccagacgcttcatcaccagcggcctcggccaaaagcacatccattttcaccttgataacaccccctttcagatcctgcagccgctgctgccccttccggagcgccgtaaacggcgtcaaagactcctcaattgatgccagtcccagcgtcgccagaaaatctacctcaccctccccctcggcctgttccgaagcttgtctataaagcaaactaaccgcctcctcaaaccgtccctgcatttttgcctcgtcatcaatttgctccgttcgcccagcagccctctccagacaaactcggccaagcccatgattcgcaattcgaaacacacatcccggaccctggcgccatatccacagaagccgctgcaagtcctttacaactaccttccttttcttccatatccgctggatgctaggtagaaattcccttaagtcagctggcgcagcaacaccgcggtgtgcagcgtggatcgtcaacgccttgagaaacgccgaatgcaggctgatgatttcctcaacgcaagccggacgcgtagcagaccggctagatgggcacgaacgcggagatggcgcagttgtcttcgctctttgcgtcacaggcgcaggcgcagtcacacgcttcgtcggtgtagacggcacagaatcgtcctcccggataaccgcatcttgtgtcgagcgtgtcgagcgcgtcgagcgaccaggagatatagacggagatgtagagcaagcgacataatgaccactgcgcggtgacgaaacagacaacgaactgaactttaacgatttcgacggtgttaatgtcaacaagtccacattattattctcctggttctcctccgtatcctgaagagcttccttcccctgcccttgttccctaacgacaaaatcaacattctggagctcgtgcaattttcgcttcttggaaggtgagacaggtaacgtcgaccgcttcgcctctaggtccttcttcccttccgctaccgagctacaacccggcttggtcgctcttgcaaaactctgaatccctagttgcggctgcgtttgcgcttgaggaaggcgtgctgagcggctccgcgtgagagtggaggtgcgaggcatcgcgacttccgccttggattaagtattaagcttaatatagttcggctattcagtgaagtataaacatgaaagtaattggaagaatcacaagtgtaatagatgttgagattgaggtttgaatttgtgttgggtaaggtaaggggatgatggggcggttaaaattggagagttctccacgcgctttttttagtggaaacgcgtcgcgacgcggctcgtctcagttgggttaaattacttgcaaggcccggattcatcgcgacaaatccgtcatacataaaaggacaaacgatcaaggcagggctgacttggtcagtcaggaaattggtttcgtttatatcaaattttataccaccggctaagccttccccatcactatggtgatcaggtctaagtcgaagtctggaatgcaacatgccattttatgatccacataactaggacgaggaatggagctttaagacctagccagaccattattatcattgataaatgccaaatgagttagactaaccgactaccgaagtaaagctacaccgaccagcctgtagtactccgcatccgcagtacagaaattcatgcaatcatcatcatataacaccaaggaacaacaactcagataaagagggtattcacttccgcccaaaccagccggaaactgtgctcttcgcctcagacgccttcgcctctacatcatggctcagcttgtttgcctcctctttaccagcctggcttaggtcatccaacttccgttgtgcccgggcggcctggtccttgcccgcctggctcaagtcatccagcttccgctgtgcttgggatgcaaggtcggtgttctttgtcgtggggttgttcgcctgaacacgagcacattagcatcatcgttaagagatattgcttcggtcagcggacgtacagcctcatcgatgttcagattcgtctccagtccagccctctcaccagctctctcgccagtctcggttccgggagctttggcgcgggccttgttgatgtcatctattgtacgctcgtcaattcactgtgatttaatatgacagtgaaagtagaactgggaagacgactaacgcttcatctcatccttcgcagccttgggatcgcctccagcgcggtagaagtagtaagcgcctgcgccgagggcgccgagaccggcgtatagtccagcgcggctctttggggcggcagccattgtgatcgtgatgtaagagaggttggtagtggtagtgaaggtaggatacggcaggaagaagcgtatcctttattcgtgtagagtggttgggaaaatagtggtggataattaagacaatcaatttccgttatttttgacactgggaattaaattatgggtgattcctggagtttatgtaggtctcgcaagcggggagaatcgtgatgcttccatgttgcctgacgtcaccgggggatcatccggctctgaatcaccattcagacctgcgtccaagggccacatggaataaggcagtccatgagatcatcgtggggaactttaacagcccatcttaatctgtgtgaagcagagtggtatagaagctcaaggcaaatccaagaagattatcaatggaattagacttgctatagcgtggagtcgaagcattaaacaatttgaacttgcgacaacttccaaatcaactgaagcttacgacaaaatgaggaaaatactaggaatccatatattcaagcaagaagaaaacagcgattgaaggaccaaaaattgtacaatgcaaacgctgccacaccacgaccaaagaaattctgcccagaacctcgcagcaatgaaagccgagattgaagctggggtatcttcaagcgctgagacatacgacccgaacgagaacgccagatcatgcaggccaaagtcgaacacatgagaaaagtaaccgaacaaaatattcacatcgaaaggacacctcctgggaacccatcactatgcgttaatcatcagtcatcacaagtcatcaagagctgccgtaacgctgtgtatataatcaagcaacaataggcccggggtctagaacgccatgtacacagacaccgaaagggaacgaaagtgggggtgtaagtctggagaggggagcacgatgctgacaagcgttgcatcactgagattggacgaaaaggaaatttggatagaagaggataagccattagatccaaggagcgataaagattggctacaccatgatatccgcagtgttcttgttttcgctcgtggcaaccgcgacaagagcctcaagtcgacccattccaggatctcttgagacattgttcaggtcaggccgcgattcgtgttttatatggtagctctctggctgtgatataggtggacaagcctgtacgccacatcagtgatctatcgctggccctcagtataaaggggcgggcgtactgtttgagatggatcagaagataggggaggatggtgaggctcgacaaagccgttgttctgcacgatggctggatgatattccagagatgctgtggatggagtgtggactccctcgctgctgctcgaatcttccggactcgttcgcgcagcgtgggagctcgatgccgtcgtgctaaacgaaggcggaccatgagtatgttgaccacggaactcctggacctgttgctggtatgacgatgacggacgggaacctatgctacgaagttccgagatggtctgctggccccagtttgaggcgtcgcgctgtggtgtcggcttgtcccttatgtggagaccggtcaggttcgtatgcagcgacatatcccacgaaacatgaccgcgtctatgaccaggaccagaaatgggcggagcaggtcgacccggtggcggtgcgtagttgaacccgccgctgaagttgtagctcgggggtggtttactgtcaacctgcatcggactcggcctgcgtacaggtggtgtcaaagatcgttttgcggcgaatttgtcaaaactttcaatccctggtagacgcggcggccggtctgcagattcattgcctccaatagctggtgggagcgattctgatgcctgagagctagggatcccactataatctgtacgggaaggggccggccatgtcgaataatgccatgtccttcgccgcaactcggcttctgtcggttgataatctctctcgacgggatatttcccgctgacaggactggcgtagacttctcccggtgctgcataattcgcagcagggtaaggatgcgtatattgtaccggcgcaaatgggttagctcctgacggtacagataagcgccgagctgcggttttgccatcccagaagcctgtaacctgggcggctcccgggcatagggcgaaccgttactgggatatatctgggatggcgtgtaaggggagccgctcggcggcgcgtgaaatccgcgaacctgagcaggtggtgtggtaggtgcgtcaatcatggggtcaagtcccaacctagaccttgtggtcgcatcgttcgccatgatcaacggtggcgggcgccggcgcaactctgggggttggctaaatgtcgaggttgtggaagcgatgcttgatgtcgagaggttcctactgtggcccctagtatgggttgcctgactacctcccgtgcctgccctcgcgcgaccctgggggcgcacccgatctgttctgacctgacgttgaaagcgagtgccggtggcggccaaagagctgtctggtatttcctcgttcacatgcactgtctgggcgtgttggcgcaaattgtcgagtctagaaaaccttcgtgaacagtggcactgaaatggacgctctccagtatgtttccgaatatgacgagccaggtgctcacttcgagtgaagcttagattgcaggggggaaagtcggtgcagtaaaaccgttgtccttttttcttcttggtcggtggtgcatgttccttgcgctctgagccatggtccgaaccctccccctctgactctgcttgtatagtctcgtccgagatcgagtgtgtacttgtactcccgcgggactcgtcgggcatttgggtctcagtagtactgttgtttgacgtaccagcgtcctgggtcgtcggtatgctgttggagagggggcgaggtgtggcagacgttgcagatacatcctccatggcgcggtccggtggcgaagagatgttattgacaggcaagaacgacatattgacagcgaaatttcatgagcaagccactccaaaaatgtatgtacggaatcgtctcggaaaatatccctcgacacaatactatatgggagaaattgacggtttcgagacgagataggaagacgagaccgatcgaagatgctgactactagagaccgttgcgcgaatccagtaagcaggtggccataatatgatcgctaagcggcaaggaaagggatgaaagtgaatcaggaacggaagccaaatttctgttttgctttgaatcgtttgtttttccaaactcgcataacaaacttacaagaaagggatgaaagtatcggaccgcccgcaggatatttaagcgaggggatacaatcagtacggatgaagttggatgaagtttgaggatgacgactggataaactcggaacgaagacggcgaagcaagggtaggcaggttgtagatggagagagagcgcccattagtgccgaaggcgcatctcacacggtcggcgatgaaggaaagattcaggctgccaaaaagagaaggaaagaagcagaaacgacgaggaaaagacgtgaagacgtcgacttttgggatgaaaaaagaagaaagagaggtgtaagtttggatgggatttggtggactcgaaggagaggtcgagtcctgcctgccctgggttgtgggtatgacagtaattcaagacaccggagcccagccaagacccaaactaaatccaatactgcaatactggataataaggtgttaataatagacgagcagacgctgcgacagaccgatcgacgcgaggcgaaggaagggggagggacgcgaattgcaataataaaaaatcagatcggtccaaaacggcgcctattaataggaagcaatcgacgagtcgctggcgtggacggggacggaccaggcacctgagagagcaggatgatgggatgaaagaaaacgcgttgggaagccgagaggagccgacaaggctgtgaaggaacagggtcgggatggcggacaaaaggggagaagaatcacagcgagggctcaagaggagaggagagaatcaggccagaagggggtgtcagagcggacgccggtactaagtaaggggaaacaatagttgatgacggcaagatgccgcctcagatccaggtggtgatgacggtaaccatttaggttgctacagagtatggagtaccagagggggaggcttatcagaaacgacggcgggaggcgacgaaacgaggggcaagagaggggaactgctgctacagctggagtgggagtctgggacgggcatccaggctatcctgaatcagagcttgctggactgctggactgctggactgctggacggagccttaccagctgttctggctgtcagaccggctcaggcgcgccctgaacgctgcacacgggcggcatcagattcaggtcaaactgaaatcatccacccctctcgcgaggcggcgaggtcatgatgatcggggccggagtgctgcatcgtgataggcaagcgcgctggttagcc

SEQ ID NO: 5543 - DNA, 3526 bp, Emericella nidulans
  unsure (1)..(3526): unsure at all n locations
gggttctgggcggttattgaacctagttcacgaagttaggtcttaaaaaggtgcagaccaattgataatgcgctgctcgcttactgtgacgggtagattggtggaaagcgcatgctttgtggaaagccgtgcatcagctcgtaagatggaagcagagcatctatgtagatgaacagtgcggcgaccaggggtcgcttggaaggagggacagaatcattagcgggagaggagatgaagttcgatcaaagagtggtatgggtgttgatttcctcaagagaggcatttgaagaggcaagtcctacaccaggagagtcaagctagaggctcgtggtagctaccgtactgcctcagcctgcaggcattctggccatggccgagaagactcctcaatctaagtccaggtggccgaccctggacggtgataagccatgtgccgactgttgtatagaatgcagttgactctggagaatcttgggaggaaggatttgcatgactccatagcctgcgtggttatatcagaattatctgagtcgttgctcccttctacttacgtatacaatatgcttccttacaaagcagagaacgacataagtcataccatgaagtcttttccttgccttaccaggccttcctccaatatgtctgcttatttcttgagttcgtttggtatttaaaagactaaatggtttatttaggctgaagaaagagatggtccatgggctcaggactgctctttctctcgcacccagaacgcatccattttccaaaagacaggagactctcctatatccttacggttaccctggtagaaatgggggaggcaaaacttcagatttcataattcatcacacaattcatcatggaacatcaacgctgtatgatacaatatcaattccacccacaaatcctgaccatagccgtaccccagcgacctacgccggcaacactgccgccacgacagccgccatcaacgcaacgccaacaccgggcttcaacatccctgccgcatcatcgtcatcgtcattcacgatatcgttccatccatcctcgatctcatcgccaatatcatcaattccatccccgatcctatcgaagatattcctatcatcgtcgtcgtcgtcatcatcccagcgacagtcctcgccctcaggacaacacccccagaccccgttatccctctgacattcttcgtcgctcggacacccgccgtttgcattgtctggacaacagttgtagtcttcatttacacaggcattgccgcatcgtttctcgtcgctgtcgcagaccactccatcgtcgtcctggggagagcgggccagaatatacgccgaggactggcgagcgacgagtggccgcatgggtgacgggctgcgcttaaggatagaattgttgctctctgcgacgaggtttggcgttgcaagagctagaggggagagaaggagggcgattgggatcgaggtgagccgcattttgattggtagtgccgattatcgagtgtcaacgggcttgatagatagtcgatagtattgtgggtggaagtagagtctcagattaccacttctaatagacactatagctgctcaagtgtgttggttggaatgttttttgctagatgataatttcagacgattttgagcgcggctacaaagtccttatataggcggaatcgccatgttgcacccacatacatatcgacttcgatatcggcaatatagagtatagaaacggcaatacccagcgccggacgccaagcgggcagtgcccgccacgttgtgccgcagcgtcgtcgccagtggacgacgtcaagtgctgaccccgggctgtcgaataaaaattcccttgaatctcgtatagatactcttgggaccctgacctagctgaacggtgctaatcaggcgccagttctagactgcatttggtgggttagagcgctgcttgaattaaggttggggctgtgtacaggggacagcacgataaggctgtgggttggctgggatggtaatccaagtttctgcctgtggcttaacttcactccaactgactgtttgcggcaatcactgtaccatacagtcctagagtttcctggatgttaaaccgtaattttcaagtgctgacccaggattagtgctgcctacttgagactcatctataggtcaaggttgtgtctgtcctatgaacttactccctcccaccatgcattattccaagcttgtcgatacgagctgaatatgaatgagcaggatcttgaccgagttgtaactattcgagttctctgataaatatgctggtgcctaggtgggcattgctcgcttggcgaacttcgcctaagcggttgagcgggtgaattcatcgtataccgagcgcaaatcccggatgcagtgggtttccgctagtcgcagtcagtcggcgcatagataggccattgcatggttgggatggcggagtactagcatatcgagccatgactgggtcgtggaggggattttcaggaatactagaggacagattcaatgaccgagtagattggctatgattacggtagcaagctgcagatataactggagatgcatgtttctactatcacgaagctctgtgtactgaggcatacaaatatgtacgatactatgggcgtatatgctttctacaagctacgcatacaccgagtgtaatagtcttacgcgaaggaatagtgctgtctttaataccttacatcacattcactcaccatacatgaatgattcatacatacataaaatgcaatctttagctgcatgatttatcaacccccccatttgggcattcgccagggaaacttccaagtcaatgggcaatttatgctggtcaccgcttggtaaaaacctcgctgggattgtgaatcgaagaggtgtgttcggccctcttaggattttgagaagacgggtaaatatgcaatgaactatttctttggggagaggggggagttttgtgcatcactggagggccgcgaacatataatatgacagggacatcagacgagcaccacgagctgccagctcagagctcaagtctggggtaatgaatagcaagagcttgcaagtcctgcctccttcgggggaagctcaacaaaggcaggccgctacctccctatatccacctctcaacgtcgccgaaagaaagacgggcttcttcattgtgcttctcctccaggtttattttggcctttaattctatgtattatatttttgttcttttctcatctcaagcattcacatcgaactggaccttgcgggcacggcaggggaccacatgcctgctgttcctggtcggaggctgatgcagggaaggtgcgtccgtcataacagtatccaaatcgatgttctggttctgttcctcctggaaacggcgttgttctttctgttcacgacactgtttaatacgctggatctttctncattggtcccttgtgtangggaatgcattncagtcatgtcgtgtcgtttcctgcgaaagttagtagagtccatcgactgcgagactaattaatcag

SEQ ID NO: 5544 - DNA, 4845 bp, Emericella nidulans
aggggtgatggcaacggacatggattcgaagcctggtcatcgtcaactttcctgcaggctgatcccccggctagaacagggccaataagatgatcgattcatccagggttatgcctgcctggaagataggattagtgatttccagccggttgcttagagtcctggatactatgtgcatcacaataaggctggatatgctggaaaatagcattcagctggtggctgtcatgcgctagaagaattccagaagcaaggacattagcctgcattggcagatgtcttaaatatgtgtgacgaggtgttccctttaagtcgagggaaggtctattctagcacttatacttgccagtgagcattgtcaagccgagaggagccgagagacggcgatccttggcacattagaggcatgacgtctgggagacgatcctaaaggggctgactgcatatgagctgggccaaagcaagaggtctgcttctttttcacttggctgtctgtctcatcttcactgagtctggtgtccatttccacttgaatccaaaccaaggcacagaacatatcgtctagtgctgctccaccaatctgatcgcttcggcaatcggaaatgatacattccgctcctgtttcggtatccaagccagatgttcttaagtccgtgagtcgggcattcgtttagggccacttctcctcattatggttgcatccaacaccttccccggcttcagatccaacacctccgtgtccccggtccatgtcaacgcagccgacgtttcaacgacctctggcttctaactctaagtcaggtacgtctccttcttgatgtgactggttcatttctgaagcaatgcggtctccaagacattgttgaacagcagcccctgggagatgacaggggtagtcgtgtatgagagtttcaatttcgccatcagtccccttgttcaataaggttgggttggctgagtcgagcgatcatagctatttagggtaggctttccttggtttctagccattccctctcataacaaagcctccccactgaatggggtcgagtacggcggttttccatgtataaaccaagcgagaccttgctcactgcctctggacacgtgtagctgaggaaaagcataccgccgttcatggttcccagctggcacctaagcgatcaggtggacaggccaaattcttcttggcatagccataatgcagactgcgtcctattctctgccaatgttagctaccacttcttgagctgccgagctagtatgcaaccataggactgagcattggacatcgggaagtcggcaggcgaaggccaattcgcccagcgaagttgatagcagctagataatacaccttcgctatcacctggacatcaccttgctagtggtctatcatatatcacaaatagaatatcagtcgagcagtgattgagaacgatgtcaataagagaattgcagattatcgcgcggttcgaattggagacttagctcatcagttgttcattgttttaccaaccgtacgaggaggctaggccctttcagctgtctacctgacgagtctttattttcgatcagaagccagagaagtcctaaagatatggaggcaaaccctagttttcgttaaatgtctgaccaaacgtaataagaatgaaagcatgaaagtacctaatacggccgcagtaacgccaccattctagttatccagtcgtcctggctggtacccaaaacaaatgtcttgtaaatgcctaaagccttcaggacttaataggttcatcttagcagtgtcccaacaagcccattactcttgcgatgtccgcgtctggctatttgagagctcgatcgtcagcaaactatgctattcctaaacacctgtcgctgtactgaatgcggcagagctcaaaggaagtagagaaatttcaattacactgtaggattaaaggtgttatggcatgacccaatgtaggaaatctggactcccgcaggctacctggccgtggtcatcgaccaccgattaccccatgaatctagagaattgacggctccattcattttgaattcattatcgtgttcgattctagaccttatttcgtaaataacacagtcccacgttatctagtgaactctacccctgcagttatgatgggcggagatgcggaattaaaaagcggatataagaggaataaatttatgcatcctgcttatataagaatgagctgtataatcagtcacatgattagccgtctgaccaaccgaaaagaatgatccatgcggactacagattcgcagaccttcactgaagggttgcggcgtggctaatttcgcaaaatgagtggtagcccgtattctcaacctgagtataatgcactggcaacctcgctgaaagtgggtgcccttagtggtacgtcaatcttcatcaaaatcccctgacaaggttttagcctcaccaaattatcggatcaacggcatcgcctgcatatagagtggcagacttctgatacagccatacaggctctgctggtctcatctacggcggcatctcaggcgttatccgttcgccgcatcctgtcatacattccatctctcatggtatccactggtttgtgtgtggaacctctttttggtgtcagtattcgcctcgttacccctgaagcctactcagggatattgactgactggggtttcatttcagggctgaggggtaatatcttgaagcattactatgaggatcaagcgacttcgaagcaacgcacctatgctagtactatttctgccggcgtcgctggcggcgctgtcaccaagctaatgggtacttctcttccatcccttacacttggtctgggagtcaagcgtcgggttcattgactgactgtgtgcgccaggtggtcgactcatcccaggattggttgttttctctttatttgggtatgtcggacaggtctcgtacaatgcgattgataaatggcagttggcacaggcgaacacgccttcgaagccgtttctcacgcgcattgctgagtcgaagtgggttccgcttaagtcgctcactgatgatgagtatcggggtatcttgagcgagaagctgctcacaatcgaggccgagattgcgctgattgacgagaaaatcgaagagctccagaaggccaagctggacgcaatggccgaggtgtcgcctggacaggaggcgcgatgattgcacgtctcgagtattttaaaggattctatagcgctcggccgcgcaattgacgaaccaaaggagctagatggccgtcctagaccgtgcacccaatgcagacgtgtcgacgcactttagtgcaacgatccctttgcaaagcaacgggagatggtcgaattcgacaggaggtcgtggttcgaggtagcggcacctgccgttggctccatggcgcgggtacacgccgatcatctatgataggctgtttgttttgactgctatcattgtacactgtaaaccaatgtgatatgagaactaggcgcatattaggtacattgtgaagatatcttatctaaccctgtctggaagctggtgatactatcggaccgggataatatgccactctcaataatgtttgcatgcagcgccgagccagccgatcggcccttacctatatgtggataccgtagcgtttttccgcttccagccaactccgctccataaatcacgatgtaataatgcaaagaataataaaatatagctggcgggacgaatagggttgtgcctgacagccgaccaagctcgtattgaaaacctgatttgcacatccgcgtcatagcaataatacgcaaaatcgatggttcgggcggcgtggcggctctaagctctgttctcgctgaccctctggaacttcttcgtatctccggcctccctttcttttccccggctccatccaacctgtcaacttctcccccctccatgcttttatttcattccctttcgtccttttcccttgttctttgattgttttactattagtttttcaaagcatgaatgtgctacggccgcccagttcttatctcgactctaatttcgacggtgtcaagctctcctaatcgagtgagacttgtccttcagtaagtcccgcactcttcgggatgttctcgaagtgacgtcgagtacataaagagtagtattatcacgaactgcttgcctagagtcctcaaacggccgttgttctccctcgatggttcctcgtgtgaagcgtgtctattccctacagcgcggttccgctgattgcgagccacgatgacgctcttcaatccaaccaccgtcctcgtcggcttcctcctcctctatctcgcttctttcctcatcttcgctattgtccgtatcgcaaccgggatttcgattcagcggatcgggtatttttcgctgcggcgcattgcatacgttccatcggaaggggtacagatagaactccgcgggcttgggctatccttgcatcccccctcgttcgcccaaccgacatggctgagtctgcgactcacggatctgaagattacgctggacccatcggcatcagggaaacggagcagttctacgacgaaactgtatacagatgaggctcagagtcagtccgaggacgaaccgctcaatcaacaatatcggaaaggcgaagctgcttctgcacgaaagaataaaacatgggcaaccttcaatcgggtcaaagagcgggtgaagcggatacaccggatggttcactggttgagactggtggatattgtcgccgtcaatactacgatcaattttctcgaagccggacagattcaaattgggactttgtcgatggcagtagatacaagacgcaaaatggtggatcggggaaaggtgtttcg

SEQ ID NO: 5545 - DNA, 6297 bp, Emericella nidulans
  unsure (1)..(6297): unsure at all n locations
ctagccatatcgcaatctctgaaggcttgagagtgtgggcactcattgagttatcatgaaacggtctcaacagcgcgatcactaaacgctttgggtctagaaaatgatgagtcctaacaaaagaagccgtcttctgatacgtacttctctcgctataactggtgaatgacaggctcgcctgcaactttgggaagcgtgagggtgattactacagttacaccttcgggctctccacagcttcttaagggactgcataccagcaatggtatcagcattctcattgagttctaagataaacagacttgtctcgcattgcaggacattcctttcgctttggtgtctacgaacatatcgtccacagtatgacagcgcccaagtacgtatggccacacccacgacctacacatatttcgtcgtaaggatgtatattaccgagagtaaatagaatagtatgttttgctcttgcacttcaaagcgaattcggatattaatcctgccatatgactgctagtctcggtcatgactcgttgcttgagactctcaaaaggggactctatgaaacttgcattattggcccaggactacttctgttctcaggataacgaatcaaacaaataattggttataacctcttccattcactccgtcattcccgtctattggatagtcgttcctaccaatcagccatatagcaaccctattagctttctcccgccaagaatcctgtagaaaatatctttatgagatccaagaaaatagtctaatccaacagcctttacgcgcttgctgccgcggattgtatttttacacattgctgtcacttaagttttgtaagaatgtgactggcattcctacccaagcacgcggcggcaacaagggaaccccgacaccgcacgaggtatgtggtttattttcttgttgtgggctcttttctgtagtaaatagaaataaaatagaaatatgaactatgcatcaggtttatatttcagcctgttaggtaacgttattgccaggctaggtacgttacgtgcatcttagatggataggagatcgttggcgtaagctgcaatgggatatctatgacatttccctttgcagattgtttaagtttaagcacaaggaaccgttgaggcgcagatgaacccgagtcctcgttagcgggcgtcagctttgggcggggcgcagagcngaggggtgtgttatttagctgagctgttatattgatcaaccgagcccgagccctcttacgctgactctttaggcaaggttgttaccaaatcgggtggtcccaatcgcttgtacctgaatctctgtaaattgcatttagatagcgtaagtcaatcttttcactgtaaaacgaggtcattaatgatgtttaatattatgggatacttctaagcatgttctgctgcattatatacaatactactttttccaagtgagaaaaatgagcctgagggtagagcaaccgctggccgtacgcgaggctgagacgcgtgcgccacgtcacagccagggaggatgtcgccctttctttctgttcttcagtctgagttcatcagattatgagcaacttttactatcaccagccggctgaaagagtccactttcactcaggcgctgtctctatgctcctctccatagtgcgggctctgtgggttcccgtcctgtgatcagccggctcactgtcaatctgagcccactatggctatgctaaccctcgacccgagcctttacactgtcgcgtggatcgctccacttgagatcgaggtacaggccgccacgatcatattggataaggtgcattcaagaagggctccctgtcggtcctggcgatgattatttgttccatgcgggtgagatacacgggcacaatgtcgtgatcgcagcgtttgctgccggtcagccgtatggcaccaactctgcaacatcactcgcaagccatgtgaagaagttcttcccgaacctgtggtttggtcttctcgtgggtgtttctacgggtctcccgaatttctcatgttcacctccgcgtgatatccgattaagcaatgtcattgtagcttggtctcctccgggtggagattatccagcaattataccttacggactaggcaagcagaagggagacgttggcttaagttgctgcgcaatggacattccctgcctcagacaggacgcattgtgggctccgcaattggtaagatcaaggcggaaaagggatgcgcaggtaatagagggctactatagggatatagcagacacggcgcgaaagtttccagatcgggggcaagaaaatgacttgctttacctccctggcgagaatctaccagttttacgacaacaccggccggacgcagaacgcacgcgtgtgtggtacggatcaatcgggtctggcgacaagctgctcaaaagtagcagagaccgggatgaaatcagcgacaaatacaatgtgattggcctagagatggaggctgcaggtgtcctgaacgtaatcccggtgggagtcattcgaggcgtctgtgattacggcacgagcaaaaaaaaaaaaaaaaaaaaaaaagtaaagactggcagccctatgcagcggtgatggcagcggcatttgcaaaagcagtgttggttgaagtcccctcaaagtctactgcttcagtaaatataaaagtgagtatgaattctggtcagtcgtcatgtcaactcatttgggaaagctttgtatgctaacttcattaagtatctatagaggcagactatcccagcctgcgagattcgttagccactgatccagaaactgagctacgacacattgaggccacaaagggcggtctactggatagctcgtttcgatgggtcttggaaaatgctgagtttcagaaatggcatagcagccccccagagccagttgctttggatcaagggagatgctggcaagggcaagactatgcttatgattgggatcatgagcttgtacggcaagttcagtcagagccattgcaatcgatagcctactgcctgtgccaaataggccttaaaaaaaaatcaaagaccaataaattctgatatcgatctctgagcacatctcctttcgtatatgtacgtgcttgaaagcctagctttctctaatcatcctattttgtctacgtctgcatacattctaagcccgcccctaaaaggccatgaggcgggagagcagggagagagcatcggagaggaagaacagtctgatactaatttttttcagccgctgtagtaatctcttattacagtttcatgacctctctggtaaagcagagaggaacagtagtctagctccatgctagccatttttttactagtctattctccccacttatttgctacattaaaacatccttttctcggcccctagtcagttgctgggtagctattggggtgccctgcaaatactgtgcttgtaaggctgctatgggccagtgaagtggttggccttcttggtgtaaacaagatggtgcacagaacgcttattatatggagtctgtgaccctacgagagagcatgcctaggcttacaggccggacttaggttatctatttaatatacattggatatcttcttcacgctcgaaaacaacaccacccacgtggtccctctcaaccaattatattcccgccgacgatccttgctgccaacctccttaagctgtcatgtccaagagttcaattataaagcctcccattccccatttttccaaagaaaggaaaccagtttttgggggcttcctgacatgctaactttttttttctcagtgctcttctcgagagtatctctcgccggcaatgccgtggacagtttctaccctcccctgaaccacacgacctatatcaccaatgcttcgttcggtacctatggcggggtctttcatgccccgtcagaccaggctagtgacactggagacagcgtttacaattactgtactatgcctcatccgcacgtagacacctattccctgccttcgccagtggcaaacggctccgtgggcgcgaagttggtgtatctggagtatatacagagacaccagaggcggacgccatataatattctaccgggtggagaggtttgtttttaaatttccccttcgtataggatgtttgttctcacactcccatgcagaaccaaggatacaactgcgacgcgatccacccacatctcttcgcagccccttcatctggcgctccagcaccattgcaggcctatggacaggcatatacagatcccaccaatcctttcttgacagactatgtcaacggctcctgccagtacccgcaactcacaatcggcgggtatctcgatgggtaccagcacgggcgtgatctgcacgaggtatacagcaagaaactaggtcttgtcccctccaatcttacccatgacgacagacgtgtgtggctacgatccagcacgtcgccgctgacacaggggtcagcgggcggcgtccttcgtggtctatggccgagccgcaaggagccattgccgctccatcagcaggctgagagcgtcgacacaattaaccgcgggtttccatgcgcgaaacgcgatgcacttctagacgcgatccagtcaacaaccgagtggaaggaacatcttactgttactagcggtttgcggaataagctcgcggatatgtttgatgcacaggatgaatcctcctggctggacacctgggatcactttgcggataattttcagggtcgactgtgtaacggctatgagctgccttgtcgtcttcaggaccagtctcaatgcgtgtcaaggcaacaagcagaagaagtcttccgcgcgggagactggatgtacaactactggtggcggaagaatccgaatgttaccgagtacatccagactgttgaaggtctctttattgcggagcttgtgagaaactttgaactagtgcaaagcgggagctcagaagttgtgtattctcatacatttgcgcatgacggagatgttgcgccgctccttggggcgttgggtatcaaggcgctgaggtggccgggaatggggtcgaacgttgcgtttgaaatttggtatgtttgcatcctttttctttttatagcttgtttctactttagggtcagccactgatgattgtatagggcgacagagacggatgagttctatgcgagggtgttgtatagcgggcggactatagagacagttcatggagtgctcgagtggattcccatacagaggctgattgagattctcagcccctttattccggaaaatatcattgctctatgtaaatgatgcggtgtaaataagaccgcatcagatagtcttggtctaagtagatatgcataggcgggagaagagtgagggaatggtcagaagcaggatagcgcaccttttgacttgatgagctcgtcagcgcagtagtcgaagctcggcgtgcaggtttttgcggcgatggttgtgcctgctagaagggtcagggtgtagaggagggttgattgtttcatattcgggctcgagagtctgggggttgttaaccagaaatacagaaattgttggtattgaagagagaccagaaaaggctgagtccttatgccatgaagagtcgtttataggagcctcacattctttctaggcttccgggttgactggaatgtcggaaatccggagattagagctagtaaagaggaatgcgggatacgtcgaagcggtattcgaccttccgaatagtctagacgtcatttgaacgtcttatatgttatatattcgaatatatttctagatattttccgccaagcgggtgaggtcggggaatcggaaaagtgagttagggctcaaattaagaacagtccatctacctacctacacgcaaaaagatgaaaaccaacaagaaccatacaagagccataagctaaacagtaacattccaaaaggccagtcaattagatagtccacgctaagacaaatttcctcagtaagtataaataaaccttggattatgctcgcccagctcctccgcctcttcctgcgtcattccttcaacccgccaatcctccttaccttccctcttcctcttattctgcctccggaaccatgcccagaagagcagatagataacagcagacatagcaacgaggcccatggagacggcatggcncttaatgaagcggggtccttcgtttgttttgtagagctggatagaatcgttagtttgacaattcttgttgagaggataaaaaaagagaagggggactgttggacaagtggtacatacaaaaggagcaggaatcccgcagaattccgatagtaagt

SEQ ID NO: 5546 - DNA, 724 bp, Emericella nidulans
gatatgtatatcctatgaataattatgcgtaaaacatgggctcttacatctattgcagcagaagaggtataaaggaccgtattcaaccctcataataaataataagagatatatatcaagtgctgtgcgttaatccctaatgatgttcgtcccactcctcactcgagttgtatggtctccttttgtcgagtgacctgcattacgtaggtaaacttgagaccagtggtaacggaaagcgataagacttacgcatgactgcatgaatggagaccgaaagaaagaaagaaagaacgactggtttgttgacagatatattcgaagccagggaggaatctcctctctgttcagtttgactgaccctattaaatatgtacatggtggccccgactgactcatgagagtagaaatacggcactgagtgcaggccagctatgtcaatagagctacctaaaatgggcgttgcggcaaaatggctgactagaatttcaaacacccagtccgggctacctgattcttgaatcaaatgtttcacaacctatacttttggctatcacatcttttctcctgctacccaggacaccggctcaagatctcactaggtgggtagatatatacctagaaagcgtattatatcacgttagaccgccacgccatcttccacgcagcgaggaatgatgagaaatgtaaaaggttaaaaaaaaaagagccctttttggtgcttttt

SEQ ID NO: 5547 - DNA, 6881 bp, Emericella nidulans
ctcctcctcctcctcctcctcctcctcctcttcttcttcctctctttctctctcagcgatcattcatcttatcacccgttttgagcttcttgagagtttgcaaagatttttatcgaatgcactcaaagtatacaaggtgagtgatttcagtgacactaaggcagatgaagctggcaaggtaggacgccgcgaaaagcttcatagccgatggccaggagtgacctctacctcagctaactgtgaaccctggaaggtccaaccgtcgtttttgcgtatgaataatcatcaagccttctacaactcgtcttcaccttctgggctgccgtatcgggatccaccctggtaggccagcggaccgagtaccttgagaatggcattgggaagccagcattctccctttccttcacagatagctctcgctctagctattgtcaaattgaaaccggcaggtctagggaccaaaggtataaccattatccgttctcccgcaaaatcgttgttaaacaggtagcagagtttatcctgcaatgccgagagtctattaaagcttccacgactgcagatatcttccagtctccccaaaagttcttcgacagcgtgtcattctggaagcaagcgtacgagaagtcagaggctgagaaaagcacattactggaccgcatttttgagcttgagcagcgcaatgaggagcttgtggggaaactgcggacccgggaaaatgctttgggtgaaataacgcccagtgcatcagtgtctgcgcgggattcgttgaagcgcgcggtcactagcgaccaggcttcacggaaacgcctcaaaccactaccgtacccgaaggagcactcacctaatgtagatgttcactctctgcctgtcaatatacatggacagccagagaggcttagggatcgtaagtaagccccgtggcatatcctggttttctactgacgttttgacttctggtcagctaccactccatttgtgaggcaatcctatgtcctacataagtccctacagagaaatcgagatcgtacaagtattgtccgagccgcagtcgctctgtgtaagacctgtgagaacgagcttgtgagcgtggttcccaataatccgtcgggagtcaggtcaaggaacggagtcctgaaagagcctcaactatcacacctcagcttggttttgtgtggcgtcgagtccgccacccatcttcttttcagagcgatcggaaaagttcctggaacccgtggctcagaaagtgagactggactactcacctaccacatcgtttccctgtatgcagcgatcatgaactgcctggagaggtattgcaatgcacacgcagtcccggtgaggatagagtaccaagagcactcaatccagaccaggagcgtgacaaggatgcaaacaaagtcaaccaatgaaccagatagccgctctcatatcggagacgactgcccaacacagttggcatcaatactgagccgaatggtcacgtcgctcgacctaaaatgtcccgaacatagacggctattagaaggatttcttcacatactgctaaatcgtgctgggaagattctaactctgttcgtcttccaggacctacagctacggcctaaccttcgaatggaccctgacaagctgccactccctgctggattgctagacgccgaggttgatggcaaggcactcggggttgcacaggctgaatccaagtatctggtgtgtctggttcgaggggctctggccgtccttgataaacaccaaacgtcattatctgcaccacttgaggacccgcctgatgttcagttactttccagaatcaaggcacggctccagaatacccttgttcaggcgatttttggtgccaattcaggagtcgaacagacattggagcggccagctgctccaaaaagttccaacatcaggaaactcctggaggaccatcacctttccgagatatcagtttccgagtggtacatacaagagctctggcaacttctaggctgggaaacgttaacgaaaatcaatcttcatgacgtagaagcttcccagcatatataataagatgttctatttttgcgtcttactcatggtatatctacgtgcgaggcacatatgggagtcttctgctacgtttgtggatgtattgcagctagagtatactatacccagcagtttcatttcagatttagaatgcgagcagcgttacctcccagtacatctgccactgtcttagagttagtgtcgaaagtcgcatggattgcttggtagttggtcgtcacgctcggccagctgttatccttcgagtccaagggagggaagaatggatgatccgtccctataagcctgtcagtatataaatgaagcccgaagaacagacgtaccaaaaagaagacgatcggagcccgacgcagtcatagccgcctccaagccaggcttgccatatactaccgcgtccaaataaatatttgtcttgagcacatcccacacactcctctgtggtccctgcacatcaccaccgccagagataaacttgcgctcatggagaatacagctctcaattcgcccagcgaggaaaggaagcgtgccacccgaatgagccaggagaattttcaatcgcggaaagcgatcaaagacacccgatagcagcatccgcgttaccgcaatcgtcgtctcaagtgggaaccctaacgccagcggaagtacatggccataccgacccgtcgtctcaggtccaccataagcctcttctggtaacccataatgcggatgcagaaacattagcatatctgtttcctgtagcgccttccaaaccggatcaagccttgcgtcatccaatcccttgcccagccctgaggtccccatgatcacgccccttaaatgctcgagcgtcttgagccgtttaatctcagcaacaacagattcggaactcggtgcactcaacggcaatgcaccgaatgcgaacaaggtttccttctggtcgagagtcaaagtattccccggatccgcggccttgttcacagtcgcacaggtcttttccagatcgtcattgatcctctccgcccacatctgggcttcagccggctccacaaagtctagccagggattggcgagggagataacgctgcagtttataccgtgttgacgcatgaatgatagcttcacattgatatcccagtaggaggaatcgactgggcgaccacgctggtcgagcgggatggaggcgtcatcatctgaggagagaataatcaggcggggatctcgattattggaaggatcgtgcacataggggactgttttgcggcttcgtagcatctgcatgtatgctggggggtagacatgtgtgtggacgtcgacgatgagaggcatgatggcggtcggttagactcaataccaaccaaagagagggatagggagagaaaaagggagagtggaagaagaggaacaatacttgaactgaaggtaagagaggttgaagggtgcattatgcggggcatatctagtcctactagaactaccccgaaagttgcggcccccaacgttatcactaaacggccttacagagataacactatcttctatctttgcagttatctacagcctatcttcctagtacctcgcaacaaattaggtgcagaattaggtaggaattgtgatatcgaccccggtctgcggtgatgatatatttgacggacttccccgctccccggcctcctccatccatttccttatcaccttttcgtttttctgcagcttttaccccaggtcttttactctgttctaccgcgtaatctttgaatatctgtctaacaaatctctcacataccattaatccattatctccgtaccatggaaggcaatatggacgttcaagcttgttatccgattaccgagacggtatcgaaagacggtctggtcattcctgtatggtgcctcagacccggttcattccctgtcatcgcagttaaactggaaactaaagacgacagattatcaacttcgctcccttccgaaacggcactccagctgacaagcacgccgtggccatgtccgtcgtccatgccttcaagacgtccggattcctttacctgaaaaatcatggcataccgccatcggtaacatcccgagtattcaagtcctctgcatccttcttcggcagaccccaagaccaaaaagacacattaggctggacaaccccgcaggcaaaccgtggttacgtccgcacgggccgggagaagctaagtacggttgatgaccaggcagaccgcacggtcccagatatcaaagagagcatggaaattggccgcgagggcgtggaaggtctcccaaaccgttggccggatcagcttgacgaagagggcaaagacttcaaaaacgtcatgcttgagttctttgagatgtgcaaggagctgcatattaaagtcatgcaggctattgcgttggggatgaatttacccgtgcattttttcgatgagtacgtggacaagggcgataataacttgcgtctgctgcattacccggctgtgcataaggatgtcttcaagaagaatcctggacaggtcagagctgcggaacatagtgattacgggtccattacacttctttttcaagatcgacgaggtggcctgcaggcgaggagtcctgaggggacatgggttgatgtgacgccattccctgatacggtagttatcaatgcaggtgatttgctagcaaggtggtcgaacgacacgatcaagagcacgaagcatagggttattgagccgccgaaagtgcctggcgcggaggatgatgacactgatatgtacccagagcgatacagcgttgcgtacttctgcaaccctaacatggacaaattcatcgaggctatccccgggacatatggcgaaggggagggccttagcaaggcaaaataccccggaatcacatcaggagattacctagtgcagcgtctctctgcgacgtactaacagttgaaaccctttactcgcctcggctctgtgcattccttttcattttctcgtgtccagaccattttgactatcagagaataaacgacacatgtagcgtcgcatctttacatcctcgctttctgagtacataatcaatatgaagatcgcaaaacactcagccttcccccatcaataaccgtgatattgccattcaaataacctcccgaagcacctgccatccaaagtaccaaccccgcaatatcctcctcacccccagccctagtcatggggatcttatccgctggaatgcccatctggacacccttatccccagctcaaagttgctcccaccgatatctccgagtaaaacagtccaggcgcaatcccattaaccctaatcccgtactcggttagactcgtcgagagcgccttaaccagatgattcacagcgcccttggacagattatacgcgaaatccaatggaacctgccgtgaatacccagcaatactcgaggtcatgataatctgagccagcggcggggacagcttattcttctctggcgcaggacggcgtttattcgccgcatctaggagaggtaggaaggcgatggcggtgtagtacgcgcctgtggtgttcacctcaaagaccttggtaaactccgccattgggatgttccagagatagtccttgagctcggagatggggagaagagacccatcgtccttacgtttgatgatagcaggtgggcctactatcccagagttggcgattaggaggtcgacatatcctgtttgggcggcgattgtctcatatgcagactgtagagattcctgggatgtcacatccgccgggacggggatgatgttttgtttggcggagtcgggggcgagggagacggtttcgcggagggagtcttcacggcgtcctatgataaaaaccttggatgcgccgttcgtagctagcgtcagggccattgtgcgcccgaggcctggagtttataagccatttggtcttgaagatgaggggaggggggaggaggggttgtaccgctccctccgccggttattacagcgacgaggccattgattttgtaaagatttgaggcttctaagtgcgacatactgacaagatagcggtattcgtggaaggagaagaaatgaagcgaaaagcaagagattggactcttatttatacaccttcctgggcggggttactcggggtaactccgcaatgcatcatcacgatgacagcttgcagagcggtttgggtccaacagtggctcaatgcattcttcctgtttcccagcgtggttatcccctgggctattgttgctagtctctgtaacgggcattggacaatgatgatctatttgtacctgcagagtactgcgccaaaacactcggaggcctgaactattaggctcggtaagatagttcgttacctccgcttatctccgatcgggacttctgtccgattctccttaccaactcgagccttcacatcatcgctcaacacacgacacgctttccacaccacatcctgtctagctgtattgcaatggacaccactcggaacagaaaacagcgacgagctgcagctgccgcctcgcgaacagactctttcgatccatcttcaatcccgctcgctcgacccccggaaaccgatgctttaagcggtcagaaaaaaggaaagactttggtggatctgatcgcagaaaggcaaggcgagcttgaagggagattgaactcatcaggttcgaaggaaaatgtcgaaaccaagtatgtgacaatcgaccccaggacgggcgagatttctcctttcgatgaggtcaatcactcgagcagcggaactggacaagaagaacattcctctgaagatagcacgacggatgaggcttcggaagatgatcgtcttccactctcatcgatacaattttgctt

SEQ ID NO: 5548 - DNA, 6698 bp, Emericella nidulans
cggtggcgtgaatgtggagtgttggtacagagtcctctgtggatatcgtgtagatgaggtctgcttcgacgccccattcgaggacttgcggcgcgacgcggactttgaagtgcactattgcttcagtgtcggagctccgccaggtgacatcgcggacttgggtgtgcatcgtgccgacccatgcgtcgtcccactcggcctcgttgccggattggccttcatcgttttgggtcatggcgcggatgaaggagagttcgggcccgcgctggaaaaggcttgcgccgttggcttcccaagtgacgtttccttgtatcaggttgaagccaaagattgatgtgccggttatgattcggaggcttgtttggttttgtttgacttccaggcctcccgaagtctggcgagagatcggagtggagcgcttgcttgaggaagtagaagcagaagagccgggaaaatatagctggtcccaggcgacgacatggcccctaactgcccaagctttgtcttctttgagcttgaactcgatggtgagccatgtctctttcgaaaggcttgacggatcgagtggcaagtccacagtgcggctttctccggcaggaacaggaggcagatctagctcttgggcctctgtggtttcgccatcctggacaatatgccaagaaacatcgagaccgctgagatcgacgaaggcatagtggtttgttatgaccatgctgcttgagtcatccgtcagattcaccgagacgggctggataatctttgcgtattcgagaagactgggcatcggggtatggtctgagagggttaggccgtccatgacgaagtctgcatcgttcggctcatcgccaaagtcgccaccgtaggcatagtattcaaggtcgccctcctttttcagcaagccgtgattgttgaattcccagactagtcctccttgggaaagcggatgtgaacggaacagctcgatgtattctttcagcccaccaggaccgttgcccatggcactggagtagtcagcagcctgctgttatagagggcggggaaacttactgtgcaaactcgcatagaatgagaggcttgtccgtgtggttggccatatgctccagcattgtatcgggtgaggaatacatctgactgtatatatcggcagtttcagcattgtggtcctgttcatagtggacgaaacgtgagggatcccgttctttgatccatttgtacatggcagcctggttttggccgtactggcattcgtttccgagcgaccacatgatgacggagggatggttcttgtaacgctcaaccagttgctcagccctgtcaaggtatgcatgtgtccactcagggttatcggaggtccaagccgcggcgttctcttcagaccctgcaatatcgcggaagccgtggcactcaagatccgcttcggttatcacatagaaccctagttcgtcagcgacgtcgtagaatgacgggtgctgagggtagtgagctgtgcggatcgcgttgatgttggattgcttcattcggatcaagtctgcgcgcatcgactcgtagggaactgttcgaccagaggtgtagttatgttcatggcgattgacaccgtagatgataatcggctggccattcacaaggaaattggagccactcatttctactcggcggaacccgaccttttggctgatggtgcgtccattgaactcaatcaggacagtatataagttcggcgtctccgcagaccagagtagaaagtcgtcgcccttgatatccttggagtaaatggtggacgaagacccagtccattcgtcaaccacgttgccgcctggggacaagaccttgacgctgaggttcccgtgctcgccctggatagtaacattgacctttagcgtgccgctagcgaatccgtcatcgacttcaggctgaatgaagaagtctgtgatcgcagagctgggaaacggcactaagtacacatccctgaagataccagaaagccaccattggtcctgatcctcgagatacgtgccgtcagaccactggtatacgcgcgtagcaagtgtgttggtgccttccgacgagaggtaacccgtaatgtcgaactcgctgggattgcggctgccctgactgtagccaacctcctcgccattaacccaaacatgaaaagcgctgtctacgccctcgtatcgcaggcggatctgctgcccatcccagtcggcggggacgtcaaactcccgccaatacgagcccgtagggttcatatacgacacatttggcggcgtaacagggattggatagtggatgttggtatattgcgggcgcccatatccctgcatctgccacacgccaggaacgataatatcatcccactccgtagtattggccgtgttccagataggagcttcaaatggcgaggcatcgtagtgaaatttccaggtgccgttcagactctgaaaaaggccctcatcgcggttgaatgtgagcgctgcctcctcatttgggtatgagtagaagtgtgcccaagggggtagagtgttgcggtgcaatacattgagattggaccagtcaggtagataagttggccagcccgagaccgctgaaagtgaggccatctctcttgctcgcagctagatgctcactactctctccgcttctgtccgatgtattgttcggcggttctccggccattatatacatgccttcacggaaatcatgccgtgccgccggccttgccaagcacaatgttggctatcctctgactaccatgccgatctcgttattagacctacagagagttatggcaaaatggactgaacgtagcatttgccaagtagtggaggcatagttcatccccgcgttgtggagatagtgtatatgagcattaccccgaatgttggctgatcgtcatatacccaaggggacatttgtccgattgggcgcatatttctgcgagttcctgatcgaacaactgtctgtagggagtctgagccggaggagacattgttttcggttaaaagccggcagaaatatcgccagcatgcatggcacacgtcattgtccgaccgcgagctcgaccttgagccgggaattccggcacatagagcacatcataccatcgattagtgagtttgtaagtgttgagaaccaaagagcgcagaccccgacggggtccagggttgggactgtgattgagcttcggggaggagaggaccagcagagtgacctcaaggaaatgcggggaactcttggcgttgaagtagtatcttgaagggttgaaatactgtaacaaatagccatactaaccagttgaattaaagcccaaatgcttagtattttataggaacctaagtctatccgtaattttatggtcgctgtattataatatgtgcgataagacttgctgtcatcattcaccttgtgattgctcaacaggtctatgtggtatcccgtagaagcttagcttctttgtggccttaggcagaaattgtatttctctctctcatcctctctaattcacaacttacgaagtagatacaacagcacctttgtcactcttcttgcttccgccaactccatctctatccatcttattgacgagcttatcaaataccgtacgctgaccggctacttggacttgaacggactgaacactgtcctatagcctcacctcgtgcccagcgcggggttctgttcacgatgggagatcgacacacgatccagcaaaacctcaatggtttgctgtcaaagctaaatgatccggaccctgatatgcgatacatgtctttaaatgacctttgcggtattctcagcaatccctgctcctcttacctggcccacgatcaggcctccgcaaccagactcgccgagggcttgctgaaggcgctggatgaccaacatggggatgttcaaaaccaggcactgaaatggttcgttgcagcccttgatatacttggtacttggagctgatgtctgcttccttattatagtcttggccctcttgttgctcgattacccctcgaaggcctacggacgctgcttgagaggctatcgaacctcactacctcccagactattgacacctccgttccaaataccgcattgcgggtcattgtaacagcactcccacgccctcagccaaaccaagcccccagccctgacgctaatatggcatactctgcggtttctgaagtcctcattccccgtttgatcggtcctgggccccataagcggagaggctcagtcacaaaaggaatgctggaaaaggaccctgccaagggtttcagcagcgatgcaattgatgtcctcatacaagtggcctcgtgttttggtgcacttctccaggagagcgagttgacggctttggaaaaggcagtcatgtctatcattgataacgatacagctggtactgttgtcaccaaacgggcattagctgctatttcagcattggttgtttacttctcggacgagcagtttggaatccttgtttctgaactcgtcgaacggttcaactctcctcaactaagcactgtccaccgtcgtcatttgattgctgctgtcggatgcttagcgagaacggtaccggcgaaattcggtcctcatctttctaccctggcaccgtttatcttctcggcagttggtgaagataacctggaggtaagccatgtcctgcattatttatgtacttccgcatctaacgtgtacagtagccgaaacaaaccaaagatctaccaccaataccgtcagttgcctaaagaaaagctaattactggtatgtagtctagcatttatttatgggctgggaatcccattgtaacctgaatgcttctggctagaactcataacctacgctgggcgagctgttaagaatagaatatcaaacctttgaagacacattctgaaagctactgctcaatagccgttcaaagtatcctccgtgtctctgcatagtctacctacctttcgacgaggttcggaagccggacgtctcgtcctcaaagtggagactatgtctgcaattcccgtcgaaccgtttggatcgtgatcttcgttgtaagtcaagctcgtaattagttgcccaagctgatcttcgatgttgttcatagtttccgtcccaaacgtgcctgcccaaagcgacctaccggcaatgttgtgccacctcgagcgtgccttccctgaggccatgaagaaagccgggtcaacagtgccgcagctcttctctctcacgcctctttttcttcttcattctcttccttctgtcctacgcccgaagtacgctttacggaccatctcatatcatatatcatttctcccgagattctttaccagacgagaggattctcaagatgcacgtaccctatcttttgattgcttcgagtctgaattttatgccgagtgtcttcggacgcaatatcattgatcttccatctgactacgaaaccgttcaagttgcttcccatcttcagggtcctggaaccattcagaatctgcttgaacgtgatcttggtggtgcgagatgtggtgcaggctatggtcggtgctccaacggcaattgctgttctactgcaggtatgaattccgggtgcaagtgagatgctgggctaagaataccacaggatactgcgggaacactacagctcattgtcgctccccggattgccagatcgactatggccattgcgacgcccatgccactccaggaggtccttcgacagaggctattccacgaccaaagctcgggaaagttgcgtacggcccaaccgcgattcgctcttgcactacccccggaaccgttgctttaacctacgatgacggacccaaccagtatacccgtgaccttctggatcttctagacaaatatgacgctaaggtaaccttttttgtcaccggaaacaacaacggcaagggccagattgacagcccggaagttccctgggctccactcatccagcgcatggtgcttagcggacatcaggtggcgagtcacacctggtctcatcaggatctaaacaaaatctctcaagtccagcgccgcactcagcttttgtggaacgaagtagccctccgaaacatcctcggctattttcctacctacatgcgtccaccgtactcgagctgcactacggatactggctgtctaagcgacatgggcgacctcggttaccacgtaatcctttacgatattgatacagaagactatagccatgacagtccagacacgatccaacgctccaaggacatctttgatgagaacctagctcgtgagaaaagtttttataaatcctggcttgtcatcgcgcacgatgtacacgagcagaccgtccacaatctcacggagcacatgttgcagaagcttatggtagacggatatcgtgcagtgaccgttggagaatgccttggtgaccctgtacaaaattggtatcgccgtgatgaccaggttaaggtcccaggaaaccccaagccgaaaccgcctttggaagacatctcgactgatgggaaatgtggtgggaaagtgtcatgcatcgggtccgacttcggcatgtgctgtggtggcaagggctactgcggtaacacaaccgaatactgcggagaaggttgtcagcccaacgccggttattgtgagagcgacttcttggacagcagtcaacaaacagggcccggcatcgttggatcctagtattctatagtgtcacctaaatcgtatgtgtatatacata

SEQ ID NO: 5549 - DNA, 4383 bp, Emericella nidulans
  unsure (1)..(4383): unsure at all n locations
aaaaatattaggacaaaaaaaaaggtaataatgataaattaaaaaataaaaccgtcgaaaagaaaatgagacacttacaaagaatagagtggaatcaagaaggataatgagatgataaatacctatttcccattcccttcttccttctctctcttccccacggctattcaatcaccgcgactacgctgttaacccccctctttgccctcttccaatcttactcaacggtacatctcttttcatcatattccggcctggtgctgctctcttttttgttcacctgtatctgcaaggggtctaaaacagtctctaaagtccctttagccttctgacgatctcattctggtccgatccgtcttgaacaaggtcgatccgcgtttcaaatcaattaccttttattactttgcttggattttctctccatcactcccgacatcttcgacctcggcttcagcttcagcttcgataccattaactgtcaacagagtctattttcatctgagcgataaggtacggtattcgtcgctttgtatttctatacacccaattggttgttggcgggttgtcgctcctgtttgcgtctgcgctccagcagtattcactaaaccacgctaaaaaaccatctttctttgaaagcgatcgctcagtctggctgactgctgaaaatagtgactcaacttgctgtcctgtcgcctataccatactctatcctccaggattcggaaaagtgcctggaagtgatcagtcaccgaacgccctcgtgctatcgagctgcgacgtctgttaaatcatttgacacagccatacgaattgcgcgcattgactctgacgtcgaccggcacatttatacctggacttcggttattctcctatttctgagttattgctccgtatacgacggattattgtcaaaccagagtatctacagcagatcgactcaacgatggcagcattacgggcgagcaacctgctaggcgacccgttcgcccttgccacgagttccatcgcgatggtatgtcatgaaggcagaagtgtgggcatgcggctgacaagatgctagcttgggtggttgattgcgtttattgcatccatcgccgcggacgtgcaggatccttaccctagttttcaatggtgggccattgcatactcattctgctgtaacgttggagtgattgtggtgtttctcacagacaccggtctcacttacggcgtggcggtacgtttactgtgtccttgtcagcacgctttgactgacaaaactcaggttgtggggtaccttgctgcctctcttgtgatgaattcgatctcggcaaactcgatgttcaattccaagagcacatctagtttccaagccgccggtgctggcttcattctgctgtgcatggtcaatgtaagccactatatgctttttgactcaaatatgttctaagactggcagatcgtgtggactttttacttcggatcggcccctcaagcgaaacaccgtgggttcattgactcctttgcactcaacaaggagaaccaaggctcgtatggcgccaaccgacctatgtcatctgcctacggtgcacgccccgagaccacgacgagccgtccccagatgtatacatccgctcagctcaacggttttgaaacgtcgtcgcctgtctcaggctatcatggcggtgcccccggggagactcgtagcccatcgcaagcccgattcaccagtctcggcggacccaatgccagtaaccctgacaccgtgggagagattccgccgccgacagaatacccatacaaggcaaaggccatctataagtacgaggcaaacccagaagacgccaacgaaattggcttcgagaagggagaagagctggaagtatcagacgtcagcggccgatggtggcaggctagaaaagccaacggcgaaacgggcattgcaccatcgaactacctcattctgctatgatggatgccgccttcctttcttctaccttctttgtcgtttccttttctggtttgtcatgggcccttgccggttggcgagaaaatgtgtttgatacccttcgagttgtatcactcggcgtgaatttggattgcgaactaaagtcatgttacgtcttgatggtttgtttcttcttcgatttatttttttttctctttggacttgctgaattgtaagatctcacttggatatgggcttggtttcttttcttcgctccccggcccgttgaaaacttgggatggatgatcgcactcaggtttgataggatgttttattgtatttctctttgtctgatatatctgatacgcatgagactgaattggatgatgttcattggacttcagcctctcgtatgaattagaatggaccggcttcttgggagcgtcagcacccgagccgtttcacggcccgggtgaggcaacgtttacagacatgcagtaatacgcacggagcacacgctggtgctatctgatccagaccgttggttctgaagattaagtatgtatattatttaccgttgaacccgaactacggaaccatttccacgagaacgaggttcagcaatctgtccgtcatgcataaagccagggttgcttcaatagttttgttgccaactcattcatgcagacatcctaccttggatggatgttcggccttcacggcagttatgccgagcggtggtgtctggcctatctcccggaaattacctgttatttgcagggcgaagatcatggtctggaattgggtcggaaggggccgacgatgagatgattactagaatggcttcgaattgagggcgagagaaggagagagaattggaaagagagatggaaactggaaagagaaatggaaaagagacgaatagaaacagatcgagtgttcaccccatatgaagtagagcgccagacaagagactatttatgcagagggtcggaatcagagaacgaaggacaaggctcgccgttgagtgacagctagacggcgaatggggctgtagccgcccgacatttgacggacgctcagtttcgttgcgtgcttctattactgggctggactgtcagtgctgtcagtgttgacagtgttgcactgcaatccaacccgggtctagtgctctccccaggcttctcgtcgatgctcgtggtttcccagcctgcacttctgactatgtttagattttctctttgtatcgacaccgttctctaaactggttatctctcaaagcgttccattccagcatgactgatcgcatcttatgaccgactgagtgctaaaggatgtgattgtccaattctgtcccccttaagcgtggatttgtttaccggtcagctgtcacgatgtcggaacgacgctggtccaccaggatcaaagagaaggggtttaggctcttgcggcgatcgtcaacgtcaagcagacacagcaaaaatttgcctctggtaaccgcttcaacttcaaactctacgcatgacctgcatcctccgcggtctcgtcactcccagtactcccaaccggtcgacggtgcctaccaagggcagaaggcggcggaggcgcccgctgggccagactctgagccaaactctgcgtcgtccgcaaccaccacgccgcccatctccacacccaacgccctcgcgaatccgccgcctctctcctccgccagtcgtccatccatctcctctttcactgagtctcagtatactccagacgagctagccagtgccggtaccccaggcggtcaatactttttcgtccctgattaccgacaacccacgtctcctgctctgccagaggagcaatccgtcgaccagacctcgcccgctaaacccgtagcaagggaacaacctcaatctcaactgcaggagtcgcaggctacgcctcgacggtcggatcacgaccgtgagcgcgccaagtccggtgcgagccgtaaaagcgtcccttttgagcttctcgatttccctctccaaccgcctggaaacaccgagccctctgctcctgtgtctcccgtgagaaccgaccgttcgagcgcnccgccgaccgccagtcccaaccgccgcgagcgtcctgtatccggccctgcagaacaacaatcgacgccgttgccttcggttgcagaaaagtccgctgtaaatacttatcagtcccttccgctccctccagccttccctagccggctaagcgttttccgtcgtcagtcgctgctgcctgcgtcccaccaacatttggtaacctctatactggacactgattcgtttaccgagcccgaggggataaataaacacctcccgactatgggatcggggatgggactgcgcaagatctgggttaagcggccgggcggttcggccactcttcttcctacgtcagaggatgcattggttgatgaattgcgagatcaagtggtc

SEQ ID NO: 5550 - DNA, 4207 bp, Emericella nidulans
tcgcgtcgacgtctttcttttcctttgaactccgtctcttggactttcctattaacctctttgcatatccgcttccaaaagcgagatcgttgtcaacagacgacgaagacgagttgtagaaggaaaatatactcttgctcctcttgctctgtcgcttcttgctgcgattttcagaggatgcggtgaaaaaagagccgaaccaccggctatcttcttagggggccgagatatattctcgtaagacgaaccagacgaggaagatgactttctgcccctagacttcttcggagaaggactgcgaccacggcttcgtctccgttcgcctggagatttcaccaccgatgcggctgctgtgccaatcgcggctccaatagcggcatcgcgaagagtatgacggttggctcgcgatgaagatcgagatctggactgaacccgaccattgattcgtgacccttcgtagcggcttggtctctggtcacggtatccaaaactatcccgcgagtggctacggtgcagctgcttgtaaacaccacgtgaagtcttgctccttttgtctgatatagagtcactttcagagaaggcgcccgcgacacgaccagacttacgcttgtacgagtcgtcaaagtccttgctgtcgaagagcgacttggccacatatccaccaagtatggctggtagccaagatgattttgattttcgccgccggcattcgtcttctgaagatgtgtagcggctgaatttgtccactcgagaaccaccactgaggcgatctgacgaccggcgtcgtctgtagtggtgagttcgcggtgcatccctcgaagttgtaccaggttcaaagcagtatttgcagactccgatagcttcggtataatcttcgaacttgccaacaccttccgggtcacgccagaaatcgataaacttgtctagcgggccgcgttggcgttgctgaaacgccatagctccaccttggaagggtgatgcatggtagatcgcagcgtggtgcgggtgcagaggactagcggcgtatggagcccctgcagcgcctacagcgcctgcggccccagcagtgtatagagtcgggttaaatggcgcactggagtatcctggacctatctgagacacgtcgtccgggttctgcagtgtgtactgagaaatgtggtctgaactggaagatgaatggtgatgatggttcaacatgtacccagctgcggcgccaccaagcacagcaccgacaccatgggaatgaggttgggtatggggcggcttattaccgttagtggacgtaggaggaacgtaagccgccggtgattcggttagaacatgttcgggagaatagttacccaccccatacgtcgcagttgcagctgctgctcccatggcgcctgctgcttgagccgcgtggtatggtggctgcgacgagttcgacggcttggggggcctgggttcggggccagagctagaatgaccagaattttcaatgtcaagcgcaggatcattggcgaaatatgatgcagcggctccgacttcaccaagactgctgggctcaggaggcgggtttgcggtaggtgaggctgtcatcaaatgcgcttgactattcggaataacaagcggaggcttcggtcgaacccccggctgctcttgaacggactgtccctggtcattatagtaatcggctgcttcaccggcagggttgggaggacggtaaggctcggcataggaggccgggaactgtccggggaattgctgttgaacgtggggatcgtaaatagtcggcgtaggagccgcaggcgccgcaggaggaacagagacggaattcatgggaaactgaggaccttgcgtagcctgtattgggtcgaacggcgcaggcatccgcgctgctcgcgatggggggatagtagttatccccagaatatacccgctgccgctcccgttcgcgctctcgacggcgactatccctatctctctccctcgaatgctccctatccggcctagccttcctgcgctctctcttgtagtcaatatctgggtctcggtctcggcctcggtcacggtcatctcgatagcgatcgctgtcgcgctcatattccgactcctcgcgcttcggctcccgctcagtataaacacgatcgaccgagtcgttattcggcctggcagtcgcataactcgacgccactgactccccagctgcgctctccgcatagcgcgcgcttctgctgcgactgccggcagccggatacgccgacagatcgcccaagccccggtcacggtcgtcaccccgtgaagaggactttcggcttactgtagacgaagcagaggatctgtggccatggctggacttgcgccgactgccactctttgagctcgagctggtgctgctgcggacgtcagaggaggaacggcccccgcccatgagggccttgaacatgctgggcagagagctattcacgctctggcggttagacaatcatgtgggcttgataatctaaatcgatgggaaacaaaaagattatgagtgcagtgaatatagtcgtaagatgaccatataatgtgctgggaataagagaaaagtgaggtgctgaggaggctggactgggctagaggcagtacggtatgttttggcggcggtaaacaagagctgaaccgtggatctgctgtggtggacgtccaagcgggttggttgctccagacaatcggccactagtgatctagcgcctggatcgggttgggcacggtcgcgaggaactggacgggcagatcgcgaagattcgaaggatggggagtggcagggggtctgtctgaatcaatgttaagcggagatagataaagcacgcagtattgttcggaaatatgatgaaaaagggacaagatcgatgataatgagttgttatggcctgctttcgatcggagaaattctggcttgactaggtaagctgaggatttggaggaaggatgcggtgaggctgggcggtggggaaatcgcacgtgctgtaatcagggtggctggtctgacagcagggtacttgcctcgtacctggatgcaagcctacggagagcagcgatatctggttttctcgttgagagggacaaccgaatctaccccccatgggggggaattaaaaagacccccccatgggtcattccgtccgatctgatctgtggttaagatgaccgagaaatgtggggttactgctccatacctcaggcaactatatacatatcaacgtaagtacacatgcacgtgctcatcagcacaataggtgtgatagctattaacctatacaaggaagaaagtacgggtagtatagaccgcaaacggtatactatatacagccctataccaaatacaccacaatcacgcagttgaattatgtataaacaccagaacccaacccatcaaactccaccctaatcagctctcatcaacttctccaacttaatgcggttcgcatgctgaaaccaaagcggaaaccccctaaagcacttcgcaagccatcccgttgacccgggaagcaggacatggccactcttcccggagagaacctgctccacaatgccctccgcgaccgtctctggatttaatagcggatgcaaccacgtatcctcaggagttaacttatcaattagtcctgtgttaacaaagctctgcgtgatgagcacggtgcgcactcgcggcgcattgtaccgcgttactagttctgcaccgagaccttcatggaatgcgatcgcggccgctttagttgctgagtagtcgaccatgttcggcgtgacagtgtatccggcctgcgaggcgacggtaacgaccatgccgtggttattcttaatcattccggggaggaactccttagcgagccagtagtgtgagagcgtgttgacttcgaactgcagacgggtctgcgactccgtgctgcccagtatagtgcggctgctaagaatgcccgcgttgtttatgaggattgtgggctcgcccattgtcgtgcgtatagcagcggctgcttcggcgatggcagaaggcgacgtgatatcgcatttgtggtagcggacagtcgagggcagattggcttgtccgtcttggggaggctggatgtccaggatcgcgaccttgatgccgcggttcccgagaagttgcgcgatctgtcgcccaatcccgctactgccgcccgtgaggacgacgacctccctgtgccagtggtactggtctgtgaggccg

SEQ ID NO: 5551 - DNA, 4641 bp, Emericella nidulans
acctttgccagaggaagaaaaagtcaacatcaggcttcaagggggtgaacggacattcatctcttttctcagacagcgatgaaagggcttggtcagatatcacgcacgagtacgagatccacggcgcagtcgtggatgcggacgacagcgacaccttgagtgaggctcgctctgaaacacggcatttccctgacagagtgcagttgacagtgatggctagcaaccaggatgctgacataggaggacaacaatctagacgagcctcgcgacgacaacctggatgtataagtcccggtcgaggccagtttttcaagcaagaatttgcttccgaacctgagcatgagctcgacactaaggacgaggacgaagagaaagaagactcagatggtgacgaagagaaaagcagcagcagtagtatccaatctgacaccgacaccgacattattgacacaaccggcgcaaacccagtgcctcattcacctcccccttagcatacctcacagcaaaagccggcaacaagaacgagtctgaacggtttaccgaagaattgcgttttggacgtgggatatcaaagtcctcatctctattcccagtcccaccacaaacaccaggccagagacaaaatgcaacttctcctacccaaggccctgcgcggccatgatacgtggcgagcaccataccccagcaaggttatatctcacatcttcggctgcaacaaagtcacccaacagttcctgccctgtatctgggtatactactacgggggacattaccagcgagccagatacagggctgtaagcgatggccgtgagtgggcgcgaatacagtgtgaacgggtgctcgatttgttagaagcaatgaggacgtgggtggttgttgaggggtttacaaggcattcgcggagtagagaggctgaggggctggctgtggaagccagggttactgctgcttctccaactaaaccaaaagtaagggaggacacagaggccgctggaaggagactaggggagtggacgagttgttgactcggccttggatttttcgcggacaaagacagcgacgaagatggacagctcaaacaagagacacggcaagaacgcccctccggacccttgctagtgccggactggtttgtgtcctgggtccaaagacaccagagcagagtgcttacaattgaacaagctggggcgcttacccaaggatcttgacgcatctaatgctgtacaggcggacatcgagatcttgcctgtgtattgagagggctggtcgccactatcactcacgagtctgcagactccggttgttctgtacgcggtagagctagatcagctccgttgcttgcagctctgggtctggcgacagagcacggcacggcgccgttcctgctcgcgacaccaataacaattttgggagaccattcaaaagacgcagaaacttcagccctggaggcgctgtaagtcgatgtagacactaagatgagcagagttagaatgcagtcgaaccaaagctttcattaacattaaattaacttaacaatagtaatcgtagccagacgccttcctatataagattaactaccgaacaaccgaacgcgagaaatcgacgagactgtcaacagtcaaattgaacaaacaggtaatggtcacagttgccaccgtttaccatgtatgggagcctgcgctaattgagaagaagagaaaagagtcgttgacggcaagaacaagacggacgaacggtaacaattcaagcatcacgagtgatccgggatcaactcataacctccctccgaaggcagactataagccgcgaggataatcgcgccagcggagaagacgctcacgcaccaactaacagtgcaatatatccacgattcgtccagtcgccagcccacgaaaaaccgcggttcgttttccaccagatatgcctgttgaaatgtcagtcatacagcccttcacctccctgccaaaaaaccccatccgaccacaaagcctggattggaacggagacgtaccacaagtcccatacaccccgcctgcacagccgcaccagcaagaataaggagactcagaaccctccatccctcctccctgagcctctttccgccagagagcacaatgagaaacgcaacaacactcaacccctccagcacaacggcaaatgacatcccaaatcccacggtccgccacatcgaacaaaagtaccggtcttcaccgatacagtcttcacggttgggaaaggcctcgcatgtatctgttaaagaggaacaacgccggtggagcccgtaggaatagtcgtacgatgagctgtggtaggagacccagcgtgggattgcaatggctgctattgaaagaccgaatgctaatatccagaaaacggtgttagtatgcgaaatctaggaagggagaaggaatgaagggcagggcggatatacaggcaagaaagactattagagaccccgagtagacgattgtctttgttaggaaccccgtatagttgcggtctgtgccgcggggaatgagatggaagtccatcttcgagggctgggcctgaggggtggcgccggtaaaattgagagccccgtgtgcacgtaggtggaaggtcgcgggttagttggcgatgacgcaggcagccgttgcgattgagatacagataggcgtttgaaataccccaaagtttgaggtcgaggtggtggaggcccaggtcctgaagaacgctcaatcttcaggcctgtgacggacagttcaagagaaggtcgaataaattgaacagataaaagacaataatataggaatggggaggaatgtgagcgacgagtcagagtgaggggagaagaggtgcgagcacagacacccacgaccactgccaccaactcgttcaattcacctgatctgtgctactacctacctgctacaatactagagtagcacaccatccaacttactgatttttcaccttccgtcctcatctgatcgcgccgacgcagactaatgtcgcgaatcctgctttgctcactttcctggccaataagccgctgctgccgccgttgatcatatgaggcgctgatgatgggcgttgaggtccttatcagtcgagcccatggaaatacctactaggtaggtggtctgtagtacacctatgtagtacactacatggatctagtagagcgatggttttatttctgtgaaagtgatggccaatatcctagatgtcggaatagcttcacttcagcccccaccaagtaaaatcactgacgtcatcacgtggaacaacggtcgaaacagcaaagatcctgtcagaacgaatcgattcgtctagacctgtaacctgtagataactttaaactagaactgcgaatagaatcttgaccgccgtgtctccgccttcataaacattagtgaaaagcgagagagagaacaaaacatgacaactattctacaccatgccttgcgagagaaacagcgaaggagaaatggtggaaggtggcagcaagtattgggaataaagtacaaaacagaaagattgatgccaggattaaaagggtacagaccccgtcatgcacatgcagccgttacaacctatgggtgcgcctttcattatgatgctgattccgagttcgaatcctcctgactccgctggatcatcgcacggaagtcatcgttgctcttctggttcttgctcccctcgccggaggcattcgtcgtggtcgtggtcattgtcgtcgtggtactcgttggctgggccgttccgcgcttcacccctaggtgcccgcgcttcccactccgccctccgggctggggcggccgcttgataggcgccgtcggggtaaggaaagagctcttgggtttgtccttgggtttcggcgcctgcactggcgcttttttctctgcggactgcttcagcatctcgcccacggttccaatgtgcagtttccgtcccggcgtgatctcctgtcctttcagttccagagccgcttttcctgcatggttgacgtccgcatactcgacaatcgctccttggtgatccggtcggagtacaactttaacgagtttcccgtatggctcagcaagagcccggatgcgcgcatcgttcaccgtgtctggaacgttcatcaatcccagcgtacggtccctccgctcacccgtaggctcttccaagtcggtcgccggtggagcgccattagcctccggagcgggagattgtgacttcccgacgcgtgtcaccacggttgctgcgatccgttttgcgccctgaggagcagacaccttcacgtggagcgggcggcctcggaactcttgctcatgcatagccagcgccgcagttgcctcctccttcgaactaaatacaacataaccaaaacccttgctgcccccgtcgactttcctaggaagacgaaccaattccactgtgccgaacctggagaacaactctttcagatcgtcctcacttgcactccaattcacattggaaacgtggatttccctgccttcatatattgggccattgcggtcttgcttgcgagaaggatcagagattttcaccacaggggtggagccgttgccactgccgcccgtccatgcaggacactggggcttgcacagagtttgaatgcagtaccaaacgtcgtgcggtatacttacgaag

SEQ ID NO: 5552 - DNA, 4116 bp, Emericella nidulans
  unsure (1)..(4116): unsure at all n locations
atgcggtgcaaactaatgtcagcattgttgagcattcccttcatcgacaatgcttatcctacccatgccgccgagcaataccctaaaaaatgcatgttaggaaccgacgatgcgaaaatgtgagttctggcagtcaaactcacagtcctcctgctcccaattcctctgcaacgatgttcgagtgtagacccgtagcccaaaaaaaatggtcatgaatattatgcacagtgactgtgtggcgtagttccacttctgcatcgacctatccacatggtgctcgggagcggcatcacgctcgatcagggattgtatcagggtcatatcggacaaagcatggctaaaacagtgaaggagaaagcacgattgtgtcgtaggatggatatcaataaggattcaggacccagggctcacggcacttcatattaccgcaagggtaattagaactagggagaaactgcatatcatgattggtggatctgatagggttcagcttgggttagatttgacttggcgtcttttgaatactcttatggcctgtgacagaaagacttcagatcccctgagaacgcttcgcatggctgaagcatccagacaaaagcaaaattacactgatccatagaatcggggaatgtaaacgaatatgacctgtaagagggtgagacaagctctatgatggacgcatgcgtcacatgccaaggtcgtggtggaccttctcgtcggcttgggaaaaagtcgtttcgcccagcacggctttttactcgttgacaaaaatcaaaggatcgttctattacatagtcttaactttgtcttccgtccgtccatctactgtggctacgcaatgacaaaccccgtaacgggttcaaggtcaggagctggaaccaaactccgcgagttaaccgccaagacctgattctgcatagaatatcctagataaggtatattttctgcatgaaaataatgatatatctaagtatagtgtttatatagcttgtttgtacagtcggcctgtccgcacgttacccgaaaacctggacaggtgaaaggtctggactcgtacccaacctgcgggtacagaccgtgtcccagacccgacccatcacgagctttgggtcaccccgtcacgggtaacctgcgggttgtcagttccaactgtggttgtggttgaccccaagtcattttcttagtgcagtgggtctaaatcctttgaatattgccagcataacttgaagctattccaaccaaagctagtgctctgtacgacattctgcttcaattacagcctgcctccttacctgcgtttgaatctaaaaaggccgtctaaaccccccagaacagccttccaagtagggggtacaagctcccgccaagcattataagaagcctatcctctggtttcaaatacatccatcacgatcgaggcgtgctgaaacttgctgatgttgctctggtcaagcacttcaggagctttgggtgtggcgggcactgtaaagaaattcaatataaaacattagtggtcttttaaattccactctccagaggttttcgaacttgattataagctaatgaagaaggcggtaattgaagacattgaccgctctaaaggattcagacccaccatataaatgaccggggcctaccacaaaagccacttcatgtactagagcgatctgatcgggtttcccgaccggctatcctttcgggtagcgtagacgccatcgcgacgatcagacgagtgaggcattagattatgtaacaactggcacgagtctgaatttagctgacaggaatcctgtgggtcttagtgccttgtaattagactcaactggtgcggaacttgcgcggaatacggttcccggtaccccctataatcagacccgcgtggctcagttgggggaaaggtctgaacgatgatcagcttactgtctactgcctccgcgtgagagctatgctaagatttcagaggttccgtttgtcgagatacatgctgatccaagacctatccacattggaaaccacccagcgcgctctttggccttccgtgcatcctagcatcaatggaaaatccctccaggagcgactgatcggcatgagtctaccctgtgtatagaagagcggtcatccccagtccggagattcctcggtcagcagaagacgggaagtgcggcccaatgccgcaggtcagatggggcctccgtctcaaaagatggccataatgttcggcggagacgacacaccccctggcatgttgagtggaatcgacgctacgaagaagctccagcgcttgtgttcaatgcacattcgagctagagcttccagatcgaaaagttcgcctgttcgaaacaattagcagagctaacaggtcaatcctgatcgcaacggcccatcgcacttaccaattggcattccccatccagccagaacgtactcatgcaggaaaatatcggactgaggcggataaacctgccgaggtcagtttctttttcctagacggctgtgattgcggtctgtaaacataaacggtcagctcacctcccaactgatagcgtcactggcaatcgcagcgaatttctcattccatagccaccgcagcatatcctcggtggcttccacgccggcgtgtaagggtttgctgttgttggaatactcttgcttctgggcctccgtcatagtatcccattcttcggtaaccccaatccgcacaaataggatatcgcccttcttgaattcaatctcgcattctttggcaatctcctgtatatccgacaggcggacttgatgggtcgagaaggtgctgtacttgatccctttcttcttcgcccaactggcgtagtcaatcaagacgccgcggcctgtgtaccggcacattaaggttagaacagaaccccagggcgtcttaccgcggggtggccgccatacctgcaatgccttccttggcccaatgctgcatgccgatgcggtcattcttccgatcgtagatctcggcagctgttgtaccgccatagaagacacgctcgctctgtccaggaacggtctgggaaaaatgtcgaagcccgtcccattggctactctgttctagactggcattagcgttagggttacggagaaccaaccaaaaacaaaacgaaagcaacctacgcggattgaattcgtaatagtcatcgaacgccaaaccgtctagcagtggcacgattcgatgtttacacggctgtcgaccgagattgggataccccaattccgtcaatgtccaccccatggtaacgcgacggccagtccgaatttcggacgctgccgccccgtgaaccacctctggggtcagcatgccgagctttgcctttccttcctcttcgcttccgggctctcctacccacacctgtctggggttggctagctcatcatagggaatgtcgtagggcgactgggacaacttgctgtctgccatcttggctcagtgctggctcagtatctcctgcaccagactgtccgtgagttggaaaaatcagataggcttatgttgatgcggggtcgaggcgatgctgggatgtatgcaactgcgtatgccttgcttgggtcgtgggctggcgcaggtctatccgtctttaaatcgaccatttcatgcatcggcttgtagatggggcctacgctggctccaagctttgcgagctgaataccggatcagtggactaactgacggcatttgacaagcgaggccctgctgcatgttctctcacgctgggtacaagggagggagtggtactgatatggacagatcgcttgacttcgtatgccgnttaacacccagccctttttaaggtgggggaaattactacttccccatnagcatttgcagagtgggtcaagcttttgaacttttcatccgcgctaaacacggtaagttcatggtaaattcgttcgccaccgtcttttcctggcttggctcaagaatcgtggatgcaaatccttggattggtaaaggtcaggaagacggctcttttttttttttttttttatttgtggggaaaaaaatcctcttgtggaattattattttttttcttcccccctcgtgggggggggtgtttctcttctaatatttttctccgcttgtttttttttttttt

SEQ ID NO: 5553 - DNA, 8486 bp, Emericella nidulans
cgactcaacgtacaacatctcgtacttccgcaaaatccccttcgctgcgcctccaaccggcgaaaaccgcttctgtgctccgcagccaccattgcctgtacgagatggcatctatgacactgaccagtccttcgacatgtgtccccagcgcacggtgaatggatctgaagactgtttgtatctaggtctgttttcacggccttggaccgagggttcgagtgcggcttctcgaccagtcctcgtcgttttctacggtggcgccttcatacaaggaagtgcatcattcactcttcccccgtcctcgttccccgtattgaatgtgagcgccttgaatgattatatagtcatctacccgaactaccgagtgaatgcttttggcttccttcccggaaaggcagtcaaagactcgccaacctcagatttaaacccaggactcctggatcaggagtatgcccttaaatggattcaagatcatattgcccattttggaggcgatccacgtaatgttactatttggggccagagtgccggcggaggctctgttgttgcgcaggtcgctgcaaatggacgacgaggaagaaagaggcttttctcaaaggcgcttgctagctcaccattctggccgaagacgtatcgctacgacgactacgaggcggaggttatctatgacagtttggtcaacttgactggctgtgctggtgagaatgattcattggtttgcttgaaaagggttgatgtccaagcaatccgcgatgcgaatcagatcattagtgctagtcataagtatacgacgtcttcgtacacatgggcacctgtcattgatgatgaattcctgctccacccactaacagaggcaacaagtcacagtttggtcgaaacagattacatctttgcaacgtacaacacccacgaaggcgaaaactttattccgcctggctttgcctatgagaatacaaacgcaacaagtgactccttcaactcttcatcaactagtttccgctcctggctttccgggatcttacctggtttatcgccgtctcagatcctcaccctcgaacatcgttattacccggaaacaggccaaaccgaaacgatggacctttacaactcgacctatgtgcgcgcgggtctggtttatcgcgatgtcgtcctgtcttgtcccgggtattggctcgcttctgccgcaagacagaagggctatttagctgagtatacgataccgccggcccagcatgcagatgatactgcctacgtttgtctcctccttgctcccttcttgtacagtatcatactaaactagagagaatgcagtggaacagaataaactccgttcagcaatccaaccctctcatctacagaggcttcgcgggcgcgtttgggtcgttcttccagacaggggatccgaatgtgcataagttgactgcggcggatattcctggggtgccagagctgaagaggacaggtgaaaaatggattattaccgagactgggtttgcagaagtcaagttaagggagttgaaagatagatgtgactttttgagtgggattggggagagaatacccgtttagtatctatgtaaaccagagagtgtgcacagtatcaaagcatctgttctctcaggcgcgtttaatcttccatgaatacgcatcgaagaccatgctacgttctgttgtgccacctaagcaatcctacgggtagttggccgccgttgcttcatagtcgatgaaatttggtcaatgactcactcaagtttataccattatttactttcatgggggcaactaccagctggaaattctaaccgcaagttcccgttacctgctttacgcatccacctttcaccgtcacgaaaggcttagcgagagttgctaatttgttgtggctcagaaatcacggcatcaattccaagccacccactactgcggtgtggttagtgcactttgttttggacggatttgtattatgtatggttgctggcaagtagactgatcagttgagctacgtgtctgttaactgggttatgagtgtgtgtcctgataaattgttcgcgagggggacgcggagagagcataatgtggttgctgctgggggaggttataaattgagttggagaatctggagattatcttctggctgatgtcattggcaaccgatccggatatctcgtttgatgcactacttgacgacgcctcgaaattatctaggcgggtttgctaccaactctggcaggttatgaatgagtgggccgcagagtatagatattaatatgatgcatcgtctatatagatggaagatgaaatataatacatgatgtgatatgataatgatacagacattatgagtctaaaccaaaccagactgcatgggtatttatccaagatcattccagcgccagcaatgaatacccacagatagaggagtgacattataaatgtacaagtacaagtcatgatccgaaagtgaagattaaattagagcctggcccctgaacataccctcacgaacctccttgaccacatccttgcggtccttcttgccaaccaaaacaaccgcccgtccacgcttacccatacgtcctagacgacccaaacgatggataaagtcgatagttgtgtggggaacatggtagagaataacggttttcaaggctagggtgtcgataccgcgtgacgcaatgtcggtggtgacaaggaccttgacgccatcaaggcggcgttcagtgtctcgatttgtccgttcaggaagcacaaagggaatgttaatattttcgcgttgctgctgcttgcgggcgagcaggatttcttccgcggtggggacggcggctggttcggtgaattcggcgagaatctcttcttgttttctggtgcctgagtcgcggttaaatgaatgggcgtcgatacctttcgatttgaggaattgcgcaacctcgtcggcttcctcgcgctcgttgacaaagacgagaatcttcttagtcttcggctcagaccacgggctgccggcctcatcgctccctgctccgcttttgccaatagaccagatcacgtccgcgcaggcgagattccggttcccgcggtatgggtctttctgaatgtcaactacgcccagctgtacgcgccgagggatggcatgcagattaggtgttgttaaacgccaaatatccgggtagagtttgcggagctgagaatcgaggctgcgggggatggtggcagaacagaagatgagcttctgcagcgacggggctgctttactgataacttccgttgatattggcaggaaggatcgatccatgagggagtcagcctcatccagtacgaggtggctgacacggctgagcacgtagggatccgttttcgcgatagaagccagtagatgcggtgtcgagacgaggatgtcgatcccggcggggttaaagagagtgctcttgattcgacgaggagtcaggttagaggaaataataccagacctgaacttcactgtgtgtgcgaaagccttgagcttagctccaacctgggcaaccaattctgctgttggtactagaatgattgcccgcggtctgcctgcgttagatggcgggggaatttccggttccaaatcaaatgcttggttcttcttgttttcttctctctctcgcaccttcctttcctcctccttcttctccatctctttctcctgtatctcttggcgtttgatcgcgtcaatcacagggatcaagtatgctagcgtcttccccgaaccggtctccgcggcgagaaggtattgctcatactgaggttcatcgtcgtccaccttcttagcttgcttcttcgctggagcatcttcaagaagtcttggtatggcgactcgttggataggagtgggaacagcatcggctatcccaggaagggcttgcgagaaaatcgaattccggacaatgggaaggagagtgaaggcatcgaagctcgtgatttctgcaatcttggctttgattgctgttcgttttccgtaggagataggtgctagagcagtctgcatcttcagggccttgtaaagcggactttcggtattcatcgctggcttctcttctgtctctccggaacgtttcaaggcggccggtgaccgtgaccttggatcttcacgaactcgcgctcgtgtctgattcatgttgggaaacggccctaatttaccgcggtctgttcgtttcggcttgagggatgatttggcgacatctttagagagagtcatgcgggctctgcggcggaggcgccctgtggcaatcgatcgtacagcctgtcctccctgaagaggagacagggcaagggaagtctgagctcgacagaacagacatactggcctcaagggcaaggacagcccgcctaaccggttcattgctgagttggggctagatgaagagtgatggaaaagcctggaccagctctcgccgcgggaaaaaaaagatcctcaaggcctaaaggggaaacagcacggaccactggggaggctattacgctaggcctgattaggactaaggcgatcgagagtgttctgcgtctaggcgccaagcgtccgatattattgcaagcaggtctggcaggaaggtgcggttgcccgggagactcccgacacccaaacgtcaacaatcgtcgaggctccagtgcacgacgagtccgcagtctccaaccagggtaccagcgatcgcaggcctacttaacgctcccactgcacttgcatctcctctttcatccaaggttccattctagatcatccgtctgtctggccctgacgtctttgtctctcttcccgccagtggtggatgacatgtctgctcttctcgctttcctctgtatctgcatgatctgatcacgagtttctctgaatctcccccaaccacgatctcttcgtatttgacttccataatccttctttattgcgattgacttgagaagaacgagaacccataattaacgaaagtaacgaaactggcaatcgctttggatgatcttccctttgtgaccatttacgagtcttacgaactacgcgcataccgggagtgatttgattgaccagaacctgggttttcctcagaattcttctttcaaggcctgggaatctgacgtcttgtttttgtttatcgacaacaggtaagggcgcgttccgactccgctagggatgggtacccaacacaagctgaaacaagtttactgatcgccttctagccttgtttttgctttgttgtttccgctcttcttggatctcttttctctaattctgttctttctgaactgcgtgtttgttaacaacatgggtaacggcactggacatcggccgttgtcagaagtgagcccaatggctcaccgtcgcaactccccggtgtggaatcagagtaatagggtaggctgcctgtatgattttggctacggtcgaactgacatcaccgcatcagtcaacaaaaagcattgattcatcgccctatgaatcaccgtcttcaacacgccgattttggcaaggtcgtgagtcaggttcgccgtttcaaaagaactcggagaaccaagcgccttacgaccccgacgtcacattcaccacctctaagagaccttctctcgaaaatctgaagcgcgcatcacgggtcaagggcaacagtatgttccgcgactacaaccatgagtacgaccctactagtgtttatgtcccacaaagaccgcttgccatcaaccgaggctcgcatgagaagcaaagccaagttgtggctacagcacgtcctcccagtccagacaagactcaaatggggcctcgacccccttcacctagcaaggatcaggcccctcccgcgaagtcgtctttgtcccgagccagtaggtttggcacgaaggacatgacttttgacccggagaatgagatttggtctgatgccgatggtactcgctacacaaaaagtgttaccttcgatgctgccccacctcaggttaatgaatatgaaatgaccacccccgatccatcatcggttgcctccggatctcgtgacggaagctatgactcggaagaggatgaaggcgacatcagcttcgatcgtggctcgctggcccgtgatgacagcttcgatgcctcgctggaagacctcgaaaagacaccagtggtaatgcctgaagattggcgttttatgagcccggatactgcaaatgacgaactggcggaaaagaatgaagatccatttaccagcgaagggagtgaaagccctgagccccggtctgtatcaacgcaacaggttcctgctaggcgctcacgtgttgagtccctcgactcaaacggtgagcggcgtcctctaccaccgctaccggcaattcaaggactgtccttctccccacgtgcctcagacaagctcgctgctgcattcgagcttgcaagtggtaatcaacgtgttctccctgcaccaccagcggcggcgacgtacagcaaatccgacatcaccgggcttagccacagctccatgtcattggaggataggttgcgcttgatgatgattcagcgggaggagcgtgaaaatgccaatggaaagcaagaaaccaagccggagaataaggaagatgagagcaaagctgaaactgcggaaaagtccaaggggcaagaacctgcagagggcccagccaatccaacagaagcggatgaagctgatgtgttctctcccccacgtatttccagagattccatcttgcgtgatctccgcagaggcgatgactacctggatgtttcgtatgagaactcttctcaaggaagcgccagcccacgacagtactctcattatgaccctgacattcctattccttcgcttgagagcgatcatgataacagttacgaagatgatgatgacgagacgagcagtgttataattaagccagaattggaggatgatagcaacaacctttacgatatcccagactattacggaaccgttccttcaaaggattcatcctacaaagatctaaaagatcaggaggatggggataataagagccaccactctaaccactcgatggaggatgttttttgcaagagcaacggctctgtcccctccgaagcaacgccagttcccgcagatcgagcagaagaaggcttgaacgacaaaacaccggccagtcctgcagagcatcaggataatgaggttgctgctcccaaaatgaccgctatgctagagtcccttcgccgcccagttacaccggaaaatgccgaacaaatatcacctccgtcaacaccagactctgtgattcgacaccccgtagatgaccaaattagcgatctcgaggattcggtggacgaaagcgttcctgaacccatcgctaccgttaaagcacacggaagcagtttgaagatccgcccatcattaacccgggcggacgttgaacagatggctgcaacccgcaggaaaatcagcggccaaattccgccaaccactcaggctacccaagagccagaagagagtgaacaactagagcctgactcccaggaaaaaacgctgcagcccgagccctcagcggcggcagcgccacgaaaacccagctttatgaaactagacatcccattcagcattcaagaagatgaaagtcttggattcggtcttgacaaagaatttgatcgagtcattgagtctcaaaaggttgcgtttgagctagcccttacccagctgcaatccacaaaagcccctcccctgacccaggagtcccttgcacacagcacaggatattatacaagtcccttcgcgcatgctaactatccgatcctgaaacagagaggttacctcatgagacacaacacgaaggttattgtcgcgagtagccgccccgaggaagaacccgtcccctcatccaatggcgagtcatctggcgacatgcggagcacaaaggcgggcgcatccccacagcgaaaggtcagccagcagacctggactacggtgccctggaactctggtgctcgccgcgcgagtattcgtaccccctctggcgcaattcgcaagaaacccgttaatggccccgtacctccgttacctggtcaaccgagcatcgcccaagatccccctactcctgttgaagaaattgacccaactttcaatgctcttgaggatggcgaggagcgcggtaggttgtttgtgaaggttgtcgggctgaagtatctagacttgccgcttcccaaaggtgattttcccaagtcctcgcatatcgaatgtttatactaagattctgctatcaggggagagaacctacttttcactcacattagataatggtcttcactgcgtaactactgcttggctggaactgggcaagagtgctccgatcgggcaagaattcgagctcatcgtccagaatgacctcgagttccagcttactctccagatgaagatggatgaggaaaagttcaggatccgcgaacctgctccttcagcatctccatcccggcaaaaacattcagcattcagcaagatgtttgcatcaccgcggaacgcaaggaacttgacatg

SEQ ID NO: 5554 - DNA, 5613 bp, Emericella nidulans
  unsure (1)..(5613): unsure at all n locations
agcgcctactacgagcgcaagaaggctgcccgccgccaacttgctcacgcgcagaagtcggcgagcgttcccgagaacaccaagagccagctcgctgagtacggattctagattatacctggttgcgcggctggttgcttgtgtctttgatggggtgggttgggatcgcgagcggtttttactttcagcgaagtttggaagggaggctgatcggcgacctttcttctcagttcctaccttgtcatgggatccagcagcgtttcatgctaggatgcacatgtgaggcgggagagaccggtgtcgtctttaaaacaaaagtacaatacaggagtcatatgggatgaaaaggttgttcaaaatagctgacccattatttcgcgccgtggcggtttaatccaagaaattttcaagagttcatgacctgcaattcatctatacacgttaaattatatctcatgttttcctctgcgcagcatactttccgcaaatacctgaatttccctaataccggcaattcttcaaactagctcttgtcgaagaaccactttagtcttcactgccgtgcattgttcaggcgatgatcactaaaggttaacctcggccgattcccacataacacaatctcagtgatgtcataccgcttgtatgtagctgcaacaccttgaccaacagccccttcatatagatataagagtagggacaagcgattcgaataggtataccgattctgagtattcacgccgaggtacgcgtgaactccaactactcacttcgtcaacgacggcggtcaatccttcgtgatcatgggtaggccgtggctgaaaattaaagtgcacgctattgctaacagcagtatctaatacagttcttagcatcggtactcggtaatcaagcaaacctcctgaaaatcatagtttcgtggtaaactggggacctcaaaagcggaataaggcggaaagataaaatccgctgcggatttaaacactatgatggcaacctactaatcgtccatcttatgattgatgtgttttgcaagatccttcagttctgagctgtacaatcactgtttgagcagccgttaaacccagcatattaggacattccggagggccggaacaagaccactatagctgagagtagtccgcctcggactacggacatctctccgcagtaatcaattggatcttccccgcaccctaacacttgggcactccaccacgcccgctcccgcttggactggggcttcctcaggcccgtacgaccggactttatctaggtcgactcggctgttcacccctcggtacttggtatatttagcaacacaaacttcttttgccttttccacctccctcatccgtagaactcgcccttccttttacccttgtcatcctcattacccttcaacctaccaacaaatgtctacagccaaatctcgcctctccagccttctcggccactttcaacagccccttgatgctaacagcacagcgactcccgctccggtaaacagctttaaaaatgtcaatttccacacattgtctcctacgttctttctgccgagggcggcggcgatagagccagatgtgggttctgtccattccaagatctaaagggtagcatttattaattttggttgtcatgcgcaaggccgaggcgatataccacattacagcaaataaccaagtgctacgaagaacctaccaagagactgcggatcgggctagagggctcgcctattttctcaagaagcatgggtataagagagtcgggatcctgtgcccaaacacaccggcttttctggagtcgattttcggtattgccgctgcgggggccgtgaatgtttgtaaggctttgattctttgttcttccaattaggtatatattcgctaatatgcatattatagccgtgaattatcgacttaaggaggacgatatcgcttatatatttactcattctgacgccgaaattatcatcgctgacaaggaatacttgccgctgctgtcggcctatagagcagcgaagccgcatgttcgtgtcattttggatacagatacagatgcaacagagggccaacttgcgggtccatttgacgaggctattctcgaggggttgaattatgaccgggatacaggcagaaagggctggagtgctcttgagagccaagccgcgtctgaagatgatgttattgcgctggcatataccagtgggacaacggcgcgcccgaagggagtggaatacactcatcgtggttgttatcttgctgctatgggcaatatcattgagtctgggctcaactttcaaggacggcgctgtaaatacttgtggaccttgcctatgtttcatgctatgggtaggttttgacagtgagatttgttttcacttgcctctgactaatgctcgatttctaggttggactttcccttgggccgttactgcagtgcgcgggactcactactgcctgcgcaaaatcgactatccgcagatctggaaacttctcaagcaagagggcgtcacccactttaatgcggctccaacggtgaatacgttgctttgcagctctcctgaagctgagccgcttcctgaaccagtccatgttacagtcgcagcgagcccgccaacacctcatttgttcgaacagatgacgggcttaaatttgcatccagttcacgtttacggtatgacggagacttatggacctatcactaaagggtactatatgacggcctgggaaaacctccctcgcaaggagaaatttgcgcgaatggcacggcaagggcatggtttcctgaccagtcttccagtacgggtcatccagacagaggtgcctgagggcaccatcattgatgtcaagcaggacggcaagaagattggtgagattgtgtttgtcgggaatatctgtgccaggggctactataaagaccccgaggctacgcggaaattgtttgctggcggagtcctccattcaggagacttggctgtctggcatccagatggggccattcagattcttgacagagccaaggatattatcattagtggtaggtcgcaccgccgcttttttttccccgccgcattgttatactgatactagtgtaggaggtgagaacatctcgtccgttgcactcgagtcgatgctggtcacccatccggatattctagaggccggtgttgtcgccgttcccgacagccattggggtgaacggcccaaagcttttgtgactgtcaaaccagggaggcagctgaagggtaaagatgtcgtcgactgggccaggaacactagcggaatcagcaagttcatggttccacgggaagtggaggttgtcgcagagcttcccaagaccagcactggcaagttgaggaagaacgttcttcgtgagtgggcaaaggatggaagccgatcatgacggatctgcgtttgatgcaaggtacctagatagaataagatagtattggaaatagatgcaaagcaatacctactatattgttcttgagtatggctcgaccgatgatggtgagaggatgagtgaacagtgagtggtcaaaagtgcgaagaagactggaggaagacgctcacgcatgaggaggcttataaaataacgcgacctcctcgttctcacaccacgtgcaaggttgccaccgtcaggcgtaagtcaaggttgagaacgcgaccaagggatccctttgattgatcatctgctcggagaccgtgcccatgctttaagtctaggtctcccgtactctattcagctgaatcgccctttgatcccccactcgataaacccagctttcttccttctctgcagctgtgacttttctattgtcatccaatcatctctctatttagacatcgcttcaaacgttcaccgttgaagccttgttggttacctgtaagcccgaagcagcctgagagagcaggtgatttcatttgtcccctcccagcccgccttggatcgcagccgccgcctccttccccatcctatcgtcgtctcaatcacatttcgtcaccttagtttgcgctaataataacttctttcgacccctcctagatcgattgcattttcgagctctttgtgaattcggctgcaaaagcctacgcagcttatcctctgatatcctatcctgttttcgcccctgcctccgtccgagatcgccgttttctcaactgccttcgagcctccctgccgtcgctattcctgcagtcaccgcaggcacacccaacgcgcatccccttcataagggcatcctttatcctcctaccggctccttcgctttcaatagacccgagtcgctcccgactgttcaataacagaggtttgacgcagtgaacagggtcttcaatacgggtcaagtgacgtacacacatacgcaaaatctgcccatgtcgagttgctttttcttgcgaggttgagacagtggaagactaggaatttttcagaccgcaacgcagcccaacctcaacgccgccatcatggctcgttctcggcagccaactcgattctcgagcgaagctccttccgaatcatcctcgtcgacctcgcctgaacgtgctgcagacgatgataccgatttcttcacactccaagccaacgattcacagtcatcgatcggcgctgggaatcctcgtgattcacacatccagaatgatccagagaccgtattgccaccgatcgcctaccttccaccagaaattctcatatccatattctcgaaactaagttctccgagagatctgttgagttgtctgctggtatgtcgtatatgggcgttgaactgtgtcggtcttctttggcatcggccgtcatgcaacaactgggacaacttgaagaaaatcgcggctgctgtgggagaagaagacagcttcttcctctattcaagtctcattaagcggctgaatctttccgctcttacagaagacgtcagcgacgggaccgtcgttccattttcccagtgcaaccggatcgagcgtctcacattgacaaactgccgcaaactcactgacattggcgtatccgatctggttgtcggcagtcgtcatttgcaggccctggacgtctcggaactacggtctcttaccgaccatactcttttcaaagtggcggaaaattgcaaccgtttgcagggtctcaacatcactggatgtgtgaaagtgacagatgattcgttgattgctgtttcgcagaactgtaggcttctcaaaagagtaagtcaccttacgattaaatcacatggttctcattctaattttcgcagctgaaattgaatggagtgtcccaagtcaccgataaagcgatcctgtccttcgctcagaactgcccatctatccttgagatcgatcttcaggaatgcaaactcgttacaaaccagtcagtgacggctcttatgacaacgctacaaaatctccgtgaactaccactcgcgcactgcacagagatagatgattctgctttcctggaccttncagacatattcaaatgactaggcttcgcattcttgatctgactgcgtgcgagaatatcagagatgaagccgttgacgaatcgtagttcgcaccgcgttgcggaccttgactccgaagggcagtcatacggacgggcggtgggcattgaaatagg

SEQ ID NO: 5555 - DNA, 5067 bp, Emericella nidulans
ctttgacgttcttgctcctgtggcttagatgtggttcgtgtatgttttatagatttatcatggtttctgtttctttgcctagccgatgtacatgtttctcagggccctccaatcgtttatacgcagttttgttctgatgtgtcccatgaactacggagttttgtctcagcggaaataaaagtttcctatcatttaataagcattttatagctgatgacgattagatagaatctgaaatatgcttgaataagatgatggacttctaaatccctagttaagccaacgccagacacccttggtatcatgcaagtcattcccagctttcttctcaaggacaaaatagtagagtacaggacatgcgcaagcaggagttgacatttaagctcactgcgcatccaacatcatgagatcctcatcaattccttcatcaaactcatctcccgctccgttgcgagaaccgttcgttctatccccctgagcgaaagtttcccgctgtagtctctcctgctcttgtatctgtttctgacgatgtctctccaagtccgcaagactccatgtggagataccttcttgatctttagctttgaacggctgagccatggtgcgcagaaagttctttgcagtcgccactgccatatccgtactgagattcgtttcactctccaaaagcgcctgactaatccacttgggaagttgatttcgtttcttttggaaccgccggtcggcgaggaccatgattccgtagtcgtctttgcctcgaaggacgcgacctaaacactgagcggcatgccgcatagcatcgaaagaaaggaaatcattttccctgatgcggtaattctcccgaagaaattctagcctcgctttgagaatgcgggactcggtgtattggaatggaacgccgatgcatagcacagcccggccatagtggtggtcgaaatcgataccctcggaaactttacctcgtgcgacgcaaaatagcaaggcacctctgccgttgcaacatgctgtccggtatgtttctagggctaatgatgattcttgggcatcgggagtttcgacaaggatcaatttatagttccaaatagagtcgaggatgcccataccctgccacatgctgataattgactccatgtatagataggatgggaaaaacacgacgactccgtcaggagttatgcgagagaactcaaggactatgtttccatagttgcgtacgacaccagggtcatttcggatttgaaatgaagacgaaatctgtgcttggtccgatccacgagtcacgatcataggaaggaaagatcgacgggcaagggtcatactatacgattcttgcatgacagtcgtaaatcctaacatcttcggatacatctcaagtggtgataaggtacccgacgtaatgaccacagagctgaagcgatcgaacacaggcttaatagcgatggcggcgtccaaacatgtaaaatgtaggactggatttgggactgttgccgcctctgattcgaaaggttctaagatcaagaggaagcctttgtcgtaagtcgaaaccagggttgcgaacgtcgctacctcttggagtggttgataatcctctatattgatgagctccagtgtccgaactagtgacgttaagcgttccgcgcaaaacctcagtggcttccgctcaataaaagtcaattccttaacatgatttagaaaagaaagcggcgtttctgagatggtgtgagtgactttcattcgagttttgagatattcgatgaatctcttcaggaaggcaacaaaatgctccgccctgcgtatattacctgggacagcttctttgagcagatcgtctggaagaacgggatttgaaatgaattgatcttcgtctctagcctgctcagcctcccgcaatccctcaacgagtttcatgtattcgttattaagcttttctgcgtcagaactctttacatcctggatcttccgctccaggttgtttgccccccgagtggcttttcgcaatgaatcttccgttatatcaatgctaagcgactcaatgcaaacgttatcaatattgtgtgcctcgtcgaataccactatgcagtctttcgagaattctttagagaccctttcggcaatcttcgggtctaggaggtaatggtaggagtaaatgataacattgcaatatggcatctgaactggcgttaagggctgataaataaacgtgcgctctcattaggtgtggacttaccatacgccgagcagagaaataagggcattgtttatgttgctccccgtagtttaacaggccatcaagtgtaaacacgcccgggggtacgaggttatggggctcgagaaggtctagattctggataaaatcagctgcgcactccatacaatgagcagttccgtttcatacctcgtgatatacacacaactcgacgtcttcgcccttttccttcttttccttgacgaaaccggcagttaaacttcggcatcgagcgtcaaccaccgtgccgcttttctcccgtttgacggatgggtgcagacacaagttttttcgactagtcaagcccaaagcacgaaagtcctcagtatatcctaattgttcagaacgaaacttcatcagctcccttagctctgctaacgctttctcgatctcggacattgttcgagaacagtatatgagtttcctgtgctctggatagtgttgctggtaggcaacaatcagcgacagcaatgtaaccgtctttccagtacccgaaggcatctcgagaacgcagtgacccccggcatcgagggtcttcttaagatcacacatgtaggcatattgttcggggtatatacgagggtacgggaaaaggaccgggagatcactatagatcgagaaacaatattagatactgtaactccttacgcgtatgtagcacttactcaatgaaaaatttcattgcgccggacaagcttgaagctagatagatcagagcctggcgtcagaatgcgtgggagcttctggccggagacccagaccgcgttgagcttttcccttctgggcggtcgatgacaccagatcacgtgcttaattcccgataaggctccgccagaaccgtcactactgacttgagcagttgccaacatagaagcgattcactagctgggatgacactgattcgagaggaaccacttggttgagttcggttctcattctaatcttatttttctcgtttctgcccttcaaccggccggctttcttcctccatacaaccccgctaccccacattattgctatgagcaaaaagttcaaatctcaagcgtcgagcagccgtgctgctgctggcacctttgggggctttggagggttctcatcatctgtgtcgggtcagggaagagagctgtcttcccttacatatgtgactgagccgccggatttgtcccggatatcggaccctcaactggcgattgctttcaaaaactttctgaagaaggatgatgtgaccaggacgaaagctatagacgatataaagtctttcgtttccagtgtagctgcaaatgatggtacacttgatgatgggttcttagaggcttgggtgagtttatttccataaaaaacactacttcgaagcctaacatcggccagatcagaatatacccaagggcatcaattgatctgtatcgccgagtgagacagtccgcacactcggcccaagggttgattgctagcctcgttgggaagcggtttgcccgatttttgcccaaagtagttggggcgtggctggctgggggttatgataatgataataccagattaccagacactgcctgggggttttatacgcgccgtttttttacttgtttaaaaaaggaacagacggctggaaggtctttcagagtccgattcttgactttgttgatgatgtcattcttcagcagacacctctgaccctgagcgatgaaaggacagtcaagcccgaggatgcagaggcaaagtatgcccgtgtggtagggaccgccattctgctgttaaaccggattctaggttcgctcatatcgtatcacattcatgaaggatgtcgctgacaatagtactaggaaacactacaagagaggaccgtcaaagtaaccttgcgaagattgaaacaatccttggaagcaagtcactatggacattctgctatcatgatgatcctttcgttcgtcgttcaatgtacatccttattcggactgttgtctccggagaacctgaagaactggattggaaaatggttagcgcagccctactgggaaagtcactacacattacacagataggctctgcctctgacttgtcagaagctttactgcatgtgacgtctgcacgcccccagatatggaccgatgactactctgggaagacatccccttcgaaaagactgctccagtacatacgtaagggatctcaaggcagtccggggcttttctggtccaacatataccaattactacagctggtcccgatgcaaacgctagcacagcttgattctaacggtcctagtgatgatgccattggattatcgagtgcgagggcactgatggaagcaatacacgagggcctgagctcacgagaggaacccccacaaaaccgaacgctgggctggaaaatttatgtggaaactgccatgtggctagcccagggtctatcagatcaggacacgattgagcttctgcaaggggagctttctccgttgatagtgcagtacgtgaggtccgagcaggaggcatctcgatggtctctcccgatgcaatcttcagaagccatttgcactgaatatttgaccgctctgttttcgtttggctatgaggtcgcgttcaacgagttatggacgaagctgtctgagggcttactcgaagctgtccgactttcgtcacccgaacaatcgaaggatttcaagtcttcgcaggatgcggtatgtgctcaagccgagcgtcttttttctctagaagcgtctttactagtacgccttgccgacaaagatctagagccaaaagcattgcacacacttgaaagcctaaacttgagactactaaatagccgtttggatgtactccgatctc

SEQ ID NO: 5556 - DNA, 2792 bp, Emericella nidulans
atcctggtcgatataatgttactgcaggcttgagttactggtgagctgatgatgtgactggaagttccagtagccaacccgctctcttcaaaggttcttgcgcaacaggatatggagatggtgcaatgatatactatctgcaggcttgggcacctccacttgtgctagccagttacgcgacagaacaaatatggctttccaggtcaggggcagttgagaaagctcttcacacatctggattggagcgtctgcagaggtaacaaactgcccatcaggtatgatagcctccatctagagatctgcgacgagcagcagtccgcttcaatcccatgggctgaagaatacagtgatctgtatcaaagatgtaactccggatagctgctcttgagggtaatctttcataaatgtctgtattcattgacaatatcaacttcccgctcccactctcactctcttgacagtatcaacgccgcaactctggaaaggcaaaaagtcataatgagccaaatttatgctatattccttaatcccatcctcaatcccggaccagaccatttctcgagtcccaggcggctcctaaaatcaaggtacaaacgcactatcatcacaaggcggcacaaacaagtccagatcatccgggtatcttaccccatctgggccagtaatatcgatccgattcgccgcagggcccagtccattgttgaatataagggtgaagggtaagaactcccccgcttccaatacatactcaaaatagttcgttaccgggtcaacacttacgggtgctgcagctccgtctacattcccatccgtgtagtcagtatacgccttctcccctccccaccagaaccccgtgttatcctgccaattggctgattcagctaatatcggtgaatgaactgtgtagtttccagcaatactagcaaaaaggaacccttgaaacacgactgtccactgcgaacaatccgtctgggctgcttgaccgggcagttggcagaccgcaggaccggtcggccaattgggggattcgaaattgatattgcgggccagaccggaggtatagtaactcaggttgccattccagtgggatgtgctgtatccgccgccgcctaggccggtggtgtcggtgttgtagttgtagccattgaggtattggtagtaatttagccctgtagacagatgattggcatgagagagtgctggcagaggggaattgcgaagtaaggggaggggtaagcatataccattgtagtttgttggcgtgggttgaatccaggtctccgttacaatctgcgttgagatgggcgttgtagttacggttgcaattccgcttttcgttgttgtgatcgtactcgtcctgacggtagactttagttcacgtcctcccaacgatgcctgacgaagcctgtggctgggagaggaaatggtagcatacgtaagtgcaaagccgccctcaagacgcgtgcaaggtgcattcgacactgtcgggggaatgacagtcacggtgggacagccgattgggaggatgggaggaagagttatctgaggactcgctgctcggactttcagaatgcttgctcctgtgtctgcatcaaggcctggaagagacgggtacgctgctaatgtggttgcagtactgaggcaggtgaccgaggttggagtgtagatagttgtacgggtctggcttatggagatctagatggattaacgatggcgttaggtcaaattgagctgactagaagctcggggacaaagaggggatcgagctgcgcacgctggtaggagctgttatgatggttgtgctggtaccctaagcatccaggtcaggctcgtgtcagtgtctctagcataaggggacaattggtattgcgtacggaagtcacagtgctggtcgccgtgacggtgtacgtccctccaagcgtgagagtggtggtagaggtacagattgggagtgggaaggggagcgtaggaaggagctctccattgcatacgcaagcagcaaaaagagaaataagggcacaagtgagcggtttcatagcgtgctagagggtgtgttctagggtaagttgattattgagtgcactggactgggaggtatggcggatgagggttgagaacgacaatgagaacagatgcgaaccttccatcctcctttatatgttttcgtccctcgatctgggcgggataagaccgtgatccttctcaaatgaccttgagtgagctgagcgctgagcgccgtgcatcctctgctctgacaaccactctctatgccaccttacatggctttacatgacatctcaatgttaagagaacagctggacagcctcctccgtaaattcgagactgagtctccgtggagatgccggggacaatatctgcaggtgccagagaggcctgcattgcagtcttcattgaaatttacatagcggcctgcattgcatgaacctgttctcagccagccaccgttctttaggattcagtcacatcctaatccagtctagaggattttcccctcttgacgttagacttactgtaaccgcctttccggcctttccagactgagggtatgattgcgtcggggcaacctccctagttttgtagatcgaaatttgaacagagtgaaacgatttctttttccctttgattcccgctattcaagtctattaaataaccatttgctatggttatgtacatactaaatgactacttgagagaaaatgcatttagtgtccttcaacccgactcgctaccactcgcttattctttctactccagatgtgccctatctgcag

SEQ ID NO: 5557 - DNA, 6699 bp, Emericella nidulans
atacaccgcccatagccatcatgagcgcccttttccttctctgatcgtcgccgttgccattggctgtctgggtcttccgcggcatcgaggccgtagaaagcacatgcttaaaatgcgtcatcatcaactgcgtgcgattgatatcgagatctgaaaagaaagtactgttggacttgtgcaggttgtagtcgcactcgatcaccgggttactgcactcggtcacaaagtagctgtagaggcgtggacggccctggctgtcgagcaagggcgctggagtggttgagcgtttccatactagttcgatgaagagacctttgaagaggcggtactgagttgagtgtcactgagttagtagaggcatagattgtttctttttatctgtgtgccggaatgcattgcattattgcgggtgacttacgtgccagacaccggggagccctttcgcgttcaggaggaggaagtaaatgcccgcgccggttaaaagacggttgatggtgatgaagtcccagaccgtgctgagaagggattcaaccgaggagggcagggccattgttgtgctggctggtctggtgggttgttaactgtgagtaaagtacttgtagagacgaactctgagatctcagactcctgcgaagaacgtggggactgctgttgctcgaatttccctcaatctcactcttcctctctctgaccccggccttactagtcctcagtcaagcacgcaagcaacggctccatagtgcagctccatagtccatgtaagcaaccagcactatagggctaggccaagaaggaaccacggagaaagagctggctggatccatctgatccttcctgccaagcgccaagccatatatgcagatattagcctcaggaatgaaggatctagccccgcgagctgcgctacgggcgtatcggtttcgatcagccacaatgcgtaatgaccgctagaaagttaggctagttagtttgtatgaaccgtaatgaccgctagacagtaattaatgctaaacggtaataaccgctaggaagaaaggtgtatatgttgggtaaggttcgtatacggattatgagggcaatgtagggctacagtccacctccgccaagaaggctctgctgggttccagcaacttcatacgacagaaatagtctcgtggctacggctgagcgaggccgacgtcgagaacgggtttgtctcagcttggctaactctgcgaggtgaaaacctattcttccgaaacccgtttctatatcatcccagcaagcaggcccgcatttccaagtcctgtatgcgcgagtctgagctgcccagggccagcattttcactctttcactatttgctctctttcttctgtgtatggctattctttcttttcttcagatctgactattttctctctctcttctgtttctttgcgtaaagatgttcaactttcctcatcccgctatagacctggcttccagaatgaagtcaacgcgctcatggcgggcggcagctcgtccgcatcatcagaagatctcttttctcctccaatgatggaggacctggatacacccatgaccgagtatcccatgggatcccctccccgcatgccctaccgcggtgaggacatcgagattgcattcctccgctccgaagcctccattaaaaagtcttccttgttcaacgacaagttcgcagctacgttggacgaccttagtgcccgacccatcgacagtgcctctctcattgggaaactccagagcatgacccgttccgtgcgcgagatcctcgacagtggcgaccagctggtgcacgaggacggcccgcaagagatcctcaagcagttcgtgcgcgtcgtcaacaaacatctctgccaggatgaagacatccacactgtcctggcgccattggctctggagcctgaggagaagttccacataatccagacctattaccaagcgatcagtatgacccaattcgtgtcaccgaagtggaccagcagtctgctctcggatgccctctgccgtcgggccaacattgtgacggtcttcaatggtcagggggtggaagggtacttcagtgaactgcagcatctctatgacacatatggaggactgctggccgagcccctatatgccctgagcaaacagctcaaggggcttgcgtcagatgtgcgcgcccaggacatgtacccccacggcctagatgtcatcggctggctcgagaacccagaggcgcgcccgtccactgactatctgctctcagcccctgtcagtcaacctttgatcggtcttgtgcagctgctcaattatgccatcacctgcaagatcctcaacaagagccccggcgagttcgcccgtcacctcagtggttccgccggccactctcagggcattgttgtcgcagcgatgctggctacggttgtctcgtggcctacattcttcgacgccgcaagcaccgcactgcaagtgctgttctggattgggtgtcgttcgcaacaatgctacccatcccactccattccgccgtcgctggtcgatcagtctgagcgcctgagccccatgctcagcgtcaagggagcctcgcgtgagtcattactcaagtatctcgacgagcacaaccgacatctaccccccgcacagcagggctcccttgctttgattaacggccggcagcagttcgtggtggccggcaatcccctctcgctctacgccttcgccaacaagctgcgcgcagcctccaacaactccagcactaccaacacagcccgcgtgccgttcagccaaaggcccttgttgatcaccgcgcgcttccttcccatctcagttcccttccacaccagtctcctggaggatgctgaggcccagatcctggaagacctccgctccgtccacgtccctgggaacagtctcctcttccctgtcctccgtaccgacaatggggccgacctccgcgagtttgacaatctggtccccgagctcgtgcacatggtcgtctgcggcgtcgtcgattgggaccgagccacgcgcttccccactgccactcacttactcgactttggtcccggccgcgagaccgggatcggggcgctgctggcctccacaaaagccggcaccgctgcacgcgtaatactctctacgaccctcaccggccccagcaagaagacgctcggctacatgcccgagctgctcagccggcgccgccccgtagtctacaacaccagctgggaacaagactttgctccgcggcttgtccgcgtcggcgacgacatcctcctcgacaccaagttctcccgcgccttgggtctgccccccgtaatggtagctggcatgacgccgaccacggtctcaccggactttgtcgccgaggtcatcaacgcgaactaccacatcgaaattgccggcggtggttaccacgacgcagccggcatgcgctcagccctcacccggctcgttaacctcatccccgccggccgcggcataaccgttaacctgatctacgcgaatccgcgcgcaatgggttggcagatcccgctcctcgtacaattgcgacaagagggcttgcccattacagggctgacaactctggccggcgtgccgtcgcccgacatcgccagcgagtatatccgcaaccacgtcttgatccatatctccttcaaacgggggtctaaagaagcaatcaacaatgtgctgcgcatcgcggaatcgaaccccggtttccccattatcctgcaatggaccggtgggcgagcgggcgggcatcactcgtacgaagatttccatgaacccatcctggaccggtacgcgcagatcagagcctacccgaacctcattctagtcgctggcagtgggttcggtggaagcgatgataccattccttatatcacgggatcatggtccaagaaattgggctacgcggctatgcccttcgacggcgttcttgttggcagccgcgtcatgactgccaaggaggcgcggaccagtccagctgtgaagcaggcgattgttgatacccctggagtaccagattcccagtgggagggcacatacaagaaagcaactggggggattatcacagtgaagtctgaaatgggtgagccaatccataagcttgcgacgcgcggggtcctgctatgggcagagctcgataaggaggtgttttctcttcctgcggcgcagcaggtccaggagttgcagaggcgcaagggctcgctgatgaagcggctgaatgcagatttccagaaggtttggtttggtatcgaccagcagggaaaccccgtggagatttcagagatgacctacgcggaggttctcacaagggctgttgatctgctctacctcaaggatcagcaagcctggattgatccctcgtatcgttcctttgtggcagactttattcgctgcgtcgagaaccgcctgagcgcgcgccagcctcgaccccgtgcagttttccagtccgcattgcagctggaccggccccaggtctttctgagcgagttcctgcaggcatatccggcagctctggaagacgtgattgtccgcgaggacgaggaccagctggtgaagctgtacaagcaaccgggacgcaagcctctgccgttcatcgttgcgctggacgagtcgttcgagtactggttcaagaaggattctctgtggcagtctgagagactagaagccgtcaccaatcaagacgtcggacgaatctgtattttgcacggccccgtggcggcacagtacactaaggtcgccaatgaaccggtgaagcacatcctcgataacatccataaaccccacgttcaggccatccttgaagcagcagtacaccggtgacacgagccgagttccaactctggattacctgtactctgcgggcgcagtatcgcccatgttgtctccgcaggacgagctgctactgccacatgtcaagcatagtcgttcatacgacccgccgaccctcgcgtatgatctgaaaggccccgaggagaacctacccaccgaaaagcagtggctggctctcatcggcgggacgaagccatcctggcggaaggcattgctgacgctgaacgagattgtgcaggggaagatgctggtggagaatcctatcaagggcctcttcgctcctcgcgccggcctctccgtgcgtatcattcaagctggacgaccccagaagacagtcatccttatgcggcagaaaagcagccaaggacaggaaaaggatgaagcgacggtggaaatccgcgctttatctacctcagagatcatgctgacactgcgagctcctatgactgggggcagtgctggcaaccctccggtcgatctggtgctgtacttcacttacaagccgacatacggcaataacccgatccacgaggttatgggtacacgcaaccagcgcatcagccggttctacgaacagctctgggtcggcaacgcaggggatgagggcacgagcctgcaaaaatccgccgacgacgtgcaagtgctgacccgcgaagcgatcttaaacttcaccaaggccattgacaaccggaacagcgcatacaatgggaaaaagaactctaagctgcttgcaccgcttgacatggcgattgtggttgcgtggaagccgttgatgcgttgtctcttcacggacgcagtcaacggcgatatcctcaagctcctgcatttgaagaatgatttccgggttattgacaacgcgagtccgatgcgcgaaggcgacgtgctgtcttcgacagccgcgatcgagtcgattcgcatccgcccggactcagggaaggtggtccgcgctgttgcgacgatcttcaagaaagcacgcccatcattactgttgccagtgagttcatactccagggccggtatgaagactaccacaacacgttcgagacaaaagaggagcaggtgtacaagttgcccttgaagtcgaagcgggacgtggtcctgctggcatcgaagccctggttccgcatcgccgcggccgacctcagcctcgacgaccacctggatgatgagctcactttccggctgaaaagctcataccattttcgcgacgccaacacgtacagccagatcgaaacctgtgggaccgtcagctgtgccgtggggaataaggacatgacgatcggcacagtgatgttcaaaagcaactcgcacttcctcaagaaccccgtcatcgacttcctgacccgtcgaggatttgcctacgacgaggtcaagcagcttccaaatgctgtgcccttggccgcagatgtccgcattgagatgcccacgtctagtgaccagtacgctgccgcctcgggagacagcaacccaattcacctatcgcgtgcgtttgcgcggtacgcggccacaacgaaggtcgggtcatccacggcatgcagactagtggtctggtacgaggcgtcgtggagttgcatgcggcaggcaacgatccgcggcgcatgaaggcctggtctgcttcattcaagggcaaggtatcccctggcgagaccctcctcgtggatatcagccacacggggatgaacaacggccgcttgattgttgttgctactgcacggtcggaatcgtccagtgtagaagtgtttcgtgcgacggctgaagtggcccagaagccaggagcctacctgttcactggccagggcagccagaagccggcgatggggatggatctgtacgagaccagccaggccgcacgcgatgtatggcacacggccgagcag

SEQ ID NO: 5558 - DNA, 7620 bp, Emericella nidulans
ccatcgtccccagactttgcgcaactcacgctatttcagtagtgacgcggtaagtagcatctgttatctttatgtactctgagtatatgtacagtatgcgttggtattatgtaaaaaaaaaatccacaacattataaagccagaataaggataacagaaagaagagcaagagaaagctgctccgtcagtcatcgtcattggttgaagcgcactgttttagaagagaaaggcgaacgccatcgcaccagcagcgagaacgacattagcagaaacggtgaccgcaccacctattgcactgtcaggaaacactctttcaaatcaactgttgcgaaaacttactgcaaacgtcgctgctctggctcataagtgaattgacgtccaggtcagcgatctgctgagcctcggaagcggtgcagttagagtccttaacacacgaggtcaagctgtctctggatgtactgatagtctccgagtccggtatgccggctttgcagacacagtccgtgtcagacaagtcgcagccggtcagtttctcaatcgcgtcggtaaagcaggattgcatgcatgcgggaatcgagttttgaatcaggtcctgaggggtttcggctaccacagtggtggcagtggcaccgaggagagcaagcgggacaaggaagcgcattttgtggatatccggcggttgagaatgcggatggtagagaagttcttgggcttgatgagaatagtaaagatgtaggagttattggacttgatgttgagaagtgaaagtgaaggggagagagactattatatagactcggtctctgccgtaagggactcaattttaaatgaacgagtcattcgaggctcaaagggggctcgagctaacagtaaacttcggagtttgagtggctgaggccctggagcaactggagcattgtctcccggttcagacgcttcgagtcaatgctgcaaccctttctcggctgtgttgcggagatcgaatgataaccaacgaatccagagaggcatccagacaaaccccattacgatcgacggaaccgatcatgtctagaggcgcaaatctattcagcgccaagttgggggctagttcagccgcgacgtcgggacggatatgagaggcacgatggcccctggaacgaagctgaaacgattcgacggcgtgagctctgcgcggttctgcgccagcgcaatgatcgcgacagcgcactgcaatatatcttcgggcccattggagtccgtcacggtgtgcggtataaccctagcttctgggaaatgacggtcggccgcccatatgcgggggtagtcaatcaagtctagcgccgggcgactgagttgccgcaaatgaatgatgctcggattggaaggagaccccagccgagagaaacggtccctggatttgggatcataggtacggaccgtcaaaatgcttcgaaggagcttggacgcttgccttcctccactcaggctccagcgacactgccacacaatcattgacaccctctgtggacccctgggccgtagggaaggcgcaggatgaacgaatgaagcaccgccctgtcttagccgcattccatgctgatcgtgaagttgaaggagataggatcaccaaggctagaccaaggctagaccaaggctaggtagcctggactagccttgagctgtcttgacggaaatggccgttaacaaaaatatcttagcttccactgtctcttcacggattgttcacagattatcctcgttatttcgttatctcgcgcggttgatggtcgtttctactcgcgtcagtcaatgtgcgatcggagagaattcaatataccaagcaacggaggcacgtcatgcatactttgcgtagacattggcggggctaagccatgtcagcattgcttcgccctatagggctcacgatgcccctgaaacctcagcatcaagagagaataaattgaaacagtttactcggtcaaagtagttgaatcggctcaaggttagcgttgttatccttcccaagctctgagagagggaacaccgttcgttgtcccatctggttgcacatcactctgatcgggaactattacctaccaaattttaacataccgaagaaagccattggtagaaccatggaagtcattattgaacaaatcttgtcgaatcagactgcccataaaggcacctccggtcgatgatggccgtgacatcatgctatcgccaactattacgttgcgtcactggcagtgtgtgcggatgactaacccgctcaaagccgtcttataagacaggcctgtgaactatatcggactcgaaagtatttgaattcaccatatttgatcaacaaatttgagaaatatctatcaagatgaacaacttcgcacagttcggctcccacctctctgaccaacatcagggccagcagaccggcgccagcggcagcaggactgggtccgctagccagacagactatctcgacaaaggtatctggtcacaaactaatatcaaaggccgctggctaatgaacgcaaggctcaacgatgccgagcagaaatatggtggcaagtactaccatgcccaaaaggagaaaccctgccaacaagaagatcggctgcagggtcaagggcaaatttcatgacatgactgggtatgtcgatatgtttgaatgctgagaagcagtctgctaactcataccaggcataatctgcccggagctcattaaactgaaaatcttgaagtgatgtgatatgacctcttatatgatgtattccctggtgcatgactgcactagacatcttgtaattaatgcgtagtacggtctttctttatccaatacactacacagagcaatcctatgactctacctagattgactatgtctattgatgatcaggtgcggccagtatttgatccttcctctttgagcgcttctgaactcttcatctcttcaagcaagttcctcccgtttctccacgtctgtctcttctctacataactgaaatacggttccctttccagtatcaaataatagtaaactagtttttgataggtaattccagcatcaaaccatagagaactagtttttgataggtaattgcgtttttcgatagagtcacctacagcggccgcagccgtgtcaccctgtcgttgatacgtctcgtcaacgtcccctttcgacctacctagtaactctactgtttttcttgatcgtcatttttctgtagaggatcagttggccggcttgtatcatggtcatattgtgcttgtctcaaaccaaagtcatcgattgcaaatcagcactattctctccaagcaaaattctagatagactgatcataatatatccattgccgcaagcttgaaaaaggtaatcttcttcgatacgacttttcagtaatatattgtcagtagcggtaaagacacaagacttcgaaagcgctacaatcaatccgtgtaatcgactccgacagccctagacgggacatgccagcaatgtgatattgtcactattctcgcaaccttgaaaaagcggacatccgttctcaagacaggtcatacacagcgattgtcctagtcaacaaataaagccggagtggccggggcaaagagcattagaacggtgacatcaccgttgcccctgccctaatggtcacgcttaccataatcacctacagagcagcgagcaaacctattttctcttttcttctggccgcgctgtaaccaggggctatattagggtttgcagacacaaactttatacgactcccagtgcccattataccgtgtccgtctacagtggtctcatcacacacgccagagcagcacttacaaccacgtacatagagaacgatcgtctacttggcggacgctgagtcaggatcataggacacctgcagttaccttcatagccactaaatacacacagtttcgccgcgattcgagcatactcgatcgagtcttacacaacaggccacccgctggagaagtcaagaacgttccatccaaagagcttctggctatcagcgtagccaatagtggtatcaacatagtggtagtacagcacagggccgagcgtcgggtcggtgaagacacccctgttttacattagtcatttctgccaaagttcgtgggattggggaggcatactgtcctccaggtccgtagacattgtcgtggctttccaagacgattgttccaccgccggaagtgcaggaaacaccatttgcatcaacctgggctaattaggcgggtccaaaacacgatccattatcgaggcggagagcttacaaagttaccagtggccgtggtcgaacggcacactttgatcttgtattcttccccagtagccggcctagaagagtcatagccgcagcatttgccctcggagaagaagaggtagtagtagttgccgtacttgtacaagtacgcgccctcaaccgcgtgctcgccagccggctggtatgcgatctggtacgaggacgatgcgacggctgtgggaggagatttcatctgtgcttggtagatgtcattccagaacgacccaaagttcatgtaccaggtcccgctatcatcctggaaaaggttgccatcaatggcattgtatggcttggaggagtcagaccggatgcccgtcgagccgtggtccgtccaggtgttgaggtccatcgtgtcagaagtcgcgagcccaatcgcggaattctgggacccaaaggtcgaaactgaatagagaacatagtatacgccattgacgagctggacatcgggagcctgcgagagtatgcattagcacttatttcgcccaaataggccgaactgccgatcctccggtacttacccagagatcgtcatttccatccagatcgatcgacgaaccgcccggcaagacggacccaatcgctgtccatgggccctcaatggaggaagcagacgcataagagatcttgttaccggttgagaagcggaaatacttgccatcagactcacggcggatcaaagccgggtcgtgaatgttgcacgcacccgagcacgccccgggcgacgcatagccatgcgccacgcctacgaggagagacgccgaagctgcaagagtgggcagatacatagcgacaagaattccggatgagggtcgacgaggctttcactgcgacttagataagggtcatacaatccccattctcgcagcagaacactggttttatacgcaacccagcaagcccaggggtgaagctatttgtggaagaagcccccacaggatcatttcttgcgtagtcaaacaataacagcttgaagataatggcgaagcggatctccgctccataccgagaacaactccggtgggcctagttgtgtacctgacacccaagactcctgagcatgagaggtaatacgcttcgcttcaggagagccggctgacaacgccactcctgaaacctgcgttaatctcctttcagcgagaccctcgtgagtctggattcttggtataagacatgccgacggcgggtgtttcacgtcgctcactcatctccacccggatatccagaactccttggctggattacgaacgggtgaccgcatccattgctctataatcgagattcggaggatagcttcctcccacctgaagccagctggagcagggataagtgccgaatcgaccgccaccgcgtcgatcgcggagaaaatgcggggtgctgaagaaggcaccagatggagagcgtcggttaattaggcagcatcagtcacaccactcaccacttaaccgaggcagaaaccgccggaagatggacgtagcaagtacatccaagattttgcatagtcaacaggacgtcttggctttgcggaatcgagcctgatgaggaatgacatctacctgccactgcaggcttcatttccaccaatcgtgccatcgacagatcgttgcggcggcaatttgagagtataagagcaaccatgtaccggacattaccccttgacctttcaagactcagcggtagacgaacagtaaatccatctaggacaagatgataccctctcttcacaacgtcctccgcttcctcggaagcggccttcttgttcttggggccaatgctgcctctttttccaatccgctcaaagaccccaatggcagtgacccatatatggtgtacgtggatggatactactacctgacgacgaccacctggtcggacgtccagctcacccgggccacgacgttagagggattaaagacgggagagtccaaggttgtttggagtgacagtgaatccagccgatgctgccacatgtgggcgccagaattccaccagattgacggcacgtatgtgtaactcctcgtagatatagcgagtgttgatactgatttgtgttaggtggtacttgtactatactgccggtacgagcggtgacagtgtcgataaccagcacgtgcatgttctccagggtaggctaccatcaccatagccagtgacctcttgacgaccactattcaccgttaacttggtatatctaggcggctcttctccctgggactcatacacctatctcgcccagataacacccgaatggggcattgacgcaacagttctgaccgtcaacgaccagaactacctcatctggtcctgcatcgccaacagcatccaaagcaactgcattgcaaccctcaataccccctcgacgatcggcgagacgcacatactttcccaacccctcgaggactgggaaactgtaggcgcacctgtgaacgagggcccggcgccgctctaccacgacggaaagatctgggttgcgtactcggccagctactgctggacggcgaactactcgcttgcactgcttgcgtacgatgggtctggagatccgctagatcaagcgtcttggacgaagtcggatggtccagtgtttgtctctgcggatggaaactatgggacgggacacaacgggtacgctcttcctttcaccatctatcgactgagtataaacttgaatggcggcactaaccaagcacagcttcttcaccagccctgacggtacggagatttggaatatctatcacgccactgcgattgcggaaggcgcatgcgatgggaaccggtacacagcggcgcagcgggttgattggaatgaagacggaactccaaatctcggcgtggctcttgcacttggtacagtgttggagggtccgtcgggagagcctgcttagcttacttagcttatgttgtacttctgtcgcagcgaaagacaactatacaaaatactgcgcgatacagaccgctagaactggcgaatccattccgagatatctatcaagtcgcgcatagtcgtatcactatttcgtaaaatatagtaaaataagtccacaatgcaaacttcataacaaccccgccatgaccctcgtcagcgcttcatcctccgcctcgaacgccccaagtgcatcggtgagcgcaccctgcgagagcctctcatttccatcaccagtcgtagtcgcagaatcagtccgggcatcgagcgttggctcaattctcggatcgaaatagagcccgccagccatctcgaagaaacttgttaggtcctcgcagctattttcgtctgtccaggtggatgtctggggcgacgataggggccagaatgagttggagt

SEQ ID NO: 5559 - DNA, 4167 bp, Emericella nidulans
ccttgttctggaagtgtgctcccgctgatgagttgatgaccccttgtcctcattttcccaggaatcgaggtgcatgctgggtggcaactctcaaggctgagataatatatcaggaaggtctactttctgccacatatagtaatgctatatcgaagataaacaaagctattaacagggcgttttagtaataaatgagcctctattacaatgtcagatcttctactaaacaaccttatgactatgtattctagatccacaccgtgaactccatcattcccactgttgtacaagaatgcacatgaatattttaaggcggccgagaggccaattattggctgagatctagcgtgtatctgcggaggattcaggctcagggaacattggttgcccgaacgtgatatcgggttcgaaagtcgacaacctgtcacaagtaccaacgacgatcagtaacttaaaatttactagatgcatgaagcggagagggccatagagaaggcaatatataaaggagttcaggactaagtataaacgtactcgtcgttgaagaagaatccatcagccgttactgggggaaaggcgcccaatatcgttgaaaaggcatcaaaaatctccgtatcatcctggcatgcaccatctgccacgtttggaatagagtcaatcgtggcatcatgcgatgactgtgatgactgaggcacataatccctgggagctgtggtgggagcaaacgtcttattgtaaatccggctctttgctttgttgaacattcttgaaagtatttcagcgccgaagtacacggatttgagctcttcaataataagcatgcaaaattcgaggttgtggcggcccaaacgttgcagcaactgcttatcagacgtggcgtcaaggagatggatttgcaatgtgggaactagggcaatgcagctagcaattctcagcattagcagtctagtttccaaatatcctgttggttttctgacaatgtacgtacaccattgcttgagtgttgctgatcatatcagcagcaatcatgctgccgaggatcttgttggtgttcatcgctgcgtctttggtcctccgcagcacagtcgatgtccattcgtccactgaaagaccaggcgagtttatttctggcttatcaaaaagaaatggccggtataaaataagcatagcggatctatagctataatgttagactgttgagaactaacaagaacgaaaccatgatttcacttactctagatacagctcgagatgaaacctgtgtaaggagacgacataactttgtctctgagctatggtatggtctttgtgagaatagcactctcggatgctatcgtccatgtgttgtatttccgtcctactaggtcgtgtccgctccgctcggttctgccatgagagaatcttcgctaaacagaccgtgagtgccaacagctctgcccataatttagataggtcctcagtgtcttccggcaggtacttcttttgggtactctctggaatgcccgcgagcagattatcagaatcctcggcatctggtattggggtactacagtctgcataggttgatacgcataggcctgcccatgcccgcacagacccacgtttcacggtagatgcatttgctggacagttgcctgcagactcgtggatacattcattgagatggctttactgtgtctttgaccggtgtctgctgccgatgcagccctatcgtctggcacagaccgatgcaacaccgttccaatgccaaggtccggtcctgtcttcagtgtccgaataccagaagcctgtcagaagtaccgcctggataagggtaatcttctttctttcatattccgcatcataaagagcctatgtgatgtggtcagccagtggcccttgtccagaactgcgatgtcgagctacgaccttagcccgaatatacattgcacgcttcatctcttttcgagacgaaaagtttgctgcctttagggtactgtcatcggcgaactatgtctcatgtcagaataccgatggggaaagtgagggagtgaatgctgcccatacatttgcagcagctagaaacatgctccacaagagatgcacgcttacttcgttgcgcgcattttcgaacttttcaaggaacgaacgggcatcaacaactgggaaaaagggatgcacatagtagaagtatgtccttatgatcatctcgcagacagaagacgtgggaaagtcgaagacgcccttatggcgcaaataatcgatcgtttcctggtccatgtaagtttggttgattcgtgggacgaggaagtggccactcttctcccttggctccggttcacagatgtcgactaccaggccgacgcctcgggggtcccctaagtgactgcatcagcaatcatggtgaaccatgaccagcgcaagcattcccaaagtgccaaccggaagtctgaatcttaccatataacggggaatagcacgtatctatcacatcgccctgcgtttgcagcgtgcccgtttcatcttcattgtgatgactgaaatgctcgttgaagggatgatatggtgtttcggtgccatatccagtttcatcagccgacggagccgtaggactttgccggcggcgtgcagataaatcctctgacacaacaagacgctcggggcgaggtgagaagctgcggccctcaagaggagtactctgtaccgcgggcctgccatttgacggcgaagacaccgtgctcaaatggtaagacaaagattctaggccgcgtctgccacggcaggtcgttagcgtgtttgccgagcagttcttcggtctgaggttgacatcgctcactttgatctcctactcggccgcggcacacatgtaacgtgatctaacgagcagttggtgcagggttggccagtttgtgggagactgcacctgactttacggccatggcatgactggcaagcaacgggtgctcgttttctggacggtcgcgttctgccagaataacgtgtgttttctgaaattttgggcatcatagagtgtagcagtctggtcttttcgaatgaagtcaataaaccaagtcccaacaccgatatgagaaggttgcctcgggaagaagtactttagggcttgagcggtacatacgctggacctcggcaacacaagccagtcgatcgttgatggatatagccatacagatttgaggacatcagctgtctgtccgagcatgattaatgcttaagctgctgctttctacttcttattcactaatttctaacctcaagcgtcttccgtagctgcacggtaacaataccaatacctgcaggtgctacatcgctgtgggcgtgataacgctgcggacgtgacaatggtctagttcagatatatccgaatggattcttaggcttctcgaccaaatgattgaaactgtcgcgacatccctagtacgaagggcgttgggctcctacactcctgcgagggccgaaagcaaggacctcaacgcgcttgccggtcaaatgtagacgatacaccatcccttcttaaactactatttcgagctccttggtcgctttttggttcctaacatggtatcagatctgcaaatgcatgttgctgaccgtgctcaccaatatgggacagctcccgtggctcgccgttagtttcgattcatacccatcgaggcaggcttaaaaatggtgattaagtggaaaattcacatggacgaggataaaactttgctacatcgctatatcgcttgagcatgatcgactctggcctacagatcccaattgaaacctttgagtgatgctgctgtcagaagccaaaacggaatgcgaccacactgggaaaggtaaaaacaatttataactcttagtacagagatcatgaaagtaaagacagggtcacagcttgaagtacaaatggatgcctacagaccaagtgctaatgcccgggacccaagcaatatggtttcgggacacttagattaacaaatcagagtcgagacgacttgctcttagaaagagcctctcccatcttggcctgtggaacgccctggcagaaacggtcgaggccaccaaacatttctagcggcgcttgttcgtcctgctccctaaccaagcgacgacgcatgagagcctttgtctccagaaggcgcgacttcaccaaatgttcgccgaatatcaatgcaggtatcg

SEQ ID NO: 5560 - DNA, 4781 bp, Emericella nidulans
tcagcacgagaatgcgggtactcattggctcagtgtccacgttgccaggtcgactgggccaagccgacttggcctgttcgatgatgaagtgatgatgcggcaggttcaattaggtcactactccagagtacctgttcctgccaagcttgattgaggagcacgcgttcaaaggaagctactcggggtgtgctgttttattgtggaattcgagattcaaaaacccacacgctagggtcggagttaagctaacatcaactaccatagcagtacaatctccgacctcagtatagcaatacgtataaagccacaaacccacgaccactacccacgacccacaacctacagcctagccctaaacaaaccctagacactatgaggtacctctggctctaatctccagcctttgcagtaatagtttgtggcaaggcggaaatactttagacttggtaggcgcaagagctgttgtgccgctgggcttgaagggagtttgaatgatagagacgacaacgaacgtggcaatgaggctagagcgtcgcaagggagtggagaccgttaattctatgggcaacggctgaggctgaccgacgaaggtacctggggactggccaattaaacgtcagtggaagctgcccactgactcatcccaagaccagaaatcggggagtcttgccgtctgccgatgtaggcccagctggctagcactgtagggctgaaccattaagcaatgaggcaacaacaactcgtctcaacagtagtcctcgtgtcccgttaatgggcataaggagtgcctctttcaatgcaatgttgaacattgaaccgggttgaacgtatggtttgtttgtcggaatacgcaagtcctaggaaacgtcccatagatggcatttagagggcttgaggccgatggtgctctagaactgaatcagaataatgacagattcaatgatgctgaaataggggccattagcttaaattaaggaatcatatttaaatgatcccattcgcggaacttaagggaaacctggcactgtactagcgcaggaagcgagcccggggtttgataccatcccgggaatgcgtatacagtggtctttcctgactctgagtatactggagaaaaagacgatgggaaacggaaaagaggactggagctttctgcgaaacagtaagagatgaccataaattgtttcatgttccccatcgcgcagtttgtatgagaggaaatgtagagctgatggaagaattatgagggacgcgtagaacgaacaagcaagactcgacaccagtgaatgtagagagaatttcatattctatgttcaagtagacttatttgggttgtggactatatcggccaactataagtcaccttcaaagacgaaccctatcagcatgttatggaaatggaacacgcagccacaccttcggtgcggcatagccagcgcgaaatccaggatcgagtcccttaacattaccagaaatcagaatctcaaatctgaattgaagtaagtccgcaaaacttacatagcccaatatctggttgaatggcagtcttaagacatactgctcgactgcttgaaggtccaccgcaaatgaggccagttgggtctagattcgaggacaaagttaacgtgaatattccgctggcaaagaatcccgcgaaagaggcttccaaacgctggtaatttcatgccctcaagctccgtctctgtcttcacgattccgtcaattattttatagcgttccagagcgttcattgtcccccacctttctgcgagctcggtaccgcaggccttctccatgataatatattctgcgccgactggatttgtaggaactccaggcatacacttccggaactcgaacccgataaatggggccgtactagacagtcaggatattagacatgctgtgaacagatgggagttgaggacgcacaaaacttcaacgtcgctacttcagaaagccgtcgtcaaaaaccgcaacccatcatttgcgcaaggaatcttcgctataacctcattcccgtcactcattgtaattaagaaagccttgttgaagtttccttccagtttgataatgcggacacacgttgtttcagggccaaagagggaggtggcttaaggacaaatattatcaatatcaaacttcacataacgctgcttaagttgatgctcttcattaatcagccatcggccggaggtatatctgaatgagtcatcctgggtgcacgtgtcaatccctacaagaaatcagttattatggcttaagacgtagcaagccgaagatagatatacagactagtatcattcatcttcggtcctgtcttatgtgctatcatccggaggctgcggctcagagtcaaccccaagcgcatagggcgatgcaatggacgaaaaagcagcgactttcgcatgacttatcgagacaactgaaacctcgcatatagtcctaactgctgtgatgctgctagcagagaaatcaaagataatctgactgacagtggatggtcctaaacgacgtatatttggtacttgatctgactactgacgagaccaagaggtaaagatgcaaacgaaatgaatctcaggtggtgcgttgggagagatgcggaaagaaaataatcctaacgccggagtaatgtcatatagagtgaataagggcgcgagctgtaccaaagttaaaggcaactttatccatcttgactaacattgcactcgttatggaaacattgggagtggtcttgacctgctaaacttgccgtatataggaatatacttattttaatacggtattggcttctatcggtagttggaaaggccttgcctggcttaagttaaactccacacagatatcttgaaggtacaataggcatgctgttgaggcttcaaaaatgaccctccaacgtcattaagtgaggtgatcttttttgccgctgcggccgaaggcgactaaagtaaaatgggaaggtacggtgatacgaatatatcatgttgagcctcatgtcacgtgccacgtgatctgtatggcatgatctctggcccctggcctgatccctcgaggagttgtacattgaagaagaagtgacaactatcgtcatcaagatagagaatcaatcgtcatatggcatcctatccttagtaggctacgttcgtgtagttgatgcagcttccttctaccctttcccctttgagcattcataacatacgggaatgaatagtagataaaccagcatctgccttctacgaacaatgtctgggccgcttcccctatcaaatgaaaattgcctttgagcccgcgctcagtttaaccctgtcatccttgatcaggggacaacaaatagcgcgcttctagagagctagctgaccaataaactcggttggtagggagagccaaggggatacatcacaatatggcctgtatttctcctcggtcgtcaaccgagcaaatgggtttgctgtcgtcattgtccgcagggtaccccacttgccggttcctccagcgagtttacccctgtgcaccgcctctcgagcgccacacagttcttgcaactggtcgtaagtatcatcaggactggtctgcttgggatttagcactgaagttcaaagcagacccgaatcccactggtaattcgaaccgtccgataaggcgattcggaagtgccttggcaagatattctgaggatttggtagacgttggaagtgcgtatatcctagcgcgtaccatggacttcatacaaattctagtcccaagcgaaaagacaaaagaccagagtccgcggtgccgaagccccacgaagcgggcggtccggcccgtgcgggtggtacctgcaggtcaatgttttaatgtgcagcattctccaatcgcagtcttcggctatacttggtgccagcagcaacagcttcagcctaaatagtctcggccttgcgtacttcccattaccgtttactcagttggcaacttcatactgtttatagcataattgaccacctatacatgaccggatgatgcggcaggcttttttttgggggcgggggtaaagtacacgtccctgcagcatcacctcaatcatgttaccgcccaaagctcttattttatatgctaatgtacccagtacggcagtaaccagccacatggacataaatattccattcaggtcttaatttaccaggccaggctgttcaagaggaactggcaagcatgagtacgccaaaagcagttgtggatagttcgtgacgccctcaactacccagctacgagaaacggaatgactggctttgacctcagtgacttaggaaagggtctaacacttcaaaacactgggccaagccatcacagaagactttccgcaacacgtaagtcggtggagccaatattaaaccccagccaatactaaccgcctttggatgaactcatgcttgcgctgtaagattctactagctgcaaggatcacctcgttgacgcaagttaaatgcatctatctctcctgtattgaggcctggtgaaagctagaccaggggctggaagcacgtgcgaggttgtactgaatatgcttgctgacacgtgccagttgtctctttagttctttggcctcgcaacacctctcaaggacacctatgcagcctgattgatcaaagcctagaatgttctcggatgtggaataaaagatgaaatgaagaaagcaacattcaattttaattaaagatcttgactgttcccaaaattgggttttgagttttttaaggaaattaaaccccttggggaggttttgggcctgggacataacc

SEQ ID NO: 5561 - DNA, 5420 bp, Emericella nidulans
ccgcctgttcgaaaaggtgggaacaccagttaatccgggaccacacaatgagggccttttttttcaggggagccatccaaggagcggccctagggggttctaaggtgactcttgaatataaatgcaacccaccctcttgtcaaggtcgaccggtgaagaatgtctcaactccatgcttaaggcactgtctcaccaaatcgcgcgcgcgtgcatgtgagcagagcctgatcccgtgtttatgagcttcgtctacacatgctttggtctcttcgtcgctaaaatagcagtccattgggtcgcgaatctcggtaatctatttagtgagcacgacccacagctgcagttctgctagacttaccgattccccggacatcgacagcttcacctgatccacgcccaatttgacatgttcgcgaatcctagctcattagcgagtcgtcaggatcacgggcaggttcaaacatacacctctcgcatctcctccggcccatcggcgtacgccgttatccccggcaccaggtggccgtctctcctcgccatctcctgcccgttcgcaagataccgagggccggggatatctcccgcgttgatggcatcgcgaacgactacatctagtctccttttcgcggatgcagcgccgaagcacctgataaacagtcagtctacctcactgcaccataaaacaaaaagcgaagaagaagaagaagaagaagaagaaggcttacatcgtataccccgaatccagaaaacaccgcgcactccgcgccgtgagaagagtgtgctcttcaacgcccaactcgcctaatcggccgagatcgcctccattccagctgagatgggtatgggcgtctccaagaccagggatcagggtgcggccgttgccatagaaaacacgcactcgggggtctctgaggagatcttctttgttggggacggtgccaacgtgtgtgaatcgctcccctaatcacatcaatcttccctcataatcccaaagtttaaagggagcgaacctgtaatcagcacatctccgtggtacggctcccgcccagtagcatcaaggatcttgatgtcggtaatcaggactcttgagtctggatgtgttcctgcaatattatatggctttggctggacctccttgccgaaatccagttgttcgatgtaggcgatgttcctggggggtccattgtatggttcaaggggataatctggggatgaccacgtgaggggcatgttgttctgttgatatagaattccacggaagactaccgtgattacagagctaaagatggcgcactgcggtcgatatagggcaaaagtaggagtatatatatgccatcgcctgcgaaacagccgctgatctccccggctaggtgtcctgctgaaggcgtactcgtcgatccctttggttccctgagttggtaatgcaagatcatcctggcgagccaagcgggcaccaatcagtgctttctgtccattgatcattccgtacaacgccgctcttcgccgctcctccagcgtgataagctcaaatgtcaatactagtgctttcttgtacgtaggtaccccaactcagcaactcctctccaaatcccggacttcatgtgctcccttccctaaagtggaagcatctttctattcattacattgctctaagcatctatcaactgagttccaaataccgtacaatgggctggttaactctccgcagccgcaccaacaatcaatatcgcgacttgaaaacgaacccagtatcggcgtctgtgtcagcatcagagaagaccggcgcctacagcgagcataccgagaacatcgccatcgagaattcaataaacacgcaattacaacctcagttgaaagtaaccccctcatcctcattccttggccaaacctatccgttccactccaccactcccgactccgagctcccctacatcgactcctcgatcatttctctcgttgagcaacattggaacaaagccacaaccacagattcagctcgagcaagagaacagctgccagcctggattgtaatcgataacatcgtctacgactgcacggctttccagcactcgcatccaggcggacccgtcgtgatccgctcgttcgtggggcaagactgctcgtggcagttctggcggtttcacggcagggaacatatgatgaagtttgggaagtcgttgaggattggcaagacgagtgggataagaaatcggttcgctgagccgccgaggtatgttgggctaagcagtgagttgggtgatgatgagtggtgattccttcgttcgtttggagttagataagtagatgttcttgggcatcggtacgaaatagtctatcactagattgacctggatcgtggcctggtatgtgttatcttggagcccaatacagatatttctctctgtggaccaccagatactgcaggtggagaggtaggtaagttggcctctggcaatcatgtatagtaatacgatagtcaatgttagaactatgcctcgaagtacttaatcgtccatgaatgctattggtctaatttaagctaattagaggcccatctgtcccttctcccttccattgtcgacatacaaggcaagaaaatacgactatagtgttctatcaaagaattgccaaaccgggcactttaaagcaaccacaagcaataagcgtactcggcctttagtgcgtagttcacacctgcgcaccggtggccataaatgacaagccagaagccgcagactgcatttggggggccgaaattctggcctaagttactttatacctatgatagacttgatatataagcgggaggtatagctacattagggctagaaatgctagactcggctcaccatgtcgtccctggtcaaacacgcaggtcatccccggattcacaaagtgctttccaaatatgagtggtatcgaagccactgcccagtaacagaacctggccctaggcagttcaacaggcagaggcggagattcacggagcgctccgcgcagacgcagagcggcgaagaacggagtatccgctgctggaatttggagacatgcggggtattgcctacttgtggttctaattcccctcctatttattatggcaggcggcgctgaagggaattgtttacgcagatttatcatttaattcttccgctattgaaaatggtgttcaattactgcgcctacgctgatcccgcaaccggggaggaccgcatcggccaccttgatcaccaatccctccaaatccagcctttatccttcacatcaggaacaaggatcaccaacctctaccaagtcattgaagccggccaggccagtatcgtcagtgcccgcgctgagcccctccccttgtccagcgttaaactcctccccaccatttccggccgcgatatccttgctgtcggcaagaactacgtcgaacacgcaaaagaattcaactcctctggctttgattcttcagacaaagtcgaccagcctactgcaccagttatcttcacgaagcgggcgacttcgatcattgcgcatggcgaagatgttctcctccaccccggcttcactgaaacccctgactatgagggcgaaataggggttatcatcggcaaggcagggcacaagatcccagaagaccaggcgatggattatgtctggggatacacaatcatcaacgatttcacagcacgcgagagacagcgcgatcataagcagttctacatcggcaagtcccctgatacgtactgcccgatcgggcccgttgccgtgccgaaggaacagctccctgaaaaggagaatattcgtctgcagacatttgtaaatggcgagaagaggcaagatgccacgctggaccagttgattttctccatcccgaatctcgtctcgaccctgtcgcagggtcagacgattcagcctggagacaccattgccacgggcacaccttacggtgtgggttttggcttccggcccatgaaattcctcaaggctggtgacgaggtcaaggtctccgtcactggccttggatcgttggtcaacagaatggcagcgcttgacgcgcccaatccgaccattgagcgtgtgcaagcgtccacgtccattcatacggccaaccagaaagcaagaggaaacaacggcctggtgaaagtaggctcaaaacagctcttctaccaatttcagggtcagaaggacggcactcctgttattttcatccacggcctcggcggctcatcctcctactttacgccgctgcttgataaactctcagctacgcacgccctccaccttacagacctcgaaggtcacggcctctcgcctacgtccgcactcagcagtcttacaatctcatcgtttgccggcgacatccgcgatgtatacattcttgccgcaggatcaaacccaaaaccagcaaccgtgatcgctcattcaatgggctgcctcatcgcgctcaaacttgctctcgaaaacctcaacctcgtcagcaacctcgttctcctcggcccgcctccctctcctctccctgaagccggaagcaacggaagcttcgctcgcgctgaaacagtccgagcccaaggcatggccgccgttgcggatgcagtcgtaaatgcaggtctctcctcaaaaacaaaatcttccaacccgctcgctgtcacagccacaaagctttctttgttgggccaagacccagagggttatgccaaggcgtgtatggcgcttgcccggtcggccgaggagacgctggatgttgaggaggttgccgctaagacactgatcctgacagggacggccgatgctgttagtccgccggcgctgtgtgagaagtatgggcagcggatcaaggactcaacagtggtggtcttggaggatgtcgcacattggcaccttttcgaacatgttagggtgttcgaggcgccatataccaattttgggcgtttaaaaagtcctgaagtgactttcttctatacgctggttttttttagacgaacgggcagtaatactattatattatagaatagagacgcttcagaaattgcgtgctcagacattatgagtcagggttgggaggtatagaatcagtcacaaatcttcaattgcgcaggttttagggcgcggtggtaggggatatgggaagagttggagtagagaacatgtattagagatgaacactatactaccacttgctcatgtcctgcagcggtgtctatatctagctctagcattgcattacttcagacgtctgaggttagtgatattgctctgtcacctgtgccagctcaatatcaataatcttctaatgtttcgctttggttaggggggtaaagggtggggtgcatatagatagatctgagacccctaagcaccaagatttcccccagacagtggtcgcgctgctgggaccaagatgtggcttaacagaataggctcccagtttacag

SEQ ID NO: 5562 - DNA, 2932 bp, Emericella nidulans
gagtcattatttcagccattgtggtgaacaacagagccccctgttctataagacgaacaatacacgctatgattcgccagtgaattctcagtagtagaggtactgcatggtgtacagggctgctggtcaggttagacactcacggtggttcaccggtgtgggcatgctccgcatgcgatatgagcgatagcagcagttcatgtggcaaaaggtagttccgaagcaagggtggtagcggttcatccctataaggcattacacttgaggccagtctggacattcggatctggaatcaagaaatgcgataggcatcattaacttggtgctccaagtcattatttagtccctggtaatcagtgtggaaggtacgtcaccaagcattgatcacgatccatcaggcccgattgggccaattagcccccttttcggctcctggaattggcgacatggtcatttcgtccgcttcgtgacaccgaattaagcccctgaccgacttcgcgatctgccactgccagggaactgccagggaaatgctgctagactagtaattggccatggccacgccgtcgaacactttatctcctctatctcgacgagatggtggcaagacagttgaaattctcggttgatacgaactttgatggaagtcttgacaagtatggattctatagcatgatcaagttgaagaatgctaaacagtaatgataatcttactgcaatcccaagttaaatgaaattaaatgagcggatctacagagcttgcgtggataacgggcccctcacccgattaggaggcaatcgcccccctgccccgacgcgcttggccattcagctgtccgcatgcgtagtcaaccatctggagtgacattgctgcattctagaccatttatctcctgttttcccacctcaggtttaaagcttcttatttcttcatcccaacatctacttccccaatctcaatcaacctcaatcttggaatctgactagtcccagaatccagatatgcgatccttggttctgcgcaacgtcatcctcgcacaacaaacttcgttatctgttgggttgattggcctggaacttcgccatcaatagtcgacgtcactgaatacgttcaaaccgttaccaacatttcagatcattacggctgctgcaatcgaaccggttcgattcccatcgataggaggctgctcttaatcctgccatcccgccgatcgatcgatcgaccatcaatcgtaaactacaataaccatactaccagagcaatgtccacaccgtgcccattccgtatttcgcggtctgccagcgataaattggctcgcaatgaagcctttcgagcggtcagagagaatctcaggcgccaggaattgggctccaaggcccccaggttcgtaagcctataagacacgggatcccgtcatgggccagttgtgtccagttgctggtccatttgctaacccctgccagtttctgttcctcgcaccgctattcatgctcgaacgacgcgcaagaggcgttccggctgcaccgtgatataatacacaccttgttgctacccctgttccttctccataaccaggcgtctcgcgcggccctcagtatcttgcccccccataaaggggcggacgatgcgcgctttccgtggtgaagcacgagatgcgtatgcttggctgcattgcatcttcagtgaggagcatgattggtatttgaccgagcgctgccccgcctgcattgtcctgcacgtcttgcagtcagaacccaccatccgctttgttgccgtggcatgtctcctctccggcgacttgctgaatcccggcttggtcaattccaactccaatcgacggctacccaactttgaattttggctcgaggcgctcgagacggcggtttgcgaggatccgttttggggtcctggctgctggccggatattgagtatcgggcctgttcgctcattcaaggcatccagatgctgcgactgcagtgtatgcaatggctgggatttaagggagaccgtcagagtttgcaatcgacaacgcaatacaaggcaaactttcggttccaacgtgatttaccccaggcccaatcagccgcaaggccgtccgattgcttacagctgcctctcggcagtgcagatgattccaagcaacgctcgaagcttgctgcaaaccggtgttttcaatcacgggctgaccgccctcggaggtttcacacccgacgggaaggtgacatccgaagccgatcagtgacctcttgagccgggccagtcttcgaatgcgacttagactggtatccttcgatactttgctgtaggtctttatgaacactccagtgatcaagcgttacaagatccgatggcatgagtcacagcatgactcattccgcgagtttctgctagtatggactggtataaatgagcggactccaataatcgagtctccgcacactgtgaaactcaccatcatggcctccaaatctccgccaccaactgcgtccgctaaacagttttactcgacatcatcgccgttcgaggaacgaatcgggtattaccgagccgtccggcgcggccagcatatcttcgtctccggcaccacttcagtcgaccccgcatctcccgcccatgccccgcaaatccttttcccaaacgacgctcgccaacaaacgcgcgtggcgctccaggaaatcatcaaggcaatccaagctctcggcggcaagggcgcggaggacgttgtccgcgtgagaatgttcgtcagccaacctgaacactgcaccgccgtgggccagggtttcacggaaaccctcggtcgggaaagccgaccaggtgttggagcagcggcgacaatgctggtggtgcgggatggatttgtggacgaaagaatgctggtggagattgaagtggatgccatgttggatgatactgagagtgaaacgatacgc

SEQ ID NO: 5563 - DNA, 8218 bp, Emericella nidulans
  unsure (1)..(8218): unsure at all n locations
agggatctgctctgatttataatccacggccgatctcccggaaagtattgctcacctgctcttaaacttatttttggccttgaaagggggggaaggcctttgatactgctgggagcgtgcccagtgcgagtgtgaccttcacaaaaagtaactctgactctgtcaggtctatctcttccttcccctccccttcttgacattccaatgcagattcgagctgtacaattataaaagccgggttctttatcctgtcatcctctttccattccagcaatgcatttcaaccatttctttggaatggaatccagctcccaatcacctgaaagttcgagccgtcgggaccgtttagtgcggtccttaagtggccaatgtggcggtgcggcttgggggctggtttccgctaatccctcccactcctgcgagctacgatttaagggccacgagctgtcttgttagactttctatacccagaatcattggcgtaggattgcaataatggatttgcgagaaagtcttcacaagatgtacctggaagcgtatcagatctccaggaagctgtctgcaatcactactccgtacgctgaaatcttgccccagcggctcgtctattccaagcggccagactctaccttcggagcactctccacccctttcgaagccaccgctccacattctcttgctcccgcttagttcaggagtctatgcaatttctacgagtccacaccactgacatatgctggcaaggatgaattattattgctcggcgaagttgattcgactagtatatgtattattcatacacatgttattatccatacattgcaaacaatcatcttcagatgtagtccgacgaacagctgcccttgtgcaaagagcgactgctcgtctcctttgctttttagtatatctcttgttcaggtcaatccgtagcgcagttctatgtatatgcccagactccagtatattcaatagactcccaaaaaaaaatgaggctgaccatatgattcacggtcgccgtaaaacccacatgtaaaaaagctcagaaaatgtgtgccggaagtggaagaagtccgggtgagcgaaccgaatgagggacagttagttccagaatggccgtcgtaagaaagcctagtcgcatcgtatttatcgtaaaaggtaggaaggagaaaggcatgcactcatgatatctatcttgaagacgtcatggacagtccccgcgtagcaccaacagccgctgagaccggggtcgctgaccgagtgggagcggcactgcggttgtgggccatgtgcgctctgacaagatgtccagccgcaagcgcagagcatagactcagttcgccagcaagcactgcggctgccacaatacgagccagctgacgcgcgttgtcgccggggttggtggggtgagagccacggacgcctagtaagtcaagcatagcaccctgcgcttcgaggatagtaccaccaccgatagtgccaacctcaattgaaggcatagacacagcgatctgaagattgccatttgtactaaaacgtggttagcgccgaccaggagagaaagacatcaaagtatactacttacttcttcatcgtggtaatgcagctgctgctctccacattttgcgcggggtcttgaccagttgcgagaaagattgcagtaacaatgtttgatgcgtgagcgttgaatccgcccaagctacctgccattgcactgccaatcagattcttgctagtgttcaattccaccaatgcatcaacatcactctttagcacattgcgcacaacatcaccggggataatagcctcagccacaactgatttgccgcggccgtcaatccagttgagagcagctgctttcttgtcggtacaaaagttgccagacacagagatggtggccatgtcgtcgaatccacactctgtagccatgacatggagtgctttctcaacgcctttcgaaatcatgttcatacccatggcatcgccagtagtcgtcttgaaccggatatacaagtaggtaccggcaagggcagtcttcaggtgctgcagtcgagcaaagcggctggtagagttgaatgctgctgtcatgacgctcttaccctcctcggagtcgagccagaccttagctgcagctgcgcgtgcaagtgtaggaaacccgacacagggaccgcgagtcatgccatcgccagttaagacagtcactgcaccaccaccagcgttaatagccttggcgcctcgactggcactggctaccaaaacaccttcagttgttgccatgggaatgaaatagctttgaccatcaataacaaggggaccggcaactccaagaggcagaggcagggtgccaataacgttctcacagcaagcaccatggacaagcgcataattgtaatccttatagggcagcttagaagtttccaaagagctggtgactgcagaagttgcgggggtcctcgatactacagccctgcggattttgactgcccgggtgaaggcatcaacacggctcataagttcctcattttccaatgacttctccagagcatatccaggaagtttgccagagagtgaaagttcaatcagctcctcatcgctaaggtaggctgcctttttcgcttttagcattgcctcacattcctccatgctcctcttagggccagcgttcaagtcgattttgggatagacctttggcttggccggttccttaggagcgggggcggcttgtggttccttgatgctccatcttgcggcgttaaatagatagccgttgaggactatgctcaaagtcaacactgcaatgatccacttgctgataactgggtcctcaatgctcttcaaaacgccgttgaggacgtgtccgcccacagcatccagaagctggtcggtatattcaatttcaatagactggctctctcccagcttagcataatgcaccgacggatactcaagtttgtacttgatgggcgggacaactgtcactaatgtctccaacttctggcttttagcggaaacgtagatggcatccagaccgttctcagcaaccttgaagggatctatcggtgtaggcgagaagacattgcagagaggtgacaagctcgaattccggaaagggattgcagtcatattcaccacgttgaccagcacaaaacccccgaccatcaagaacttgaagcggcgaacattgttcgatttgattttccgtccaaaaacactagcgtcatctgcgtcgctattgtccgatccggcaccaaaccaatcattgctcgaggcgaccttttcggcaacactctgcgtaataccatcttcctccagagccttgcgaagggtcacatggcgcctgatacgtgtgatctcaagcttaatgcagaggatagtcgtgtagaaggtgaagagcaaaaggcagtcgaagaaaaggatccaagcagcgaggaagcaaaattgtctcagaccgccctgaactccagaagcagctcctgcaataagaatggagatttcgatacagtagtctcgaataatctcgaaaccctgttctcggattgcggtctgaatcgaatcctgaatagaactgggagtcgaagtcgctgaaccttggcgtttcttgtcgatcgacgcactaagaactgccctggtgagaataatcggcttttcaaacccaattgtcgtaacaaggaacgggaggccctctgatagaaggagaatgttgatcggaacgccaaacttcgtggtaacgaggagaccaaacaggaaagcgaacatgcccgagaaaaggacagtggtagcaagccaaaacttcgaccccaactgtttcatagagaagaacagagaggcaaagctaagatacatcgcaagataacctagagtcatgatgatgatatcgatggtttcggcatgctatcagtagttagcaatcggacatgtagagaagcccacgcaagggataccttgatcaaatccacaaaggaactccacgcatccgacagccaggagctgatggttccattcggtccactgaccgggccgcgggtagcacgcataatccatcgtttttgttcaccttcgtcatcttcaagcgtcgggtcaggaagctcctggaccgctctcagaaattgaggaacctggtcgaaaggaagggtgaagacaagagaggagtcgtgagagaatggcgagaagagattaggcgtatgagggagaagctgagcggaggcattggcgggaactgggatagcgtcggcagcaggagcggtcgacgcggatttcgaaatagagtccggaaatatcaaagtcgtcaaagcaagatgttggtcgacctaaaagccgttgagattagatatgagttcaaacctccctctttagttcaggattccccaccttttggtcgtcctgattcagtgagtcctcaacttgccacttccatgatgtgccttcgcccaaccggagactcctgttaccgaggaggagcgagtcaacatccacatggccagcaacattgttcgaatttctgaacgaatcgaataagctgccctcaagcaggccgacatatgttgtactcgccagaagggcgatcacgacgattgtgtggataggatggatgcaggcgcgacgagagatcgactgcaggcagccggtaacctggcgcttcagccaggaaggttcagcatcactgcctccttctgtcccaaacttcctccgaatcaacacggaagccatgatagcttacgagggggaggcggtgtgagcgtggtacaaaggtacgactcggagtgcctgaacagatgcgctgaggcggatgggtcacaccgagcgagagaccctatccgatatgttcaatcgcgcaggtcgtctttacagcggttggcaatagatcaagaccggttttcgaagttcaatgacatgggcgaggaaacaggagggtatatgttctgcggataagggacttcgagaaacctgacattttttggcgttagcgagtgatttcctgcaatgggccagccactagcaaggagcggagcgaggcgactagggaaaagcggcgacaactacgaaaggcgatgcaagagccaatgctggggcagacatacccgaagacgcaacaatgtcgtgagcgatatgtcggtgtaagaccaataattcaaaaaaaaaaaaatcacaagaatcgcagtcgctgttcccaaaatcgattgccaacagaactggtcttcttgatctatttctaccgacgctcgggtcagtcgagtcgtcacagccaccgagcccctgaagcacactcaaccagagcgaaagagcttgagccacccgtgacccttggaaaagaaatagttttaagtaagccggcgaattctgccgcctagaaagacttacgctattaggaaggaacagaactgggagccaatgagatgccgcgctgggagccacagcactattgcttgagatatgggaagggaagatcaccagaccggtggtccaggtcaaaaagaaggaatcctggcgtagggtccagagaaaaggcaagagggagagacgaagagaaagagagagagcaaagcagaaaagggggggcctcggggagaataaaaaagctggcagaatcgaaagctggttgccggtactcgcccagaccaaagcaggctaagtgggaatccgaccgacgggccacagctgtaaccccaagcactgctactactactgacgatcctcagccaaccatcccggccaggatgtagcatccaaagggttacgtccctcgcggactgcggactttgtcggaatgagaggcacgtcgcattattaagggaggctgaactatgaacctcagccagctagtcagctcgggaggcgaatactctgttggctgagatgttcagctagacgcggagtaagttccaaggttcggtatcataaattactccgccaaagcaaccgaaacatcattgttatctatgtactccgtgatacctagataccgcaaaattggagtgacaaaaaagcaattccactacggagctgtcatcgggattccttttctgagtgagaagccagtggctgctgacgctcaagggttctgttgcatgttgcatgaagacgaccaattcagcccaacagttccgcaaggccgttaccgagtatatatccagttacaaggaagtctatagtgacaaaggtgcatagtgcgaggtatcgttgtgcacagcactttactaaaagcacttgcttattacttgatgtcaactctgcgacttcgtttatagcgtgtgcctgggaaaagaaatcttcgactcttctggcccttactttgcttcctgagcctgctgcgaagccaataagaccgcattgagcccctccacaacggagtccgagaaacggttcccgaagcctcaacggagtaaagataatcgcgtcgcttgactcgcttccacagccgagctagatcaagctaactcgggaacaacgggcacaagaatgtcagaagcacgaagggtcccgcatcttggacgatccaagctgcataatgctcagcatatttgaactgcagtataatgcagaacttaaacagaaagtaactgacgtcgctacggaatactggatcaatgaattcatcgtctgtgggacgctctacaacctggtggctactgtgcacggataatggctcaatacccactttttttaatctaatcaatcaatctctcatctgcgacaccggagcttggccgtatcgatgatgtactgggatttgctttctagtaagagtaaagacaattgtgtggataataatggagggaaagagtcgcctcgatgggctctaacggtacgtacgtattcgctgtcaccatggattcctaaaggtcacgcagacggctacgaggagagtgggaggcgattatgatttccgattgtgtagctcgacaatacgatagcctggacgtcatgctcactggtcgaggaaccgtttcgtggggtttgcagaaaccgagcgtggctgcagtagtagtagtggcttgtgggatgagcgttgcggattgcgaagatatattatttctgttgataatagaaactcagggacggcgggcaagccaaggtgaaagaagccagtgctactttggaaagacaatcaaagacccagtgtgtacttttaccacctctagccgttgatacctgggggtagactggttgaggccgcaaacgggtcaggtgagacgagcactgggaattctcgaagtgaagtacgaagtagacgcaaaacattcagcaacaactgagacccaaagttatttaataattgcagcattcaaccggcaaactctatcctttattttctcagctcctcagcgtgaagctaaaattaaacactcggagattaagggttttcacgttgccgttgcttgtttccattcgcgctctggggccctgcatcgagcgctggcggcgcttagattccaagactacgcacaacgtgcgggagtgtgcaggctcgacgttcgttcttcaacccacgcagggcgtttcgtctagatgcgtccctcgatcggcttatgccttcgcctacttcaagtaacatatcttcccagcgcgggttatcgaacgcggactagccaagtatccctctactcatggcatccagatccgtaccgtcgcgatgatcgtcaagggtttatggaggctagaatcttgcatattttccgccagaggctattaggcgccgaggctattttcagacctgccatgcggctagtgactatgaagctaactgcctttatgctgcagagtctatgcacgcatagctctatagcctatcgttgcctacccgctctcccaacctgagtatatcactcaatttcttgcagacactgatcatcaaccctgcgtcatacggattaacctcgcatgacatcctaggacaaagtgcaccattcgtcattgccatggccttcttctgcgcttgccttttcatattgctaataagcgctcgatcttggtcatggttaaggtgtttcctcaccgaaattcacttgagtttaaggtctcttggcccggctttattcctccctttgggggttatttgggaacttaacatctgtagccgttagtgtttctgccactccagcttgtttcgcgcccttttttgtttgtactaaattnacaaaacacanaatatatacaattatctttcctcccccttcacgctcatccttacctcttcatcttacattacatacttttctccttt

SEQ ID NO: 5564 - DNA, 6463 bp, Emericella nidulans
atcgttctgcagaatatccactacttggcggccactgctgatcctccggcttatccgtgcggtaatagtatgtgtccgcgtcgcgaatctttagccaacctgccatgccgaaatgcattacgacatggggtggcgaggtcatggtgatccagaagtatttcccctgctgacccgtgcctatcactttcttgccttccatcgccttttggaattcggcggcgctcgtgccaaccttgccgtagacaatgtcatcgtgttgcgtggacacctttgctagggtcttgccaactagatgctgccggatgaagtgcacgatgcggtagatttcggccagttcaggcatttttaactctctttggttgtatatggagaaatacgatggataacttgaagacgggatgggtatgaagatgggttggctgctgtcagctcctaaacacgagcttgagcttcacgcgttgactgatcgcgaagtcacgtgatggagaagatagtgataagccggtggctcaatgggtgctccctcagaaccaacatcttacatttagccaactagacggatctcatgaatagtatcttgacatcttcatattacctagcaacatttcactccctggcctaccgggttagagcactcttccactcaaacgtaccatcggcttagctaagctctcatcgggctcgaactatccagctactcaatctggcttggttctggaatacggccgccaaagcggagcagcagaccggagttgcggagactgagaggtggaagatggtacgagcgtcttccacgcctgctccaacgctgagcccgcaattctgtttcaacgaacggctactgagaggtatatctccgccatcatcccagcctacctaccatacagctagcgagcaggctaaccctgcatgacaacagactttctgagcctctcccgctccacaatcgatgactctataacccaaaatctcaatgccttggtaacgcccgcccgtgccgggtttgatccctcctccaccgcgatccggcagacagactcaaaagccacgcgaacaatagagcccgccgcatgtcaagacttcaaggataaagttctgtttccgtcatggcagactcgctcagatgtgctcacctactgcgccggtgttgcgacgagccctgacccggatgacccggatttgttactgcggcagacagagtctgcgagggaccgcgagcgggttgtggatgagaggttagatccttattctgcgaggttctttccgagggaagcgcggacggagagtttggcgaatttggtgaggaatcagaggactgtagaggagattattcgggctaggacgtgggggcttgttttggagagatgtggtgctgattcgggaactcctttggaatgggaggaggcgctcaatcggtggcgggaaatgaaacagcggtgattcagaaacttcttggattctgttcagtacaaagcatgttgatggtttatcattgaaaagcgtggtttttcatctcaattctgtatctaatgatgtatatataagattatctgagctacagttcattcaccatacggttgtataattccgacatcaagtcacaagttaacttgtgcgatggtaaaaaccttcatgggcctgacaagatcattagatggtttgatgcttaggcgaagttggttaacattgcctagggatgtgcggccagttctgcacggcgcataacgtttgataacggagccataaacagcctctcgcatatcagagctgcaagcctggtttggattgatatgcttttagcgccacttgtagctgcagagcataggttgttcgatagtggtgtacagactttcccaactcgggatagcaagcggttagatgactgacgtcggctttgtgctatcaagaatgctttccaagtgtttgattcgctgttagcttttcggttattgtattattttggtatgggccttgctcatctgtgctcttccaagtcaggaataaccgcagccgggacgaagagcgtcctcgagcttgcaactatgatgctgactatgcatccactccgtgaaaaacagtatatgagtacacccatcgcgctaacctccagctggctgaggggatattctagccagtgttctgcatagagcgatggacgattggagttgaccctggcgatttgatgatggccccgttctgcagaagatggagaaaacggtgtaacccaggcgttgagaagacaggctatttatgtgcatatcaaattatcggtaggtggttgttgagatgtgcatttcacccgactaagcatcctgttatgcgtagagcccgcccctgctaggctgctgcaacacgggctcaggggaatctcgacattcccaatagttttcaagctaaggtgtaattgaagaaggcgaaactgtactatcaaagctcctttgtgataatcatctcgctgggttgttactggcgtcgtccggggggttgcactcgattggatgatcgtttcgacggatcgtcctcgagaacgcgtcagagattccgaggagcatgagagacaaccgcattgggcgtctagcaggtgacttgaagaagcagcatgggtctaggctgtcgagcgcagtgaatggacattgtaggcgggatcgttgactgctggcgctgaggtcgagcttatcgcctgattgctgctccgggccagctcctcgtttccgcttttcgtcccccgcgcacatcgagcctctctcctcgctcacctccaaaactccgccgacaggtctgcaacgcccaccatgccgcagcaattgagctcgaaagatgcctccttgttccgacaggtggtccgacactacgagaacaagcagtacaaaaagggtgagtcgttgccaatgccatgccgagtttaccacgctggtcgtcgatgtttcatgcgggcggacgtaaaagggctgactgtcatactttgcttttctcgagggaattacaggcatcaaaacagccgatcaggttctccggaaaaacccaaaccatggcgatacgttagcgatgaaggctctgatcatgagcaatcaaggtgaacagcaggaggccttcgccttggccaaggaagctcttaagaatgacatgaagtcgcatatctgctggcacgtgtacggcttgctctatcgcgcggagaagaattacgaggaggctattaaggcataccggtttgctttgcggatcgaaccggactcccagcccattcagcgcgatctcgccctcctccagatgcagatgcgggactaccagggctacatacagagtagaagcactatgctgcaggctcgacccggcttccgacaaaactggaccgctctcgctatcgcacaccacctctccggcgacctagaggaggctgaaaaggtgctgacgacatatgaggagacgctgaagaccccaccacctctgtcagatatggaacattccgaggcgacactgtacaaaaacatgattattgcggagtcaggaaatatccagaaggcgttggaacacctcgagtctgtaggacaccgctgctcagatgtgctcgctgtgatggagatgaaggcggactaccttctacgcctggacaagaaggaagaagccgctgcagcctacactgctcttctggaacgcaactcggagaactctctctactacgatggcttgattaaggccaagggtatctccagcgacgaccacaaagccctcaaggccttgtatgactcctgggcggagaagtacccccgcggtgatgcgcctcgcagaattcccttggacttccttgaaggcgatgattttaagcaggctgccgatgcctatctgcagcgcatgctcaagaaaggcgtgccatcgctctttgcgaacattaagcttttgtacaccaactctagcaagcgtgacacagtacaagagttggtcgaaggttacgtctcaaaccccccagcgaacggtgcggctgacggttccgaaaacaccgaattcctctcctccgcatattacttcctcgcacagcactacaattatcaccttagccgcgatctatccaaggctctccagaacgttgacaaggcccttgaattgtcccccaaggcggtagagtaccagatgaccaaggctaggatatggaagcattatggcaaccttgagaaggcagcagaggagatggagaacgccagaaagatggatgagaaggatcgtcacatcaactccaaggccgccaaataccagcttcgcaacaacaacaacgacaaggcgcttgacaaaatgagcaagtttacgcgcaatgagaccgttggcggtgcccttggcgacctccatgaaatgcaatgtgtgtggtatctgacggaagatggcgaggcttacctgcggcagaagaagctcgggctcgccctcaagcgttttcacgccgtctacaatatctttgacgtgtggcatgaggaccagtttgatttccacagtttctctctgcggaagggtatgattcgagcctacgttgacatggttcgctgggaggatcgtctgcgcgaacatcctttctacacccgagctgcgctttccgcgatcaaggcctatatacttctccatgaccaaccggatctagctcatgggcctcttcctgagattaacggtgctgatggggacgatgctgagcgcaagaaggctctgaaaaaggctaagaaggagcagcagcggctcgagaaactcgagcaagagaaacgggaggctgctagaaaggctgccgctaaccccaagagcctagacggagaggtcaagaaagaggaccccgaccccctcggcaacaagcttgcgcagacacaagaaccgctaaaggaagcactaaaattcctcacacccttgctggagcactctcccaagaatatcgaggctcaatgccttgggttcgaggtacaccttcgaaggggtatgtttcaagagttccgcaaaatgcgcgtgtacataagactgactactcttctaggcaaatatgcacttgcgctcaagtgtctcgcagcggcccattctatcgatgcgtccaaccctactcttcacgtccagctacttcaattccgccaagctttgaacaagctatacgagcctcttccgcctcaggtcgcggaagttgtcgactcggaattcgaggctctcctgccgaaggcgcagaacctcgaggagtggaacaaatccttcctctcggcacacaaggacagtatcccacacaagtatgcttaccttacctgccaacagctcctgaaacccgagtccaagtcggaaaatgagaaggagctcgctgctaccctggatgcaggcattatgtcacttgagacagcccttgctggtctagacctactaggcgagtggggaagcgacaaggccgcaaagactgcttatgctgaaaaggctagcagcaagtggccggagtcgaccgccttccgagttaattgaatgtcgacactgcttgcttctgtctctgttggtgtctgaatatggttcttggtcttattggtttcattgtgcgcacttagcgaagcctatagaaccaaaatgagatgtctacttcagccgaattgtcaagatgaatggaaagaccatgtatgagtatttatggctacttgagtgggggtacgttgcttggagtatatactaggtacggagtatagccaaaaatccaacaagggaatcgagatttgcaacattattatttactttgctttcttgcgaagtctccatagtcgatcgatcagctaccagttaaagtgtcgcagctgtcccatgaacgccccctgtgtgatttcgagcaggcgagcaggcagagccagcctagcccgagtgctgacgtcatcatgatggtttgtttggcagactattgcattaccataggagctccaggaacttgacttatgtaccgtagtatgatagtatcccgtcttctgagcgcactgtccaggacctagaccaaagccagcctgtgtgatgggttcactgataccttgtcccagcctcctgcgcctcttagacgctggggctcccttgcacgcattcgagactttgttagcgttcagcgcaccgatcaaaaaatagagcaggtttatcgcatctcttaactggtttagtgacttttgagacatgtgaatccagggttgagagtcatggcggcgcgcgatgacagagttcagtgggttgattctgtcaggtagagatgctgatcttgttggatgatctcatgctggagtcccagacttccagtttatacttcgcgatcttcgatggtgctttcctcaacggcgttacacaaccaacgacagtgtgacgtcaaagcgatattggcagtcgtggagtagtatgggcaagtgcactggtggcttggatacatatagcgttccccttccttaactcagtcctctcccttactgactttttgacttttgacttgaatctttctaca

SEQ ID NO: 5565 - DNA, 8645 bp, Emericella nidulans
cgatggaaaaggaaggatcagatggcaagtaggcgaaaaggcaaaaggataataaatacggggaggaatagtagtgagtctagtgacgaacgtggtgatgcggtcgaaggctgagcagcggatccaggtccaagcaattccaggcaggaaccgctccacccataccgtacctgggtaggtcgtgaggtacgagcactcaacactgcctcagctgggcacgctctccaagctacgccgttgaagctaacgagaaatcagccacattggtgccactcttaaggctgaatcgcgtggtatcatgacatcaaggacagatggtcatgcggcatggtccaaataagcacagccagtatatagctctagccaacaatgatcacctcgtatgtattattacaccgtcaataccatcattactacattagtttatgccgtccttgatgttggggttgctgcagctggtgacataagcgcatccgatgcgtagatctatagaccgcagaagcaaataaaaaaaaaaaaagaaaaaatgtctccggcagatgcccaaaggttccaagtcagtaggtggcatctgatgtcatggctggaaataatccccgaatataagagtctgtagagatgatttatgtcagaagtcaaaatagtaccttggacttgacacgctttacgccgcatctttataggacttgctatcccttgcttgccctgactacgaccgcctctgctcctgccctctggcttctccagttttgtcatccacagtcagctgcgcaagctgaatttttgctagtgctcagcagtgcttagcagtgctcagaagtgttcgctggagctcaaattatcctggttacgtaccagttccagtctcaccactagactccacgtacatacctatatacgcatcagatatctagaccatcagactggagagaaccagcaactaacaagatggcctctcattctcagcctacctgcctcaacgtgggcatcctagcagcaggcccgcaccccgtccaaactatatacctgccagcactgaacgcgctctctaatctttatacaatatctgcattctatatgccgagctccactgcgcaatccgacaaagaacgggcggtcacaccgaacgccatccttaccgaccccagtatatcgcttattctgaattttatgccgaacgagtaccacgaactctacacaatcgccgccctccaagccggcaagcacgttatggttgagacccccgtgagcttgagcatcccatccgcaaagcggatccttgatgcagagaaagatgcgccgaacggggcgcgcgtctttgtagcctgtgcaaggcggtacgcgccttgctttgaaagtgtgttcaagaaagaggtggcggagctagagaggatccattatgcgcggttgaggatgatcgccgggccgcatgttgcgcatacggcgacgagtctaagggttgtttcgagtgatgagcccgagctcgggaacggttctaaggagggggtccagggggagaaggagaaggaggaggaggacgaagatcgagcagcgcgcctccacgacctgatggaggaggtctttggtaaagaagaacaaccaaatcacgagcgcatcgccctcagtcgctttcttgcctcgctgggctgccacgacctcggtttgatgcgagacacactcggctatccagatgcgatctcaaatatctcggtgaatgagccattctactcagcgctgttccactacaatggcagcgttgccggtgcccggtacggccgacatccgtttacgctcatgtacgaaaccgggacggattgcgtaccgcgatgtgatgcgcagctggcggtgtatggacataacaaaactgtcactattcattatgacctgccgtatgcgcgggcacagccggttcgcgttgttgttgagagggcagatgagcgcggtgggttgatgcagacagagacggtgagtacctgggaggaggcttaccaggaagaattgaaggcgctgtatgcatacctcgttgaggggaagccggcaaagacaactgcgagagattcgttgcaagacatcaagctgtttcagacaatattcgaccagtacaataagcaatgtgggacgatccgcactccgcttggttagattaggtcttgcttgaagttcgaagtgttagttgggtaatattcagttcagtcgctcttagacaaagtctatgcgctagattattgtacacggttatagtagagctgatgccgtgccgcggcaagaagtatgtgctagatgcacctggctcatctattggactagctagaatataccaccatctaccgcttccccttcttcttcttcttttgactagagcccccggtttggggcttttgctgctgctgctgcccagagagcgtagtctcttcagatttctcactgaccacccctccttgcgtacgctctgcagcccgctgcttacctttcctccctctaggtcggtaggttgaccggtcacgtagcggcagccaacgttccgggtcggctgtcttgctcggatcataatctttggggagtcgggactttcgaactcgcttcgcgacacggtccttagtgggagcaggccgcttcctcgctcccgcgatcgctgcggcagcagcggcagtggtagaggatgacggggcaacacctgcagtttcgagagcggcaacgtcaatatctgagatcaggtcgtcaacggatgggagatattttgcttgcgcttcgacttgggagtaatcaatggctgcatgtgaggctacgtagccggcaacagcgaagagatcgtctggcgtcttctcatacagagatttgaacaacaccgcggcctgggatgtatccgatgcaagtgaagagtgcagaagagacgtcccgctgcccggagcagtgacgttggctgggcagcttggccactccagaacgtcgcagctttggccaattcggctttgatctgagtctttcggccctcacgtttgtacaaggcaataagtacactgagtaaaccggggttgaagcggatctccttgtcctgctcggaaatggactcgtcgagaagctgaagggttctctccaagatcacgatggcggaagtggtattgccctggttcacgtagagttgtacggcagtgaggaccagcccaatatcctttggccgtctctccactgcagaaaggattgcctttagtgctggtgttcctgtctcacccttggcccgtgctgctacattgtaaactgacaacaggtttgtgctagcttctgtagacggaaacggggcttgcgacaaagccttggaagtggatcggattatgccgtcgtatttgtgaactagaagatcgacggcgtggaggttacctgtcatgacattgtactgatagtcaaacaacttgtcgttatccgttgagtcgggtacttcgtggagcgcttcgtacagggcatatgggttcgccgtggtcccgcgagcgatcgcggcattattctgaccaattcgttttgtggataattcggagatactgtgggctgaataagctattgtttaaccgcgatttgggatcgacatactctttgattgagatctcctccaggatggactcggcctctgccgacttgccctgacaaatcagaacgtacagctgctgcacagcgattggaagcaattcagcatccctgtcttcaggggtaaggtcttcctaggtgcggcagagttctgtaaagaccggtcagctgcgatctcaatatctgcgcttggctagcacagacctttggcacgcttcaagagcaatccggcttggtcaaattcgcctttcgcaatacttagacatgccgcattgtagaccgtctcaaacgcctccagatcgtctctcgtaggccttgtatggcgaacagactcggggtggcctttccactgcagttgtgcatccgtcgcccagctgttgattcgtaaatcgttctcctcgttcaccgttggcgctgactcccgagaaagtccttggtatatctccgccgtacgacgaaacttctcggcccgatatgtctaatccggaaaaatgatggttaaccgcacatccacacaaaagattcggagaacatacagcctgggcttccagatgccgtgcaccccggtcgccggccaggcttgaaacaacatcaatggcagtctcggggtgcccggtcttatagagagtataaccgtattccaacgccgccttcttcttcaggatatccccgccttcctcgaaaacacgtagacagtcttcgtaccgatcgagtttcaacaaagcaaccaccttaacatgctgggcctgaatatcggacctcgactttgctaaggcagcatcgcacgagcggaggacttcttcatggtcgtcaatggacgctctggagaggagcgagcttaaggactgcgtggacatggcgatttcgtgcgtttcgcggtgtggacgcaactggcctaagagagaggaatgcttgcccgagacgggacactatatcagatatcttcgaattgtcgatgatcccatgtagtgtctatgtcaaactcgctagaaccaatattctcatggaactgttaacaccaccgcacctgggcatctggcaaatgtgtaccgcttcccaatttggagccggcgcagttggttgctaggcgctgccgtactttgcaggtgacttgattactaataatgcattttaaccacttggtgccttaggctataaggcatcaatatagatattccacctgaagatcttcgggagaccatggtagtggttccatcttctccgtcttccctctttatcatcccgctcccagcaatctaatggaggaggcgctagtttacggcgattattttctcatggcacttaaaaactcgttgcactactatgacaaaacttgaaatgaagccagtcgaacaagaggggcagatagttgcgggattagcgggattaccagatggagccatgtgaggccgggagcagcgagcgaaaccatttgatctgctccgtacttactctccgtaggtaaaacagagactccaatgtgcgggggagcagcaccacttttgtgcagagcaagaatgccccgtatgttggagactgtactcagaggactccaaagacacttctccaccgtgctccgtacacagggagtaacctgtttgtgtctcagatccgactcttgggggtaccctcttcgcctttccgtctccattaatagaacccaacggagatgggatagccttacgcagatgaaaccctgcgctggagcatgtgaccttttgccgcttcgagaggatggaatgatatggaaagatcgcctataccctgtcgatataatcccttcattatggcatcggtacggaccgggctgacactagatggggattccgtgctgattatttgtttgcatttttgaacacttgcatcacaaccactcagactgattgctacgaccaggatcatatgttagctagcataccagttcggcagctccaaccaaccgccaaggaatcgtgggtcgcagccagccgcctccgaccaggatcgcctcatacgcgtcatcaacgctgcaacttgtccgtgttcgggagtgattctgtggttggggtttgactgccatgaatccaagtcaaaccaagtcttaccaaatctttgatcattttcatcgctccaataagatcatacctgctgatgacttcaccccagttcgcgaggcgggcgttggccaagtagccgaacccagccgcgatataacgtagaaagatggatcagcaccaagtggaaggttgaattcaggattaagaatctgacgcgcggctccagcccatctagcgagtcaagcattgcaggccaggaaaaaaaggaagcataaagcaacaataatactactcccactccgtacgtccagtggagtggatcgagcccccccggcccctttacgtaccctcccacctgcatctggactggccggtgctcctcttccttacaccttttttatctttgaccccatcccgtcccccgaattctcttctatccgttctattttctcccacttcatactctcgcttcagtctcttatctggatattggtcttttcataggtttaatatcttccggtcgctacctttttgccgctccacctcgtcgccgccacgtcgagcgctcgcgatgcgtatgcgatagtgtcgtattcccatccgccttgaaccagacgagccaatctacgttttcccatatcatgtcgacgaaaatgaaccttcgagatagaagccccatgagttcatcgtgggtttggaagaaaaagctgcctcgctttctcgccgccgcctgtttgatcggcacactccttttcttcatcggtccacggatcaaccaccataaattggaggaggatatagtgcaggcggcttcagatactgccaaaaccgttgccgatatcaccgcacagccgcctcctgcagaaaacatcacggttacttcgaaggtcgggtgcgagcccgatctcgatgttctagaacgccttggcgttaagaagttgtctaagtatgtgcgtcgggaagtgatcgcagtgcaggcgccgatgaacccgcccttaacgcaagttcttgagactcctttgttcgataagcattcgatcggctggagggcgcccgagaacgcggacgcattgcagagcgactgctcgattgccaccccgctcaccttacaagtcccgcgccctgttgaacacattgacgcctcgcacttcgatttcggtgtcgccactacgttggacaggttgaacgagtctctagatgcctttactcactgggccggtaataccggagtccgcatcttcgcactgattgagccagatcggcgggtgcccgaggtccttgccaaggctgaacggctcgggattcaactgttcgtgacagagagcggcgaggaataccagactcggtatttctcgctggtttcgcacttggctcacaacctgcgggaggagacacgttggtcttgcatcattgatgatgacacatttttcctctcgatctccgctctagtggaggcttttgagcactacgatcacacccagcaaatgtatgtcggcggagtgtcggaaagcgtggcgcaaatcggattatttgggctcatgggattcggaggcgctggcgttttcctatctcggcctttgatcgagcagctcagcaaacccgaggttttcgacgcttgccagcaaatggtgtacacgggcgatcgccggatttccctgtgcgtgtatcagtactcagacgcatctttgaccatcgaccaccgactgcggcaactggatttccgcggcgacgcctctgggttcttcgaagcggccaggcccgtaccccatgtctgtccaccactggaagagctggttcacaccgatatgacaaactaagccaagtcagtgaagtatgcggcgactcctgtcttctgcgcaaattccgctttgccgacggctggaccctgaccaacggtcatgcgatcattaagtacagcaaagaactcagcctggatgatcactcaatggagttgacctgggatggagaccacggcgccaaccgtgaagccttcatgcatgaactcgggcccttgcgcgagaaagacgatggaaaagtcagctatctaatggccgactcagtcacagacggcaaccaagttcgccaatggtacatccgccgtgatgagtccaacggcgatgcagttttcgaattgacctggcgaaggcagtagatcaagtatatctggtctcatttcattcccatttctttcactatcgcatcacgccataccctttttgcgaagacatatcaccgtctcgcatcgcatgcattaataaatacatttatagactactgcctcactgtctccgcactgtctttgcatcccccagagggctaatgccaccgcaccagacttagatcatgacttttctgttccatttccatgttccgatgataccgcagctttctgttccgtccgtgttctgtcttgtctatttcgcttcgttgtacctatattcagctgagctgctactgtcccgctgcacagaacgaccaaaacagacgctgggtttcgtctttgttgtcttccatcacctaacctaccccatcctacctcagttaatattcagggaaagactatactatgcttcgatgaattcaagaaaattagttgtgcagtccttgtgaattatgcgcacatgtattcaccgaagtacaaagcagagctatagaagtataaagtaaattatattgttcgttccaatgagtctataggtggtatgtcatatcgtgtcatgtcagctgagtctcgtacttcctggcaataggtatgagggtggagagatagtgataataaggatgatagatacatggagggagtaaagacgttgggaagatacgcagatgtgcaaaacacagtccaatatctccgacaggttgatagatatataaaaacctagaatcctcggtagcgatatatataccctttctttgtatgggcgaattagggaggagagcataagggtgaggaggaggaggaggaggaggaggaagatagaagtattgtttgtggtggacccagtccaaaagtcaagtcattaacctcccagc

SEQ ID NO: 5566 - DNA, 7248 bp, Emericella nidulans
aaccaatgggccttgccggcaggctaaaaaaaaccctcaaggatcccaactgcaagggtagatacgcacagcatgactcctcagcggtcgcttacccatgtggagttgatgttccgcagctaaagcggcaggcagtacgacaaacagtatgatttgccgatggcgtctgtgacgagcgtggatacttgaccaatctaatcacccaagttcaaggaaatatgccaaaaaaaaaaatgagccgctattctgcccaaatatgcacgacaatctgttttgagcatagtgcatatcctctcccctccatatgggttctttcagacaggatcccagctatcggcttgtgatttcaacgcgctatgtaggtaagctgtcatggttgtgcaatctgcgcagcgaacattgcctcgtatataccgaaatttgcactcaactgagcgctcagagccatggatacctggagaccggagcctgagcgcgaagtagggccacgctagcgcggaaatagccaccgctgcgaggctgctagacatcttcgtgatcacccaaataagggcaatttttgtttgcgcagagcttggagcccaatcagccgtttgtttgtaggcccgcgtctgtctgattcgtcccgcggcggtaattcgaggaaacaatatgcactccgacaggtcagtctatgcatataggtagaccgcgcccagacaaacccttctctgttgggcagaggtccattagttaccatcgctgagccacacccgcgtcggattcgcggccctaccaaatggttgtcgactacaatgaaatttgcaatcctgatatcgtcccccactcgcccagccaaggtgtgctgaggcatctgtctcagctaccagctctcgacgacttgacgccggaacccgagtccggcaaaaggtcaccgcacggctgaaaatacatagtgactgttttaggtacagtaacctttttacccacttcggttttgaccaagccagacattgatacaatccaataaaccggtgctaactctgactcagtctcattggccgctccatctgccgccgcatccaaccgttgagccgcaaatcgctgcagaggcgtctgagaccacatgctgaagagaccaatgtgcaacaacgttcggggacgttttggagtctgcggccacgaggcaaccgtatatattgcgaggtgtcggccggcgatccagaatcgcgtgatctgtcctcctcacctgcgcatagacgtctgggactggcaggaggataaagacaacgagagatgcccatcctgccggggagacacaccacccgagaccccttaacagcatctccagcgaaaatggagtttggatcgacaaggacccgggttatgtgtctggaccgacgctgtgccctccggactggttttgcaattcagaaacgagtttctgctctgaacgtccgccccaggtaaacgacgctgctttggatttcgcattctcaatggaagtatcgcgtctaatgaatatcctgttgtttattagccatctgtgtactacaccatgctgaattgacacaccattcatcgccctggcggctagcaagatagaccagatgaggtaaccgcgtgacttcactacgcgagagagtttctccaacattcaggtcgaagatgaaccaccgctcaagcggctggctagagtcgaaatccgctggaatatggacgtggtcgtataccggcggccggggagtggcgtagaacctccggcccaggagattgccagtaaggaggtctccaagggcgatatggcgagcttgagggttccctgggatatcagaaacgcgagcatagacaagtacccgcattgaatgggccatgatatgccagcagattggggacagtggatagcagacgcagaacaaacggaggatagcagtaggacgagggaggtgaagaggagagaataggcgctttgtgtgctgcatccaagcaaacaaagggaccagagggcccgagcaaagcagagcagctttacgtaggaaggaagaggctgcggaggccgggtaaatccgaccggtcggtgatgcgccattgcccacgataatgtgacctgtctcagtcaggaacagcttcagctcatctcctctcgtatcatcaagaggcgccatgatgagtccgacggccggttccgacatcaagctgcgagctgtccaggctgtccctcagggcctgagatctcagatccccgctgcagtggcactaaatctccggaatgtctgttagtgggcgttagccacgagcgatgcgctggggatccttcgccggggtatggcagaagtacctgggttcagggggaaagtactagtaccttggttagcacccagttttgctcgtggatcaggtaccggtacagccacttcacacacttccgttccgaggacctggacttctttacctctcgttcttgttactgctacatatactgtaccatcacacttgccaccagccatccgcttatagagcctaacagtacgtcatcccgattttgctcgtcacgtatcatgcttaattacccatattaacattactatatatgtgttatcaggaacatacaccatccagaacccaaaactttttaccaacccgatatcctcgtcaatgccgcttattatgtcccattgcctttcctctcggaccagcgacagtacccatcaaaactgcacgagttagcgcaattcacctagagattgggcctatactcactgtcccaatgcgtgaaagagctggaatagtttccccaaaagtatcgatgatggtcatcgtgccaatcggcgccgccccaaaatgggacgattcgtcgcaagctccaggggaagtcatagcctgaatgcgcgtcaattgcctgcagctgacgcagcgccatccatcccaatacagttatcagatgtacatcgccagtgatggatccaagaataaggggcgggcaaattgtacccaggcctagcaggaatgtctctgccggactggcgtattcagccgtcagcccgaacggtgcagcgtattggtggtgaatgcggtggatggaacggtacagcgggccccaatgcatggcccgatgcagccagtagtggtatgtgtcttcgacgatgaaaaagagagcgacttgcgcagcgaagagagacagtttcgggaagggcagcgtatattggacgtggcagacttccatcatcggatgaaagaggacgatcaacggtagctcgacgatgaagtggatggcgaggatgtacttaacacatgtccattggtcgctgaatgacggggtcttgtggtcttggatcttgaaacgacgaaagacactgggaagagcatcggcgacgatccagggaatgcagcggccgaagtagatgagctcgtgggcaagaaaggtcataacccctgtcgcttataagccagcgcctctgctaacatgtaccgacttaccagtcgcaaggacatcgttgttccagaaggtatagtgcgcccaccacaactgctccggccacgagaggctggagtcttgtttggcaacctgaaggagctcagggtatgacatcgagccagaagggagtgttacattcgccatgttgatgcggaccgtgaggctcttcaaggtacatcgcgttcctggtccggagttttcgtcccggatatatgtacttgctgcggtgtctggcccgccgaatcccgcgtggtatgatccaacacaccaccccggattcaggccggatccttacctcgccacaccacgcccctgcgctaataaaaatgtggatataggggcagttcacgtacgatatagatccacagtcttacaccgcgcgattggatttgcggctacctagggtctgttgtggtgtttgatctggacacgtaggatcgtccgtagctacacagtccgttgttttatggcactgcgatagctccactgcaagcctagtattgcctcactgtctcgttcctaggtgtttcaatgaatgtgaataaatgtacacaaatcaactggccatcgcgttacggatatgctcgatatctgttactagcccctagcatacgaatctctacgattgatcaatattcgttttccggcccaagcccagtaagactgttcaatcactctttgaccgtgacgtctttcccttgaggatgaagactgaactttagcagtccatgcaagatgtttcaaaaagttttcggcggtcaaagtgaagccgcgaattggcccatcagtcgacccttatgatttctcccacgagcgaaccacatactcctgcccacaaaccactagtttctcaagagagccatccgacgctggaagctgtatatccgagtgggtgggcaattcgtctgcctccggaccgagcgagtacctcacaacgaacccttgcccttgaacaaaatcctcccgttttgcactgacttctgcaccactcttgatcacagtcctagtttctccaatgggtctcgcaagtacctgtgtctgtcgaagtgcaataaatgatccccaaatcgcgccgataaaggttcgggtgatttctttctcctcgccttccttcaattgcgtcccccccgtcgcgctctcaagcacaaaagacacgttctcatgtccttccattcgcacgaacggtaactccctccatacctcctcatactccctcaccggtgcgccgggcagatcgggtcgcggcatgactccaacctccaggtcgtcaccgttcgggagcgctgagaacgtcccacagtcggcgacaccaaaagcatttcgtgaatccagttcgtgcgtgaagaggacctcatctttcatgctctaagcttaaagatatcataagtgggaggctgtcgtacttgagtttgcattctggagtctttcccccgcaattgcccagtcaattgtcgtggtattgcggtcaacgcgaaggtcgacgtaccagtttcccacggaaaggaaaagggtgtccgtgtctcaaatggggctctggtggccatcgcaggagattctggctgagaggcgttttatcatgtttgactgcggttgggggtcgtgagaggtttgagtttgtgagcacatgattctgtcagccagtcatcaacattttatctccatctcgacccaacctccacatcttccgagtctcttatcagttccccgcacaatggaacaccagactgcaaaaaacagctttaaagtcattgagccatgctcttactccaaatcttgtctcttgtaccttcccttctgggacagtacagggtttggagactgaattgcttatcgcgctggtcatgccaattacactatataactcaacactgattcaccatgcgagcctacaatatgcagcaacaatcagaatgttgacgttctatctagcagctagcattattgtgaccgtcttgttcatgcggcgactttgctcacctatcgcaaagctcccaggaccatggtatgccacgttcaccagctgggtactcaaataccatgaattcacctcaaacagacggctttttatccacgatctgcacaaaaaatatggttctactgttcgaatagcaccaaatgaaatttcgtttgcgagtttggaggcgatcaaagagatttatgggtccggtgggagcggttacgacaagacggagttgtatgatttgttccgtcaattcgggatcaagtatgacggagcggagaactgatttggtgtcgagagttgctgacccgtctaggacgatgttttcgactcttgacaagcacagtgtaagttttgcctgtcggacccgtcccagcttgatttgctaaccaccaacatccagcacagccagcgcaaacgcgaattggcggatcgttacgccatgagcaatatcctgcgcgaggagcatgtttccgccatcgtggaccgtgcgagggcggtcgtatccagatgtgctgcgtctgcagagagcgtggatgtctatgtatgtttcccaccgcagagctgacgcgtctttgttgattgcgcctgcaggtatggctccattgctacgcactcgacggggtcacgaacttcatgttcagtcctgggggcctgcactcgctcgactcagagcatgacttcaaaattatggaggagctcacttatcatcagagtttgcagagttcgtgtccttactagatagtgtgttgcggctgttgactaacaaacatagagaacctcttgcattactacctacccactgtggccgcatattttccaccctgcctgaccccgcgccgctcacccaagacgaatgagtacgtgttgaaaatgtgcgctcagcagctacccagccagcactccctagtcgccaaactagctcgcaaagactcccccctcaatcatacacaagtcgcggcagaatgcaaagatcatatggcggctggtatcgacacaacgggagatgggctatgttttctgatgtggaagttgtcccagccgcataacatccgctttcaggagcgactatgggaggaattgagaactgcccgcccagatatcccgttagataagttaccgtacttagatgcggtcgttaaagagggtttgcggtgtgcgccgcctatccccatgtcgtttccgcgttacgtaccgaccggaggacggtcaatcgacgggcactttgtcccggagaagacaatcgtcagttgtcagccgtacacggtacacagactggacgagaatgtcttcccggagcccgacagttttaatccggatagatggatggtcgagaagggagcggttgagcgtaaccggctgttctttgccttttcgaccggtggcaggggttgtacggggcggaagtaagtcctcctcttttctttttgaatcaggcatctcgtatcatgtattgtgatctaggttgcgttactgatggtcgagcaaatcgtgcagtctggcgctggtggagatgaagatcctcctgcgcgaggtgtactcgcgctttcggacgacggtggcaaaggatatgcatgggtgcatggatattgatgaccaaatcatctcttcgaggccattggggcagacttgcaagttgaggttcagtgagacatgacattgagatctgctgctctgctttgattggtatatcttctcagtcatgtcatttactaccacccagtgaacagccaatccggaatgatactgatccccggccccaaaaaccccctcctcccccgggtaaataaaccgcttggtttaatgaccccgtggttttattcaagacaatcgg

SEQ ID NO: 5567 - DNA, 4464 bp, Emericella nidulans
tcatagagactcatccataaattactccatggtcaggcatggccccaaccccaggcaccagacaaaacgggccatggcagctggcaagactttgtatacatcaaacctagaagccaatgctagcggggtataccagctttgttctatataatctacccagtttaggtatgaataatgtgttgactgcttcaacgggggattgtattaagatccttggtggactctaacaatactctactttacagacaccaagagatatgtactatcttctcagcatctagctactgaactgctactttcccagaagctatggcaaaacgtaccctccatcaatcagcacatcgctccccgtcatataactactcgcatcacttgcaagatacaaataaattcccttgatctccttcgtagatccctgcctgcccagcaccgccattcgatacgcctcattcaccgtctctggactcgcccccatcttcgtgtcgaaaaagcccggagaaacaatattcacgcgcgcaaactccctccactcgcgcgcgagggacttgccaaagtgcgtgacgaacgctttcgtcgcgttgtaaatcggctggtccgtggggacgttgacaatgtgtgcgctcattgacgaagtgataatcaggtttccagtgcgctggcgggcgaagacttcgccggcgaacttggcgcagtagacgatgccgtcgatattgacagagagttgcgctttatattcggggagtgtctgcgagaggatgggttttgagatggccattcctttgcacttgttaatttgtgccatgtccagcgtcgacagttcggaaggggaaaggagaggaagacgagcttgataggggtctcggggaacgtaccagcattggccacgaagacgtcgatcttgccaaagtctttcacaacggtcgagatggtgctctggaccgcatcagggtcagatactgtacagttagagcaaaatgttagaaacacactcgctctcactcacacaatagaccccggccaactaccagcaatacgcaccatcaaccttataagcaacagccctaacaccatgctccttcgtcagtccctcagcttttgcaatcgcagcatcgtttctgcacatacatctatcagcacattgttgccgctttgctacaatcttcgcattttctgctggatcctaaagggtcacgcacgagtgataccacagcgcgacatcgccgccagcctcggccatcgcctcagcgaccgcgtacccaatgccgtctgcagcgccggtgacaacgatcgtcttgccggccatcttaaactgctcgagaacgttggagggggtatcagggacggggcgcgggaagccgtcgcgcacgacggcgcagttttcgtgagtcatggacattgtaccgggtgtcttgcgggcgctataggattgcagcgggaataaagaactgcgaattgattcttatgacggatgaggggtatatatcccagttgacggtttgggttatcttccgtcggggtggtataggccgagtgtggggaggggcgtcgaggggccggcggggtgtcgtccgcagtggagcattacgtaggcgagtatatacaacgcaaaggacaaaaatcggcagatttgcatcatactgagaaaggatcatatgttcgtacctgcccatctgggagttcaatgtgatctcttagacacaaaatgtatgctcttcattgcagtctatgaaaaggctcaactctagcaccacagcagcacaaaacccaggtaaagcatccactagaaaaaaactggactgcccagcccaaacgatgctctaaaaccaaataataaagaataaagaaatgaacaaggaactgctagaaaacaattccacccccgtcaaccacaatatccgccccgttaatataccccccagcccgactagcaagcaaaaccaccacccctgacaattcatgagggacccccatccgcccaaatggatttctctccgcccagatcttcctatgcccctgcagcccttctccctcattaaggatcgtatccatgtacccgggacttatactgttcgttcggatcccgtaccgtgcccactccgccgccagcgagttcttcaacatcagcagccctgtcttggacacgttatacgcgacctgcggctgtgggtagttgactctgtgcgccgagatggacgcaatgaacgtgattgaacccctgtcacctgcgcaaacatgtgcttcgcggctgcctgtgcgcagataaaggcacggttgtgttaacgtcgaggatcctggcggaattgcgagggggccatggtgagcgcgtcggcacagccgactatgccggcgaagcagcaaaggatgtcgatggagcctagaacacttgatgcctcggcaaaggcggcatcaacggcgttttcatcggtgatgtcgacttttgcagttatgatttttgcagcgggaaatcgggctcgtagtgagttgatttcagtctctgccatggacgggttcatgtcaaggaccatgagaccctggagcccgtgctcgaggagcgcagtacatgctgttaggccgagggtcccggcaccaccggtgaccacggcattgccagtgatggcgaagcgagatgccgcgtcctctggggcgggtgtgggggcggttaatgaggctgcattgctattgccgagggtcatagaggggacgacacggctggtgagagcggagcggtcggcgagcgcgttggtggccatatcgcttgcacactggtagctctgaatgatgtttgctaaaagaagggaaacgtgagggaaagtttgaccattctacaagatccagcgggcgtttagcagcgggtgtttatacgctccagagcttctgcagcttccccgcatctgctgtcataactcggagctcggattccgggggagtgggcttaatggtcggcgtctcgcgctccgggcctgcaaacatgtggcagaaatgtatgtttctgttcaacacaccgagtgctcgcaatctcggagctggatgtagtctcgtcggtggacagtcggccgagcctttgggctgacataccaatgtcaaacagctcagacggaggatgtttgagttatttgcaggttcaagaacgtaacctctgattattagtccattaaaaggacagatgatactaaatagccgagccgttcagataagaaggcacagtcggccccgatcttccaggaacagattcagacaaatcaacctcatctgttccaggaaatccattcagcccctcaaataggtcgttctcccatgacgtatcctcgaagaacatctgcagtgtggggtcaacagtcaatgatgccaccgatgcatccgtaatcccagtctcaagcggatcaccctgatagacggcgtctgcgtgagctcgcagccgctgtggctgtcctcccagctcggcctgagcaagctctctcggcgagtggtccctaatccgatccaagacagcaagacacctaaatgcagctctgttcgtcgcaccaagcgaagcaaagcaccttctcgcccgctcaacagacgaaagccacaactcacgattcacagccgccataccgcggtcgagctgtggcacgggcttcaggtgatgtatgctaagcacaacactcgcctggaacagaaagtacgttgcgtaccagctcagccccacatgtacagcgtccgcataatcaagacaaaatgtcgtgatatcttgtatggtctcgaccgcggctagatggcacatgttccgcgcttcttcgcgctcggcgctcattgatacattgtcattgcacaatcgttggcttccccaccacaacagcatgcgtaagttctgctccttccatccgacgacagctctcggtccgcgaaaccagggtggaatgtcttgcccggtgaagtatgaaggtaaactaaggcgccaagctttgagctggtggtcgattgagcggggtgctctaaaggagaaggactgacggtatggacaagagattatttcgctgaagatgcggttgccaatcgagacgagacggccgtgcgcgataatcgcagagtaggttgttggtcggtcgactggtgagggcaagggggaatcttgagctgatatctgcaaaagttagggctgttgttggctaggtccgggcacttactgagtcgtcaatatttcgagggaggcgggtctcaataaaagagtctgatgccatcaccggtcttcctgttgtcaggctaaagccactgtcgaaacagtataccacccaccaaacggctctccgccgctcgttgaacaaggaatcgtttgtctgtcctgagggcggttcgcggtgaagacctaatccgagagccatgcgatacgcgatgccgatgtagttgtatccagtgtttggtcggtctcgcttctggaggtaattgccctggaaagtcagcacgcaacctgcaattgtaagatcc

SEQ ID NO: 5568 - DNA, 6106 bp, Emericella nidulans
gcaatggatgagtggtgagcaatgtgctctaagatctcttcgacctgacgaccggctttcacggaagcagcaatgtgtggaatttggcgagggaggtttggctggctgtacctcagcttgcgaagtgcaggtacgcgtacctacgtcaagcgggccagaaccatcttatcaatcagggatcagcactgatctaccccgtgagagcccagagaggaatagaataggctgaagcttccctttggtattccgtcactgacgcgggccgacctcgggggggaagcatgccacaaattccccatggcatcattacatgatgcaaaatacggagaatacgtggtaaagggcatggtcaatgctataaagaggtccttcatcccttcaagatcttgtttctgggtaatatcattgaagactcacattctgtttccggtcaagcattttcgccacgcaaccactctcaaagaaccactcttttcttctttctacctcactccacgatgagaatcacctccattgcatcgctcgtcctggtgggatgcgccctcgccgcaccccctcaaccccaattcgaaggcctcggtggtgaaactcccagtcccaccccaaccagcctcccagtaccatccggcagcgcctctcccacttttcttccccctcctgggcctcctgggcctggagagagcagtctcccgttcgccgtctacggagccaggggtcctccctatgccgaaggaggtgagggtttgccaactccctctggcggcccataccccaccggcttccctggcagcggtatcccgccccccgtgcctaccttcagcgttcccatcgacgctgtcaagcgccaatttgagggcgctcctgctttcggcggagagggtgagggccagggtccacctctggcgccaacaccgagcgtccccggctttccctttggccctgggggcatcccatctggcgctacgcctactcctagcggtacccccagcggtatccctagtgggtttccgttccaggcgtaagaagtttgggtcaagcgtcgatatacgactcgaatatgcagagcttgtgacaacgttgctgtctattgggtgagataagggtagagcagtgggagaactacggttatcccataagctggagaaggagggtaccagttggccatgctgagataattcggatgcctgtaaagaggtaaagcgatttctctagagccaatgaccgggacttcaaatggctttgctataatatcttttggcattttgctaaaaaccgaaggaaagacacagtaattgggtagcaaggtacctgaagccctaacttctcccagtcagaataagatactgcgggttgaaccatagacgagatttacgagatatagcagatagatgactctatgtctgtcgaattaaaagaaaataaactaaccttaaatactcgcgaatctccctttccgtccactcccacagccctctcgttagattatcgtcctttgctaaccccgtatccaagcccccgatcccaaccggttcataataacagctgacgcaacatccacactcacagaggctcaaaattgatttctcaccccctgttccacagatgtaaccaccttctttgcaaccttccctagcaacctcacccagtgaggagacccagtcgcatcgtccatcagatttgtgcctacaaccccagggtgcaccgagacaacggtaatccgcgggtaccgtctcgccgcctctttggccaatagtatcagcgccaatttgctctgtccgtagcgctcgtatgggcctagactttgtccgtttgtgcgtagtgtctcacacctgatcccctgcggtttaggcacgtacaagcggccgtgcgaagagacgaggattatccgcacgttacactgcgaaaaagaggctgttctttcaagaagtggcatgaggaggacggtcagcaggacatgacttaggtaatttgttccaaactggatcttgtgcccgtttgctgctaaacccggtagaacggccatgatccctgcattgagcatgagtatatcaagacgctgacattgtgcaagaacaatttcgccgcgttctgcacagactcgaaggaggagaggttcagctctaacggctttatattcgcagctattggtctcgacagctgggactgaatatcctcgatgaccgcttgggcattggcggggttgcgtgcagcaagccagatcagggctggattgtgctttgtttaatcagagacgcattgttttccaaggccgtcggtgccgcctattacaaggatgactttaccgtgaagggagggaatgttccgagtgggattgaaggggagtggatttcctccaaaaattcattgggtcaatttcaatatgcgtagcagatgttcttgaaagacaagggatgtgtggtttgtgccaggagcaggacaggtagtcattcctgtgcatgctatataccatgcacaacttctggagacgattctagcgcggtgttaaggcatggctgatgcgggaaagcgtgtctaataaaaccaccgtaaataagctgtcatggactaaaacgagaaccaaatttttgacgtgtctatattccaaagcagcaattgtcactgtttttctgttatagtatcgcgtacggtgggtatgtaatttttttggattgaggtgggcaaaggctgcaggctagagtccatttttcaacgtgcctttagcacctgatgtgcccagggtcggtatacagtgcagctagatactacaggcattgatatggtcgcggtcagtctagggacagccttctaaatcattaccagcgcgtctgcgacggatagatccgacaacacaaatgggccctaccgtctgtcctcggggtccgggcttgataagggtggaataagatcaccaaaatggtatgctgggactttatgatctcacgggcatttgccatagccatctcagcctgtatggattcctgtaccatggtgtaccaaaagcctagcgatctatcccagccatgagtaaaacgacagcacctgctgcccctcaaaaccacagatagatctctgctctcagggtatttttcccagcatatcatcagctctaacactgcctcctgtcgctctgcggataacagctttctgtaagacaactcggagtggtatgtgcccagtctgctttcttcgagtatggcgagtccccagggtcgaggaggattgtgatggcggaatcgaacttgcaaaatgctgctatagaaagagcgtacggcctcttgctcaatgcgaggatgtcgctccgtagccaaggagtcgcttgcctgaagatgcatttatgagatttgattgccctgcggagtgtgctgtgctcttccggaagctcctccaaaggatgttgactgcgtgatattctgcctctctctcagctgtaagaaaaggaactaggcaactgcgagtggaagcgaaagacggtggagttgccccattgaagtgactcacactgcatagtgagcatcatagaggtggaaagacctatgtcctgcacaaattcataagaagcaaggtacgcaagaggatcaggaagttggaaatacataaaagaacattgacgataatgagcaataaaacatttgaagacgaggtcggtgagagaaagattgggagatagcaaaaatgatagcggcgagtagagacggaatggaatttatagcaacggtgttttatgtgagccaatgactctaccgcaacacctttgctgtgcgtttcttgttgaaccattaaccaaattacagaaaactacagattctttgtacaatttttccgtctcaggaccggcccgtgactctaccaacaccgctaagaaggatgacttgaagtgtttcagggttcagattgctacctacggactgtatactcgtacgcggcacggtaccgctcacatcattccgctgacaatggtcagaaggggccctatatgccgcccggcctcattccaacattgggactgtcctataataccaccaacaggtcgtgtcgagcctccatccgatgcgtccgtctgcagtagagacagccacaatagcacccatcctttgccgtaaccacgcgggtattctttattctttcaatcaacgaagagccaaagccagaaccgaactccgagccgggagagatgtcaataatccgtcagtgatgttcgaagccgacaattaactgagcagaacgaggatgacgctgtcgcctcgtaggaacctagtaacgacgccatcagcacggtcttctcttaacaaggtggagtagtaagtacatcttgctgatgaatcgatccttgttcaccggtcgtcccttgccgcccttctggggctcagtccacatctctttctgtcggctcattagcaacgcgttcctcggaatcgaaccgggcgtggtttgaagttataaacatacgacgttctcaagaaccctaagacaatccagttagtctcacagtttcagagtagatcagcagctgataggtccacatacatgttactgtgacgatcaaacgccttcacgcgagcaagcctgttaatcccactgtaagcatgctcccacttccaatatggaacctagaggctgtgtgaacgcacaatttccggttcgaccgcagactaatcaagacctgggtatttgttcgcacggctgtctgaagaagcgagaggggaccgttgctcaattcatattcctcctatttgcatgccgttagccatcgcgtccgacccaatttcgtgcaaccaatctgctctcaggccagcatcctgtgccgctgagatcgtagccgagccttagcgcgggagagcggaaacgtacgatttgcgcgatttcatattccctgagacgagggctgttagtttgtttctgcgaagaggtggttgcggtccgagacttacgtgcactctgagcgaggcttctggagaagggtcctgttaccgtcagtttctcttcttgctcaaagatacaagggagcgcactgaatgttcgcgtcggccattgtgtaggttgagctgtgatttgcttctccgtcggtcgcggcttgaaatcggtgatagtgatatcagctccagattccgcatcacgtgataagaattctgtcggcgcgaaaaaacgttgcaccgttcaaagagcgatccacgtgactgacgctttgtgtcggggcatactgcccttcagtaccgcctgcccctggggttcgacctcaattagtcattatttagtaagctagttgtttagataggcaggccattccggccacccaatgggagaactatccatctcttcccacactttggactaacctgagcaaagagtcgggtcttacttctcagttcttacacgttacaggtcaagagattcatcggtccggttcttatgctctcggttatctctttatatatccattgtgtctgtaactgacattgatatttcacagcgctgatcttctgcaaggcttagctcttatctctctcccttctactctctgtctcaagctagggattcgttggcttttgtaagcagaccttgcagtattttctcagggcataagcagacttaaatgattacaattctcagaaacatgggctctagcaaagaagttacaaggctgggatattatcaggtctgaaggcgttgctacaactacggataaaatccatgtccccctcaaatccagtacccaacagattcctgttagcacaaagaggatagtcagcatgagccttaaagatttggttttgtcaaaactggccttctgttgatgctagaaatctcatgtcagcttagtgaagtttgatcctctgctgaatgtacagtccagctcttcaaagaattataaaatatggagcgccagactagacgaattatcagcatcaactatcaataatataaaagaataaaggtctaatgcttcgaaaagctccatagggaagttcaaatacataaaaaataataataataacctagctcaatgcagcaggtgaaagagacatagcttttggactgtggaaatagcagatgtctctgcataagcatcagcaagccggagcttgcagttctgatatccagagtaggc

SEQ ID NO: 5569 - DNA, 4467 bp, Emericella nidulans
ctgccgcatatcttgactgacccgccacacgaacaatgacatactcctgcgtcaacaactcggggtttcggtttttcgactgtccacttgttaatacatcgcacagaaaccatgcgcctaggctgtctgggagtgcgccataccaattccaacgctattcttcccctgccacaccgtcgggcggatcttgtcgcccgtctcgacgccatgctcattgttgtagttgctgatatctgtggtgacggtggcagtgccactatggccgacagccttttcgacgagattggcggcctgagtcgcggccatttttctatatgatgttggtcgaagagtaaggaccttggaacttagggctggtggagacggccggtatgaatcgtgattcaatagaattggtgcttcgcggattgactctcgctttcaatattaactgaaggaatatgagaatagaaagagttcttctctgttctggctcgagagctgctgtatactagatgacatgacagccatgaagaagggatgcatcaccatgacatcacatgatcaagctgggtcttgtcgcatttcagtcgcctagactcagccgtcaatatgacgccagtcaatcgagtcacacggttagataagcttaatcagctccgggtttgacgagcgcaaatcagatatcaggcttgggttagggcagtgctatcgcaccccatacccccatagcacatatgtggagacggtatgaatgattgtataaaagttctatctatatataatcaatttaccactcaagcactcaggcagcctcgtcaatgccagtaatcaaaaattgacttaagatgctacaagcaaatataccttctccatttgagtcgatcagggcgttgtacgcgtttgtcttgtggtcggagcctaggagatacctacatagttataagcaactgtatagagagttaatggcttgctcatacccgtccatcttccatctaatttgccttgtatagcttctagattatccgcgcttagttgttgattgtctttgtaggtcgtcaagttagaatctgtagcacggtgcctatatgttgaggagttagggctatctagacaccccggtccaatccctgtcgaagacccatacctgcccccatccccaacacatcaagacaaggacagatgtagactactgagcactcggagcggatgagaaggcattcgtccggcgtaattaaacgtcgatgtcggacggagctactcggacttaaactgtggaaataagggtgactgcggatttaagcctcacatttatactcctgccaggcaataacagaaagaaatcccatcactcccaaaccatcaatttcaaaatggataacgcaaagatcgtgctcatcacaggcgccaacaccggcattggctaccaggtcgtgcgagccctctacagcgccgacaagccctacagcgtcatcgtcgctgcgcgatcgctctccaaggcgcaggatgccatccgtgccatccaggccgagtttcctgcctcgtccaataagctcacgccgctagttatcgatgtcgagtcggacgagtcaattgagaaggcgtacgaggaggtgcaggctgcattcgagaaactggatgcgcttgttaacaatgcaggtaggctactgccggctgacccctatacgtttatctgtccaaaagtcgtgtcagactgagggtgtttaggcgctcagtttgatcccctcatcgccagcaagaaactcaccccccgtgaagcctggaacaagtcatgggacgtcaacgtcaccggcgcccaggtcctgacgctaacattcgtcccgctcttgcttaagagcgccgatccgcgcctcctctttgtcacatccggcacctccatactcagccgcaacgagggcatcgctctccccgtcgaccgctcccccgaggccgggtggcccaagagcaagacggcgatcgacgtggcctcctaccgcagcgcgaagacaggtctgaacatgatgatgcgcgagtgggagcggacgctgaagaatgacggggtgaaggtatttgcgattagtcccgggtttttggcgactgggttgggcgggctcggcgctgaagcgctgaggaagtttggggcgggcgagcccgatgctgcgggaccgttgtttcgcgacgtgattgaggggaggagggatgcagatgccggcaggattgtcaagaaggatggggtgcaggagtggtgatggcaacggttgggcgaggtggctttgtcgaggccatatgaattcgcagattaccatctcctctgtctcggctgttctgagtagatgatataatggctagtattatcaggctgagttgttctaattcgagccctaaagcttctaaaggtacagaaaagacgcattcaggtgacactataactctcctttgaagcaaccgtctataatcagtctgccaacatttcctctgcagcctgatctatgaccgtccagggcttgttgggcttatccattggatacggacatgagctcggttggcaagaaaaggagggcaccgttctaatagggcttgtcggaaatagatatgcaggtgtctctcagaatttctccgtcccatcttgtaaaatgcgtctttcaataaatatgcctcattaaactaagctcaccatacacacatcagcagtgggagctgcttgccaaatgccaatgaagcagtgtttaacatcctgattctacctttctcagcccattcagcgttaagcctatcttcgtttagtagaaacacaggacaaactggagctcaaattcgtttgagctaagagagctacctttactgaaggcgagattcctctgctggacaaggcaacagaaaaaacatatatctatctcttctcctgttcacaaagcatggtgagctacaatgcatatatgatttaggcctttgtaagagtgacagaatgacgcagtagatcacgacttataaagagactcaaaaaagatgctctggataactcttcaaggcgctacccgtctagtaagggcctgcgcatctgtaggtaggcaggttataagatcgagccttatagcccccatcagaccatcatcatcgtcgaaacatcgctactcaagccataacatatcctcatcaccaatccatctttcaacccaaacctggcaatatagccaagccaaaatgcctgagctctcactccctaacctcaaatgaacggctctgccactacctacaccgtagttgatcctaatcacagactgctggaatcgattctttcgccgaacacaatctagagtcagacgatgctaaatccagactacgtgatgtacaaggtcgttttccaatctcctgacctgttggtgagttacctagctgcgagagatcaaagcctgactactatatacaaccatgaaagaaaggaactactcaatcccctaaacttgctttctcaaacagtccatcctagtccatagagcccttaaggagagaagccagttcccaagtctaattagacaaacgataccttattcccacccgcgtcatcgcatcgatatgcgctattttcgcgttgcccgactgaccgaaatcatgaaacgcgtctctaggtattctccttaaaagggcccgttttccgaaaagggagaaaagcataattttcaatgcacggtttccagggaagctcgttggcgatccacggttcattcggtctgttcctggctatggtttcgaaccgtggtttggctaccactgactctgtgaaagagacacaggcctgaaactggaacgggaattccaagtttacactctgagggcagaaagtatagtagataagtggaccttagtacgctggtggatcagactgatctgcatcctacaaacaacaaggggcttatatctgaaactctaaagacaatggcaattctaccgtagggaaagacgtctgtttgctggaatatcaatacaatgtattactaggtaggatttctcctatttccaaaaagaaccaagtaaaaagaccgtcatgcctgcagagcccaaccacgacgggtcgaagagaaatgtacatgtcggagtgttttccattaccattccattcctgtcgtcacgcatcaaaaatagcgtccagcgggcttggacggctagcttagatggcaacggcgacggcgacggcagcaagagcaccgccgacgagggagaagcgctccttggaagcagcaccagtgaactcggggggagcaggggtgccggtgggagagctggtgggggtgctggactcagtgccggtggtagtggggatgacgggggtggaggaggtggaggtaggagcatcggtggcgctggaggtctcggagccggtggaggtggcagtagcagtaccggtagcagacgtagagctggagctgccaccgtcctcaacgtcagcgtagcgtcaacacccttctggatagcgttggtgatccggcagag

SEQ ID NO: 5570 - DNA, 6027 bp, Emericella nidulans
actttctgggagctcgaaatcacccgatgccagcaatggatgttcaagatccaggaacggccctaacagtatgagcccatctgcgtagccctctgcagctttgtggcatatttccttcaacggctcaaagtccagattgtcgtcggcggtgtagggcccgcaagcgatcattacattcaagggtgaagaccctccttccgataatcgctcattagtgctctcaatcgtaggtacagacgatacggctggcggcaacagcggtggtggaaggacctccttgaccgaaaaataatttcctgatgcattgattcccaacagtgcgacaatctggccaggaaagaagttcactgatggaatagagtcgacattcagaggaacccttcgcccagctccgctacgtctcgacgtctcgagcacaagagacgcaggattgagcttcccttccgggctatcagaggcaatacggccaacggcaacaatctcgtttgtgctctgaacagcggcacttccaaatgtgacatcctccttctcatacatcttctcgaatatagtcatgaactcatcaattcggtcatccagaatctcagatgcttctgaaaggcgcatagccatgggtttatatccgaactttttgagatctgtgttcgcagccgggcgaatgcgaggctccgacggcggcgccataggcgtttccggcatcgacaggtgctcgttgatagtttcaatcgtctgaccggggttctgacgttctgagaaaggaacagacctatacaagtcagacattatacatgcacaactagtactcgaagcgaaaacgcgcaaaacatactgtaacccctctccattaccattcgcaacattcgtcttcgaagcaagaggagaattcgtcttcttagctactgagggagacgagaactccgctttcctctttgctgatccagcaccaggtgttcgcgcaggcgtcaatccatccaacctggtccaagcaaggaattagtaaactctcctccctttagatcaggagagggcaatacatacatcccaaagacatctgccgctactgttccccctccaacaggcatatccctagcctttggcgtcgccgcagctccaccgcgtttctcaacctgctgtcgtcccctcgcctgtcgttccagattctcctgcacatcacgcttgaacagtctcacagtctcgagatcaagtttcgtttcctcagagcccatgcgcaaacagtacgactcccaacggtaaaacagttcttgcgccgtgatgctatgcacgcgcataatagattgcagctccattaagatgtcggcggggagcccggacggagcagagggcgcaaagagttcggtcaattcatctttcgttgcgtcagcagcggcgcctgggtcatcggagagtatagagcccatttctgcgaggtttgttgcttccaggcctatttcaagggcttgtgttggtagatgtctgatctcgatttgcactttcggtaattattggaggacgcggaacgcgtgcccagacgcgtgccatttccagcttacaatctccctaatcagattcagcgagtgtgcacgtgacttcttgttcagccagacaaggacgtcttttatcaaaacaggatgtacagaatactaataagctgacacatgcttgcaggttatcagttttcgaatcacggaccgttatgcttgttacccgggtattcgtctaaggtaggcgctacgtattgccaaacaacaatgtaccgacattttacttaacatccatgcattaacaggagcgaaatatatttcaaatgcggtacaggtctaggcaccatttctttctccatcttatcggccagaatacgattataattgcggctatacatccttttccacgtcatcaacactaggtaccttatccagcttgtttccatagaagtctgcaacaatcttcacacactccgttacaatcttcacatcctcaatggggaccccgagcctcctggtgccccgaatatgccaatgcgtctcattgggcagattctggctcataattcctggaagcaccaccatctgcgtatccacatcgtctaagacctggcgatcgctcaggaaaagcccataagtaatctccgtacttaaccaagagaagtctttgtgcgcagcaaacagatccagtgtagcattgccgttcctcgcgtacagcttattgaaccaagtaacaccacgctcatggtttgcttcgtcacaagcccagccctcgcgcgttgccgaagagtagtccttgtcttcttccttttcgacctttgatatggcgaggattgcttcgatgggcttgcagacgccgacaataatgactgacttcaggagggcttcccgcagacgccgcacgagctgctttctggcgtcggaggtactgtaggcgggttgcgaagtcaaatagagatatagttggtcagcgcgttcagggtctgggcctgcggcgagggtggtagtcgctaggatggcccatttgtcggcagggatggaggttgcctgtgcaaagcgggattcaacggcttggaagagctttaaatagctggggtcaatcgaggggatgtccattgtaggaaaacttcgtgatgagacgtgtctatgaaggcggatgttcttgagagatttgtggatggtgcagttgcgtacgtgtcgagtggaattcagctgccttctgaaggcgaacacagcgtattcgtaaggaactgtaagctgagcgatggctgctgggccattcgggcactgatatactccgtccttcgcctgcctcagtgaggggataaactatccgcgatacccggcgtagcctatcaatcggagttgctgtatgcaagctggggcgtcggggagtgggacatgaagctgaggtgggaagtcccatcacttccgagttcggcgcctgaatagtgcacctctgtcctcaacatcgaagacagtatagaaatagccaaagcagaaatagtcaattcccacatcagctggagcattaacgaacttgtagacattaggagtcggaaatttcgggccatggctcaaatgcttgtcgagtacattgaggaagtgaaatgtgcggggtaagtatagcttaagtatagcttcacaagtctatctgaacaggaaattaggaatcttaggaatcaccaccactctgaagccagtcaatgaccgaggatctccaacaacagctaaagatcctctgagctcctactccaaagccaggcatcgtccgcccagagtccgagctcaacgtacgcgacataacgtcatagaaccaagctgccctgagccctgacaccgatcagcaagaactccaggaaacattacagacatgacttttgtcgcatcaggtcatccacattctcaccagtgcaaaaaacaatagttgacaagtgttcttgctccccggccccacgtatgatctcagtgctttagactccgaatatggtatgatgacatcactcttcgaacctttatacctatatagacctgctctgcaagcgtattgtagcttttcatcaattacactcacactcatcgcccagccatataataatccgaatagccacatatagtctcacagccaaccaaactcttttccatttcaaatctatccacataccctaaaaatgtcctcctccagccagtcgaatgttggccgcggcgccttctacgaggccggcgaccagcgcaccgctcctcagtctgagatcaaccagcacgagagatatgaggccggcgagaaggccagccacaagaacattgactccagtatgtccacctattcgccctccaacgccggtgtggaaaaagtatgaagctaaccgaccactttcaccatgtagaggaccaacgtactatcgcaaacagactcgctgctcagagtaaagaggacgacccatcctcgcatcataacagagacattcagcccgaggctgagctcagcaagaaggacccattgaaaccggtaagttgcctgcgattgaagagtcaaatagcaaggcgagaatagaagctgatattgtcgatgtaggctaaacttcatggaaacgagccatctaagggcgctaagattgataagcagctgcaggaggatgatgagcagcggctacgcgagaagggaatcaaataataatttcttctgttatgccactgtacgatatgattgatgaaaatcgaattgcaatctcaattttgacccttttgaccattggcttctattatattctaggtcgtaatatacaagataaaaagattacgcgatatagtacagctgtgtcagcagtcgtcgctcgtaaatgcgtagaatcatcaagtttgcaaaccaatgttgctggaatcatcaaccccattgaaaatcatcgtcatgcggctctgcaaagacattgtcccagtattgtccgaccttgtggcatattttgcctttggaggtccaggtctggaactcaatgtctggagcgcagctgatgaatttgagttcttcccagtatgccttctcggcatcataaccaaatcgttggatgacatcctccgggacaatccatgcccgtccgtcggacccatcaggccggactgtcggtgcagtctcgaattctgttccccagacgtttcctcctggattaaacttggggtaattggcatggatgaaaaaaacccgtggggcctgagccacactaggatcgagcacccgaaggagcccctgactaaccagagcttggtcttcaattgggtctgactgggccatagcggagccggataggccgttcggcgccggatggccaaccgcctgtaccctctcgctcacagcatagaatggctcctgaactgcagatgcagcttgaaggaaagtttccttgtcgccttcgcccggtccaccttgggacaacaagcggaaataatgagacggcccgtagtaattgtaataagctgacagcaatagcgtccgcaagtgggactttttcgagataaggaaaacaccagcctcggtggtctggcgtgcattcatgggaatttccggctggtttgagatgcgatagtagacaggtgaaactgaggactgccaagagtcgggccaagtgctcatgcccattgtcttaaacatgtctgaatctgataacaggtccggatcatgaaaagggaagcagtcgtagtccatccaagcgacttcctcgaaagacgaaagaagtaccgcaaaaaccttgagctgaaaatgctctatgggatcttttccgaccacatctgaaagaagcagacaccgcgcgttcaacttcggaagcacatcctcgcaaatattctcttcgtactcgtctgcatccttcatatacacctccaccggtagcttcgaaccggtacgtcgtagcatccgcaaagtagctaagaaactccggagaatactggcctccagcagtcgacactatgcctcgggtaccaggagcatggaccggtttcagacgtttagtttcctcgatatcgtgtaagaaccgcgcatgtgcatcttgcatcgctgacacgctgctttcgtccatgaacgttagatcgggccggacttcagtcgtggtagcattgaagtgaatagagtcggcgttttgctcatgagcaggtggaggacagttcggagagttggcttctaggatcggcttaaagcccttccagaatacattttgacgttcagtgagaggtacttcaaatgcagtattcgggactaccacggaggcgggcgctggagtccaattgatcttgaagacaccaataaccaggaacagagctgcgactatggagaggaccgtcctcagcctgctgcggcggagcttgggcatgacttaggttcgcactggaaactgttgcatgatctggtctgcaaggtaggcgccgtaagtgcacgtttcgatatcgggtgtgaggacgttctggtcaggcctatttacgcgtctgctcagtcctgtagtctgtctggttccaaaaatcccgatcagccgcaggtctgcacaaagcaccaagctccttg

SEQ ID NO: 5571 - DNA, 7481 bp, Emericella nidulans
cactccagattcggcatctggagaatctgctacagaaagcacagggcatgtagaatgccgactctatcccaccgctggcgagacagagcatcttgacgccggcgactgctatatgtctaccagaaaatatgtctaagactaaactggtagtcatgagatgacgtccttcagcggtatattcttccgatactatacattagctgctccagattacgtagcctctaccgattggaatggttgttatagaaaaaaaaaaaaaaaaagaaagaaagaagcgaaagaaagggaaaagacaagaaatgattgtcgagagactacagtgcaagactgttgttgcaatggcctgcatattggccttattaaaggttctaggattgtaatcatagaactgcactgccattctccctgatcacaacggcactgggggactgctcccagctgtccagactgagtgagcaagggaggaaccccgtttgatctaggacatttgtgcacgtgactcgccagaggtcatgtccactgccaggcatcagcctcatcgttttcttttttcttcctttttcatttcagggttctttgaaatggtttgtacggggtattataggcaacaacaataagcgatggtgggtaaatacgagctgacgtcttgtctgcgggggatcgaaggtcattatcgaaggtcattgggcgctccggcagaggcgcaaagtagtctaacggtcaccaatttctcacatattctacggaggcgtgcaccaaaagtttttgcgcgacgctagtaatttaatgcgccgacgtaacaagcttacatacaaattactatagcaacatgttttttgacccacaactaactatatccgcataaaccccgaaatcaaaaacaagagaaatgaagctattcaggggcctctattggctgtagagcgaggtctacacgtggtgatagtcgccctttaatccgcctgcctgcccaactacgcgtatcgcgatcctcacggccctccttgtattcattacccccttctagctcgataacaatctgaatatgacaaattagatgctcaatccagtgttgtatagtctcctgtgggagatctgcccaagcctgcctccattctgcttctcctgtcttcttatcgcggggcgcaccgcgggatgttgtatgcttcttcatccaagcccagcacggctcaattgcgttgagatccagtaaattgccaggccagtcaaggatcttttgcatgtcttctgctttatagacatgctgctggattcagtgacagtgggcaggcgcgctatcctctaaaataatagtatttgggcgctcaatcatgcattcttttgcaaatagaataagaagaggtttaaggacttcctaggcagtagaataagtaattagcacgtacttaactactctataatagagaattatagagataagggaacaaactgtttgatatctccactaatcaatcccccctttacctttacgtataagcttaccgttcttctcgttccaattccatttaggaacacggccgcgatttgggcgtaaatgaacacgagaaagacctgtagccaactcccattcctcccggcatagaggttccagctcacgattcatggcttcaatctctatatctgcctgcttccgcatggcagcagtctccggcttgtagatatgtaaagggcccttcttatcatatgagaagcaaccccataccatgaagtcagagcaggccttccagcgcctccgtacacaattccttgtatgtgaatctttcacagtcctccacactcgtattgctccgcggcggtggccaagaataacaccagtctcgtcggtaaagatcacgcgtttccagtcttctaatgtccaatgttggtgggcaaggcagaattcaagacgcctaagacgagcagcttcagtcagaccaggcttccaggaaggttttgcaataacaaagccatgagaatgaaggatacgaagaacagaagaatgggagataccagcttcataagcaagaatttctgatgatttctcgcgccctgctcgatctgcagttactgaagtaataacagtattctgagtagcttcagtaatctcaacaggccggccagatcgctttctatcctcaacaaattcaagctgcacgcgcaggcttacttccggccggtagccacgatctctgcctttctttacgatgctctggaccgtacgaggagagagattcaaagattttgagatcttctctgtactaaatccgatagctgataaagtaagaacttggacacggagttctactggatgaaagccgccgcgaggcatcatgaagctggtgttgaggaaggagagcaactgtggcaggataagttgaattagtataaaaagcgtgctaagcgtgctaaaacaccaaattgatcagtcaaatagaatatatgagcagtgtgaatagcttcaagaggctgcaggcagctgaaacaatgaagaagcaatatatgtcaaaatattaatgtatgtatggtagtggggttgccatagaaattgttatgtagggcgtaacagtattacatggcgtgacactagcgtcgcgcaaaaacttttggtgcacgcctccgtacttaggtcatgaaaactggtgcctggggtcattgagacaacatctatcaggtattgactttcgaatctggagaagttggcaaatcaagccaaccaaggaactgctcaatgaggtacctgagacataggccaatcaggcacccctctaaaaacagagtcaatctcgcttgacgagttaagaagaaccggcccaccttgaattccgagccactagccgttccaggccatggtctaattacgccccgcctggcagtggacgactgaaggtttgacctcgtcaccttgaagtgttcgatcggcaggagtcagcaccgccgcagtcctgatactcaagctcaaacttgacacctttagtctctatacgaagagtagagaatatcccctttgaaacgagatagcagtatcctcagcagtccgactataaagcactataagtatgaatacgtcaacctcgtctcccctaataggggtatcgcccttgttctgatcccataatttttgacactccgtttgggtctgtggtgcaaacccacgtggttttgactttgaaccatcgccagccacctcaccgtccattctcagtcctgtagcccgtcagcctactccgcacaaatatggaactttttcccgacgaaggaaagaccacagaccgtattggtaaactgcagttatctttggggcactttggtcgttggcgtagccgggcccgcgaccggcgtccgtgactgacagttggcagtgcagcagtgctcctgctaaccctgcttgatcgtgagcgatctttcttcctctattggccgacttttcatgcaggacatatcagtgcgtttcaacgttatcatgcggtggcaatcccagcgctgcaactgcgattgcgaccagttttctggatctaattccatccaatgtaatcatcgctccatgtgggagggatgtcgcaggattcaccaccggccagtgccacgaccgacttcactggatttccataatccaaagcttggagttgagagtagagccaatcacgcgctattaggaacctaggaggctcagtgtgtccctccaggcaaatgatagcggagtcccttgcggcctgggcccatgattatcgagataggcgccctatccaatccctgtcaactgtaggcgccgcttttactgcaagcattcgagatgccgagactcacctgcagggaaccttagcaacttttctgactcgaatttgcgcgagcacagactgatattctgaatgcgattggctggatttgtcgtgacactgacacccagtcgtgacctggcaacgcagtgaccatcgcaaacggtacttagtgacgcaaagggccacatagttggatacgtaacgaaccagttgaagacgatggagacacgaaatcgaatcaacttcatcgggacatgttaagtgctaagaagcagcctttctcgctccctgcctcgctgacgccccgagattcagaccagccagaatgcacgcgatccgaatccgatgctccctgtaaggggctcgtttagtttgggatcagcaagagtttatttatcaatcccttttgcggtcatggcaagttcgctgtcaccaatgaccgctaacctatccctatccttgcgcaaaacagcagactccctttcgtgtaataattgcagatccagaccctgtcctacgcccttacattgagcgttcgcccgtcgtttgcatgcggagtacagtacagcagtacttactcctattctcaagtctccagcactggacgatattatgcaactccgcagcttcccgtgagtccgcaagtccgcgactttggttcggttctcacgggaatcaggttccagaagccgcaacgaaccggctcggaccccccttaaccgctacgaactgagttctcgccgcccgaagctcgagtttaccgttgagttttcgtctgcggttcctggaatgggcgcggtaccttagttggggttgtgtcctgatgtcatgagtagttcgtggctcggcgtcgccgatttgctgtactctggagagcaaggcgttccctttggacctgtccagagtaccttataggctcactgcggcgcagctcaatgcggccagcctctacatcccataagctggttcatctattgaatggtaatcgttgcatacgcatgcttccagtacttgcgggtgcgtatccggcgaagaccatatttactgcacactttagcctgaagtgaaggcgctgtctccccgtcctgctgccagtaaaccaaccttcaatcttacggataacggagtattaggattttgcaggacctaaagtccacgatgtctgataaggttacataggacacatgcttcggatgcaaaaacaattcccttttacatttttaatcgctttggattccgctctatgatgtacgacaggcggtgctggatatactggggtggttgggtcttgtctcaaaaggacaagggggataggggtgtggggtccggatacctacggatgtctgaatatatatttcaacatcagcttcgctataactatgcaatggtggaatatgactctatcccagcaggttctagaatagtacagcggatggaacgcaacgcaaggtgacaagagaagatgaaaaagtggcaagacgaacaatggcatacctcatccttgacaaaccttgtttatactgctcgtaaatactatgatcgtgccccgcaaaccaggacgccgctgaactcaggcattgggcaagcattaaggacaaatgacaatacgtactccggagtctgacggatgctcctatttaggtttcaatagcgccaggagatatagcaagtatcacagctagcgcagctataatcagagcaccagcaacaaaagcaatgagggcgatactcccccggctggcggggaacttgcctctgataatccagtactggctctcaaagtaacgatgaaaaccgacgagaagaataaggatggcgacgccgaggaatgtcgtgcctagcggcttgcctaggctgcgcagacgttgagaagtgtctgttacccttaccacaatggagccatcgaaatcaggcgacaggattgaagatacactctgcggtgtaagctctagcccgttggcgctttgggtcgtggtattacttagacgaaagagctgtgttacggcgatgccgatggatgcaaaggctagagatgttcgtagccaggcgaggaatgtccgttctgcaggggtgtcagttgatgtgctcatgccggagtattatattaggagaagccacctaacgcaagatgatcccgagcaacgcttcctttgttctccagctccaaactaccatacctgtccgcaagccgggagtaccaggacgcatgaggctctttggcatcctgccctaaattctctcgttgtcggtcttggtggtatgagctttggcgagtcgggaaattggctgagcccccatctgagctcctcacgacattctccgtggagttataccgtcgtcgctgctgcgaactactgtgactgactatcggggtaatctcgttgacgggctcggtttgttcgtggccctggctttggccctgaccttgtgcctgaggcatggtcgcctgatgcgaacgcgggaaattggaatgcgttggttcgtggggatctgaagatcgttgcgtggcagggtcagcacacacctcgccccgcgttgtaggttgagatcagagtggtccctgatggcgtgattgcgggattgcctaccgctgaggcgcaatgttatggctgggatggtgggctgtgggctgagcgcggaagaaatctcccaacgttggaagaagagtagtgatgctatgatctagttcttgcggattgcgctcactcttgtttcagactacacacagtcgcagaagtgaagagatccttgcatcttggagagaggtcgcgggcagaagaagagacctcccttagagtgctgactttcaattgagctggtcagcgacaggccccaaagttcgcctttctgagttcgtcacgcgctactgcactgataaagcttgtgaccaactgtttctggcttaggcgcttcaagatcccgaggccgatcatctttctgcccccccgttgacacctggcaaggcggtcacgacaattgtttatcatgtgactatgctacacaatgcactttgaagtcagttcgtaagagacatcctcagtatgacttctgatctcggcaaggacatatctctgcctaaattctgttcgtgacctcaaactatcaaagcagttatgtgtttgaatgtgtccagtagctcctgtcagtcagcatatacctcgtgcgtacaagctgcctgccgcgacgtatcagtctggatcaaacctttgatttatatattaagagaagtaaggatgggtattatggattaagtggtactatctacagcagctcttagtatgtgactgtagttctgcagcgtaacaacatcgtcgaatgaagacgaagcactcaatctactatgagcatccttgcctctccctcaaaagagatctgaacccgtgaagcagatcattcttcaaatcttcccaattctccaaccctacactgatcctcagtagcttccgatcaacccgggaatctgataaagcacgccactctatcaatgactcgacaccacccagacttgtcgcatgctgaaacagagctaacttgctcggcaaagcgcgggcaaaatcctcactccgcaatatgattgagaaaaccgggccgaagccattgggcatttgctcgcgtacgcaaggttcgtcttgcagactggcatggtgcatctccttgattacagtctgcacaaggtgctcgtcgctgtttgtagccgggctcgtg

SEQ ID NO: 5572 - DNA, 8184 bp, Emericella nidulans
ccgctctgcaggtccgagatctttgtcgcagggtagtggttcaaccgtagttcggagctgtttgttccgcagcggtcactgagaaacgaagcgtcctgatttagggagagcgcgatcgcggagagtagcgtcagatgcagggcttggcattgcgcgtagaaggactccatgaatggtcggaagccggggatgacggaatcgtctgggaagatgttgggatagagggggtcgttctcggggccaaggtcgaaggactcctggatcggttcacattccatttagcgtggcacgtcccgaagcctgacttaaggggcacggtactttgagatcgaacacggctttcccctgccggatgaccgagagcttctcctgtccgacacagctccagcctcggtgcgggtttgcttggacggggtgggcagcgagggtcttggattcgagggggagggcgaagaagtgtttgctctggtgcgtagatacgtatgttcagcatggtgtgaggcttatttggccggggatggcatacccagtcgaagacctggtctaggatctcatcggggatggtgtggttctttatcttgacgaagccaagagtcgagagagaggtgtagagattgctgcaaaaggtgtctttctgggattgcgtgccggaggtgaagtctttgaaattgagggtgggaatgtccattgtgatgcaggccctgagggtgttgagacaggtgaaggaatgatatcggctggatatcggcgtttatcaatcagctagcttcattctgcattgagctagaccaggccagaaccccggcagcttgggagccgaaacgttaaggtcccgttaggcccggaggagcgggacgggacactaaggcgagatgtcgtacgagtagaaagccgcctagagagagaccggggcttgaccgcaacttcttgactccaggttggtggttagtcacgtatcaggagtcgatccggttgaatacatgtcacttcaacccttctggcctgaagggagttgtgcaagtatgcatatttaaaccacctggaagactgaaagggtgaatcaagaggaaaactgaatcccaaaagactaagcatggaatggcatagacttatccgcgagcacagccatcatattgtccgtctagtgggccgaatgggtacattgatcaagtcattgcccgtcaacgcgtcatgatctacaacaaaaaaaggtatacagttagggcttagggagcaaaaaccccaggccatcggttgtcgtgccctacaaagtttacgcttcctattgtctctgaggagattcatgaagcaccctaatcaacgagaatgcgtttccccaatactatgagtatttttcaaacctatgggccatcgctacggcaaagccaccccgatactccgccagcggatcacatttccagcatcctatccactcttcctgaccttttaatatcattaatagagcagtaaatatgcggcgcgcaaagagcgcatttgtattgtactactgggctcacggggccgttggcgtgcccgatcgctcagagcgagacagcctctgcccgtcccccgggatgacgcttctgacgggcagatcgagctttctttatctctgatgtcactggggcatgtcgactcagacgtttttatggctctgatgggctgctgattaatgcggcaagatctataaggcatgaaatgtgaatggcacagggctatgttagcatacaaattttcaacaatcagttcgatctacatccttctctaattaagcaactctcagacttatagaactccatcatcaagatcgttaactgcagaaggggcttaacaagccagcgcgagcaatcatttcacggcgtgcaaagtccacctatggaaagcagagagaaaggggagaacggaccagggctgttgtaatgaggaagattatggcaatgaaaaaaataccttgagaagcctcgcattatccgcgtcctctactaaaaaggcccgacgcgctcccgattttaggaagtcctgaaagggggactccggatacggcagcatcatccggacaggtgttcgtatcattgctggatcggcgagacgggatacggggttaccattcatgacaatgctttgagaccttgcatagaagccgagggagtggaccccgacggtatgataggcatagccgggcttggtgaagattacgagagggattaggagaacgggccaagctggcagagaggagcaagtatttcgtgcaggattctgactagatttgaggttgaggaggcgcctaaatgctagcagggcatgaagacgaaactctattactataggcagccatctttcatggcaaaactagttcgcccttttatccttgatctgcctattaatagccaccagaagcacatagagcccttccaaacgcggcgtatcaatacccagctcgcgtccctttttcacgggcacgcccaaaattacctcgatctccatctccctgccggcctcgcggtccgcctgcatgctcgtccggagcgcacccagcctttgtgcacgctcaataagctgatcggcaagtccgtctttaacctcgacattacatcccttcgcaacggctataacttcattcatcaattgtcttgtatacggtactgcatccggggaagaggacagccaggatgatacatcctggtctgtgagcgcggtgatggcattccacgcgacgttccagatgaccttctcccaccgccggggctggatgtcggcgaaggtggtgaaatgtgttccaccagcgctgaggacggatgtgaatgtctgcagacgggactcttctagcgacgcatcgttcagcgagcggttggggaagaggccgagctccgtgtgttcggaatgggtgtggtaaacgactcctggagcaggctgagaggcgccgacccagaccttttttcagttagcactactctttatgcttccctttacgcttctggatataagactggccagtctggagagatgaaatgacgagacgcagaaaaggtagctaaatatccacaaaataggaatgaagaacatacaacccccgaaattattgtgacaccgggccacctctcacggaatggatcctcattgccgaccccgttctgcagaacgacaatcgtagttgttccgtcgacgacggggtcgagtggtattatggcgccgcgtggatcaaaggctttgtgcgtgcaaacgatgtagtcaaagtggctccccgcaacgtcggagggggcgcggattactgtcccaccgtctcataagcttgccgaacgtcttttaataaaaggaacgaagaaaggaaatgggacatttgagactagaagaaaggtcatggacgcataccccgatccggacggaatgtgttcttcccgtggttcttgctatcgatcgagattccctatgctcttgtgagtattatatgttctatgtgcctatacacacggccgaaatgtacattcttcagcacggcatcgtaattcgagcgcgcgaccaccgtcagacggacgcggtcgcacctgttgaggatgaaggcgtagaaggagccgatcctgttcgacagaaccagctggtcagcgggcggctcttgttgccttatgatcaatcaaagagccacgtacgctccaagcccgtagagaaggacatttactgagtctgaggttgagttggccattttgagggcgaagttggaggttggaagagaaatgaagtggggagagcgttgagtcagagaacagagtgcggggatcggcgatgctccgatactgtagtgctatagaccccaaaatcacgatggccgacagcaatgtcagacccagcaggatacagaccccgatcttggtggactgacgcatttgcagcttccagaagacggtgattggcacaagggcaaggatgatatcggtcatggtcgtgtacgcgctgacccagcaggagaagttgtagatgacggcctggtcccagcacgttgcgtgggtaattgtgtagtcccacagagcggcggtgggtttgcactgcaggaagaccaggaagatcgagaccatggggaagacgacttgcattatggacatgccgagcagaaggcgcgcgcggaccgggttcgggtccagcaggttattgaggagaatcgcgttggagatgttggggaaggagaagaaacctggcccacgttacccaaccgttagtatttggcctgtggatggttagtggttggcctagggatgagttcgccagaggaacaaataggacagaccaatattgaaagtgtatccgagaatctgccaccaccgctgccgtatgtcgaccgagtcccagcgtgaccgagtatgagacaaacgctgcagcgatgatgctcagcgtctgccaggctcagtaagacttgacctagaactaaaagaagcagaaatggctcaaaagtgctacggttgtaacccaccaaggaaaagaagatgaagaagccatgtgccgcgctgtgactttcaatcccaccatggcaatggcgatgcttgtaaagacccatccgacgagatgcacatctgtttggtggctctgggtgaagtcgacgtctgtgttggtagtggccataattgtaggtacggaccagaatgattatggacaagggtgcagggcccttcaacagcacctggggataatatgaagggtccaaccagcaggggaaaggctggtaaaacgagatatatagcagtagagctccagctgtcactgctgtcaagagtacattgggtcacctgtcagtagacggcccgtgaacgtcccctagaatagctctattcctgcccacagcagctgcatgagcagcaaacgccgaatagttgccagccgtgctagactgcaacggaggcacggtaattacccatgtcatttgctttttctcccccatctaggggtaataagcacataatgggttcgttctaggtgttacctgcaatccagtcatattctcactgacacatgaatgggtcagtctagtctaaagacgtaaagggcgttgacatggactttgcaaagcatttctggttcagacagaacaaccaccgcaaatacgaagtacgtactccgtaggagcaaaggagctaaattttggacctgtcggagtgatcctagagcccatcgcgtcctcatctccgtctccatcgcgggccgaccactaatggccattgaatgccaatagtcgggacggatctggacaccgggttggcgtcccgcagtgtttcgaggtggcgattcagaggtcagtcgcaatctcagagggtttgtttgcttgtctatagtcaattgggtccgtttcgtgtccgatgcggcggacgattccacacagacggacccaggatagtgctattagtctaggtggtccgatcagcgcacctgagcttatccaccttccaccggcactgtattagtagcatattgctaactgcgatggtatcaagactggtaaagtagggggtctacccctggtcagctgtaatcagccatcgttccaccagtacgccttctgagaaccaaaccctaacgagacagcttgcacaagctgctcaatgttacaaatccctcgcgaggtttggcctgaagtatcagagtcaaggggtttaggtccgtttacaatcccatgctctgtgcgagggcaatcctagactacaagtggacagtctatgcaacgtttcgcagctacagtttctcaaatcgacgccaagcttgggtaagagtatataggagcgcgagtccacatcatcgagtcagcagtcacgtattctgtttcaaaggtgctctcatccgctacacgagtgtgggtatattccacagccggagcttagctttcctcagcgtcattctggtcgaatgccgcacttatagtgaactcaattatgtggagatggagatagcaggtgtatggactcaaggctgctctgctgaaggcgaagaggtggatggcagttctagacgtctcgggtgctacttaagtacgtcaatgtaaagcgtcattattatttgcggacatcttgaagcagtagtaatggccttcgtcataaccatcttatatgtcggttcggttcagatacgcatggaattggatcggtgtctaagcaaagctagcagagctgccacactgtcggctagcggtagtagtccgcctgtacaggtcctggttagataggcacaaaatagtgcccttaggcgctctgcagagtgatatgagaagctcatatggataatgcatctaccagagccttggggctgtggcaaacattggtcgaagctcactacatttactggctgtgcaatcttatagtacatggatttggaagaagatggacaagtatggcttcagttgacttaagagaaagaagaaagaaagaacgtacccacgcaatcagccagtaatgcgtgtctgagtagtcgattctcaatccatgactgccagaaaatatgggagcaaacctcgctgcgcgaaggaaactgtcattaggacccaggtttaccttgcaacaggatataacgggacggatattggagaggtggtcgttgtcatcatatacagtaatatccgcgtatacttcagctatctaacatggattctcacatatggtaggcattagtgcgagcgtttcgccttgcaccgtccatgcttacggccacgaccatgaccatggccccgccccggtcgaccagcaccagatgtagccgcagcttcggccgcagtagtagcttcagcatcttccgtggtagcagtagcagtagcagtagcatcggcagcaacagccgtctctgcagcaggggtcgaagtaaacgccgcgccctggctagtgttcatctcagtctccgcttcatcgattccacttccacttccctcagaatcggcactgctaacgcctccactgaagaccttcatactcccaccgacaccctccagctccggcgtgagcaccttccccttattcggggggccgttccagttcccggcgctgcactgcgtatcaatctccgtgcacttgtcctgccagatctggcagttcttgttacctgttggcagatatgtgccccagcattcgtcggcctgggtccagcattcctgcgaggactgcgcatatacgatcagtattatactaaaatggaggaaagggaggaagacgaactgcccagcatccagctgtatgagaataagaagaaacctcatatccgcaccaatcgtcgcgaacaaggatacatccctcaggctgcagccatctttctgagtcgcctgtgtaccgctgaccttcgcgttctctgtcgaggcgctcgcgttcggctgatagacactgggcccgaagctcggatagggcagctccagcggttccgtatagatattgtacgtcaggccgggaacatccaaactgtaggtcgaagcatcgatcaccactccctcgggcacatccccgctctcagagccttccaggaacacctgcgcgcagcaacataaaactgcggatccggcgggctatcttgcgccgcatggagggctagcagttccgttcgaacaagataatctccgccccgaagaccctcgggaatctggacagacaggaacccgttattggcgatgagcttttccgtgcaccattggcttgtgctggagtcatagtctagctcgtagatcttgaaccacccgtcgccggcggcgttgttgtcacttgtggcattcgcgacaggcttcatgtacaccgcacaggggcctttgtgggatccgtcgatggagcctggctggctgccatcggggtaggcgcggaattcgaaggtgagtgttgaggactgggagacggcgcaggtacgcgcggcggcaatctcgccgtcataacctgcatgaatccatacaatcagcacaagcaatattcctaaggttggtggtatcaagaatggaacggggcaagtgcgcaccacacgccatcgcatcgttcgcaagcggactaatcggaaacgtcgccttttcagcgttgcggttcatgcggatgcatacgccatcgccttggttctcgccgtcgacgtagagggtggtcatgagggtgtggccggccacaagggggagaaaccccaatacaagactgaagatgcgcatgtctgaagagcgagtcctatcaaaggggtggtttttcccatcactctcga

SEQ ID NO: 5573 - DNA, 4449 bp, Emericella nidulans
acgtcatgcacctccaaccctacatggtggccgaggccatggggaaagaagatggaggatgctccggatcgacggatttcttctacagttccagccttgaggactccgagttcttgcagtcctttgatggcgatgatatgagcaagctcgtgcaggtctcgaaatcttagcccaggctttacacgtctgatgcattcctcctgcatttcttcgacgatggcgtagatgtctttcgcgtgcgagctgggccagtctttccctaggggaattgtgcgagtgacgtcactcgcgtagcagttccattccgcgcccgcatccagacagacaagttgtctcccgttaagaggctcgtcgttcttcacatagtgtagcaccgctgcgttgggcccagatccagcaatgatttcatatgactggttcttcgcaccgtgcgacacgcatgtgtctaggaagagtccctcaatttcactttcgtttgacatgcggtgtatgttttgtaggatgtttcggtgtgcaagggcagagatctcgttggctttgcgaatcatccggatctcgtattcatctttcacctcccgcgctgcatccattgcaggtaacagcgacttttcgtccaagcgaagctccttcgccgaaatctcgggtttctgggagctatggaggacgtaaatcgggctgtctttgttatattggtccacccatgaattgaggtcgctccgtagagcagcataatagcggaagcggtctgcatcgtaccgttgccgtgcttcctagacagtgagtgtcggtcccatccatatcgcgtgttgcaggctgaaattcggaacgtagatagtcaaaaggtcgttgcgaatgtcgtatgtcaggtagcaatctgcctcgtctacaccgctcagatagtagaagtagcgtctctgccggaaagggcgtggttggtctgagtctccccagtttatcgtagctttgccaacgagatagataagaccgtcgcggacccctagctttgaagcaaccttgcgggcatgttgtttcgctgtaataattactaacttagcggtgtccagggatttgaaggacaggtaagtgggatagaagggtgtagggtcaggcagtaaggtttcggcacgtacctggatacttgtcgcactcggaggccgcatttgtcaaacggatctctcaagcatcgtagggcaagatgtcaagttttgcctgatccgatactcgcattctcaaatatatgcaaacgctagtggcctcgaagaactgataaaatgcgacacgatggcaatacgccgtagagcctgaggaagcagtggttgacaacagattacgatggggcgcgaggatgacgttcccgtacggatcactgaacggccgtctagagctagtatggcgtacgtagggttgaccgccaaacctactgggatgaagggccgcaaagggccacacagagcttcatggaacgagacacaaggacgctagctgaaaataacaacgtccctagctatgtcgctatatattaacaaaaagcaagagttaaccacaagccagggcgaaacgtacgttcatgattggcatactcagcgcttgagatccatttttatcgcccccgccaagttccggccactgactagtacttccgtctatccgtttttcacttccagacttaccagccctagttcgatccgtatttctgcttattcttattcaaactccccagtcatccgtttcatccagcttatcttgcgtcatctagtcttgcgttcccagtctttcgaattcctgtatcaccacttcaatcccctcaaggccttattgacgaaggctgctcttcttattcaatgaacgatgcggggatctgaggcatcggcgcccggtgctttctgggatgctccctcaaccctcgcgacttccatcaggacgaacccgcccactctcgaaacggacatcaatacaccgcgtctactcgactcgcaacatgtcgcttcgaaattcgcacgtgggatgccaaccgcatcctgggatcagggcaatggcggttcgataagtgtcagtggcaactcgacggggaagggtatcttgatcggtgttctatccgcctttggctcagcggcggttgcggtgcttgtgctcgcggctttcttcttcttcaagtataccgagcgtggtcggatccttctagatcgtatgggccgccctggtgaattcgacgatgagcaagcgtttctgcgagaggaggctgaggccctcgaagtcatggatgacatgtcgagatcagagtatttaagatcaaagggtgagtctactatgatcctttgggatttcgtgattcgtggcatcagcagctaatcgtaaatacagcgtttgttgaagccaacccgcccgagtcggtgcagactgatatctcgttatcccagtttcttgcaattcaggagaaaggcgtgtcggcatgggagttccagccggaactcgagattgccaactcgtatctgtggaacgcccagaacagagatcgagttttatgattcaatctgtagcgtccaaacaaacctaccggttcctaaacagaacgacgtatattattgggaggctaagatctttgataaacccgaaaccactcttattagtattggcatgtctacgaaaccatatcctcttttcagggtgcctggtatgtttttgtcacttgatctgttatgtacggagttgctaatgtttataggctatcataaatcatcagttgcatatgagtcgaccggtcatcggaggtataaccaaccgtttacctcgctcccatatgggccccaactcacccaaggcgatgtcgtgggtgtgggttaccggccccgctctggtacgatattcttcacccgcaacggcaagaaactggaggatgtagtgcatggtcagaagtcacaaaatttcttccccactgtcggggctaatggtccatgcacggtacatgtgaactttggacagctgggatttgtgtttattgaagccaatgtcaagaaatggggtcttgcgccaatgaccggtagcctggcaccccctccgccatatggaagcgagcagggtagcattcttcttgagtctggccgagaaagtgccgctcatgtggcgcatcgggtttaccaggaccccagcaatgcgcagacaaactcgacggttcggataccgccgtcggtcagtcctgggcctattcgatcaccgaccgatatctccctcgcgccgctcgcacacattccgtcacatgacgatgccggggaagggtcaagtcgaacaggtcccagcaaccctgagcaggtgcctctactgaaccctgatgagttagagcaggtcccgcccccagaatacaccagccctgatgggagtccaagagccagccaggacttctctcgtgagggtcaaccgcccatccccagctacgacgctgccgttggcaatccagctgacaatacttcgcacacacattaatccaactgcacgggcgttcgtcggttcctttaaatgtttgaattttcagcgggtcggcattggcgttttcatggagcgggattctgctggcggactttgtgtgtttattcagctgaaaggccgtcacctctacatgtacaaggactggttttttttttttctcgcgttgttgtcgctcatcgctccttggtgtctgggggaagattgaaatgactaatgtatcttatgaactcacttgggcccatgatggtttacggcgtttttttttcttttgtgtttagggccatgcagctttctatacctaaggcataacgtcatgatatcccagtcgttaccgttgtgatgaaatgcatgattcgggccgatgagacctggtaatacgtagcttgaaacgggcttaggccctttggcgccggaagtaaacgtccatcgaccgtatcggctttgttccaaccaatcaaagcggcaattgggcatagtttctcggagggcccccccggttgctgaggaacataatagctcgcaagtcatacaccgtctatctagtacgtacgcttcctgccgatccccctcctcttttctccatctctcccagctctctttctctggaaacgccagagacgactcgaaggcacgagtacaccgatagacacaatatgcgtctttctctctcgcggctttcgccgagagacctcaagccatacgcagccgaattcctcgggaccgggttgataattgtcatcggtgacggtgtggtcgcccaggctttgctttccgactaccagtatggcacctggctttctattaacctggcctgggcggcggcagtctgcttgtccggctatctagccactcccagtccggcctgcaatccagctatttctatcatcatggccttgaaaacaaccgcagcctgaccagtggaagaaaattccaggcaagttgcttgctcagttcttgaagacttcgtgg

SEQ ID NO: 5574 - DNA, 6756 bp, Emericella nidulans
caagcgcgtttcagattcttctcgccgccatacttctcgagaagtgccttccgatgcgcatcgcgtttggcctcactttcagccaactccttttttcgcgtaatctcacccgaagtcggatttgcctgcaaatgtattttttgtgtcccacgttcttgcgcctcccaagcataccgttgtgccctctcaaactctgctgcatctccggacgagcgaacaaaattctcttcagccacaagtgcggcagcctgatcctccgctgcgcccatgtccaccatgcgtcgcgttttcggatcgtacttggctgagtccagatcaaggtttaatagatatttcgcggtgtcttctcgaattcgtaagttgcgcgtggctgtactctgttgtcgtcccatgtcggactcctccgcgtaccgagcctcctgttcaggggcctcgtcgtctaaaccatcatttgtagtctgcgtctccccttttgtgagtttcgcctgtcgtttcagcctttctaattcctcatattcctcgaccacctgtcgatactctgcggcgtcgtagccgttccatcggtctcttttagcatcccatcccagatcgacattctgtataacttcatctgcttgaatatctttgccagtccacttcgcgccatgttttctgggacgacttaggcactcttttgccttgtgtgtcatcgcaccgcaattctcacaagcgcctttgcgatacttggtggccgccggaccagcacgctttcctcgttcataccatttcgattgatcggtcgtctgtttatgcagacgctggtgttctaggtaatcgttcgcagtatcatcgtcgtcaatatagaatggcttcttcgagatgaaagctggaatatactcgttgcgctcttttgaggcgacgtccgcaggttttcgcgacatgatgaccgtagatccagagtgaataagcagcgcttgacggagtacaaaatgaaataggtataaaataggccgaaattcagatcaccaacaatgcccagcactgttgtgtaaatgattgtaaagctgatttccggctgcggtctctgcgttgaaggcccagactttcaatcacgtgcctaggcgttcttcccgcgccctccgacgcgtcttttgaccatgtagtttgccatctacctagaaacccgtgctggagtcgtcgcttccgtgtttgatcaatttggggaggatggtattgacatacgcatggcatatgactttatcccttctgtggtgacagctctcgctgtcacaaatcagaaaagcccatggagcccttccaagtacgcctgaactgcgtggatcattatcaggcaaatccatcagaattcgatcctcctctaccttaccgtgacggtaataatgagaaaggctacatgcctaaggttcccgtcattaggatattcggtactacagaaactggccaaaagatatgtgtccatgtccatggcgcctttccttatctctacgttcagtatgacggggatctgagccccgattcaggttcgtcatagcttgttcctttgtttttctttcttcaactaatgtctttgctagtgcgctctgcagcaaggagtctacacctgtccatagaccatgcgcttgcagtcagctatcgccgcaatgcacacgacaagaagacagtttttgttgcgcatatcaccttagtaaagggtgtccctttctacggctatcatgtcggataccgattttttttcaagatatacttactgaatcccatatatattacaaggttagcggatctgctgcttcaaggagctgttatgaaacgccctattcaaccatacgagagccacctacagtatgtcccacaatggatgtgcgattacaatctgtttggctgcgcgttcatgaagtgtggcaaggccaaattccgttctcctataccggagtatttggatctccctgatctgtcccatcgctggcatgaccgatcaattccacctggctggatcttagatgagagtgtcctacccaaacagagccattgtcctctggaagccgacgtttgcgttcaagatattctaaacaggctagaaattagcgagcgttcaattcaccatgactttagggagtttttaaatcccctgacatcgaatgaaaagcttgttccaagtatggcgggattatgggaggatgaaaagcgccggcgaaagaaaaaacttgggcttgatgatccggatagcagcccattcagcactgaagatctcgtttcattctcatctgatccacggaaggcttcgcagggtgattggattcataaagatgaacttcagctattggtgcgtcagatcactgcagaggagagggagcgagataacaatcgggatatgacgctggatgcgcatttacaagagaatccttatgcgaaggatgtcaagactgctttacaaagcattgaagatttcttcactgacgctgatggtttgactaacttacaacttccttataattccgggattgattattcagaagagcaagccgttgattatgtcgacgaagatgctgttcgagccaccgaatcgaattcgggtctttactcctccgatgaggatggcatgattgacatattttctgatgatgattatgacaatagtgagaacgagatggcgcaagttgacttggagaatgatttacaacaggatgaaagatccaatgctatctccaagacccatgggcctcgggtttccgccccgtcagttgatggtcttgctgggaacagttccggactagaaggacctcgaagtgatgctctcgaggccaggaatgcaataagtttcaaagctcccactcaacaaaatgtgcaatcaggtcgatcgtcagtcactagatcaaagtacgaggagaatttggataaatcttctcagagccaggagagttctagcctcgttcagttttggacggcgaatgcggacagcagtaacaagaagatccgcatgccgagtcgtgccacggaaccatcctcttcagacggacagagcatttcttcccagaaaacgatccgcctcaaagcccttagccaatatggcacactaaacttcccagttgtgaaagatcctaacgaccccatgacaattctacgttttagccaggaagcgtcgggttcaaaagaattgatggacgtggtagcgaaggaggccagcagttctgggaaaagttctagcactcttcagccgcgttcgtccgacgagaaggagcttagtagttcgtcagataacatcgcaactgactttgcaggacttatatctgatgcttttaacataccaccaagcacccgcttgtgctgctttcggcgggcctgtccaagccccaaggaggtttcctctacaataaacgcctacggcctttcagatatcatctatcaaaatgcacactacagtatagatgctgacgttccggatcgccctcgtgactacgcaggaaaggagtttcagctgggcggtatcggcatacgctacctccccgattttgatccttctggtcgtttacctgcaatgctagcggaggagaatataggccaaaaagagaaacgtgactggcaagaactggaccatcaattgcgggttgggtccacggccagattctgggagtttactcctgtccctccgagccgctcagaggtcatcacatggtataacggcgaacagcagaaatctttggcagcaacaacgaaaacagaagagcaatacgaggagaaagagtatcgaggaaaggtactttctcagattgagggtcctacacaaaagaatgaacatggcttcaaatactcacaacataaaaagtccacaagtgtcgagcatcagactcagtatatgagcactatgagcttggaggttcatgtgaatacccgcggtgtgctattgccaaatccagaggaagatgaaatagccgcgttcttttggtgtgttaactccgaagatgaacctcaggaggaagatgattctttatcagttgtcaatatgggggtcgtattccaaggagaagaagagtacccggagtcgaaaatctcaaaggcgctgaggtttgagtgcgagcatgaatcgacagaattagacctgatcaaccgtctagtcgatatcgttcgactccacgaccctgatattataaccggatacgaagtgcataatagttcttggggcttcatcatcgagagagccaggaagaagtacgacttcgatctatgtgacgagttatcgcgagtgaaatcgcacgctcatggacgatttggcaaagaagctgataaatggggcttcgaccacacatcatccattcgaattactgggcggcacataatcaacatatggcgcgccatgagaagtgagatgaatttgctccagtataccatggaaaacgttgtcttccatctcctgcaccggcgaataccacattattcgttccgcgacctcacggcatggtaccaaagtgataaaccgcgagacttcatgaaagtcattaactactatacgtcacgcgtccaaatgaacatcgagattctaaatgcgaacgaattaataccaaggaccagtgaacaggcaaggctgcttggcattgatttttactctgtgttctctcgaggctctcagtttaaggttgagtctctgatgtttcgaattgcaaagccggagaactttatactcgtttcgccaagcagaaagcaggttggtcaacagaatgccctggagtgccttcccttggttatggaaccccagagtgatttctacaccagtcctcttattgtgctggatttccaatctttataccctagcatcatgatcgcctacaactattgttattctacctttcttgggagagtccagtcatggaggggacgcaataaaatgggtttcttggactataaccggccgcctagcatgcttgagctactcaaagatcatatcaacattgcgcctaacggcatgatctacgcacgatccgaagtgcgaaagtcgctccttgcgaaaatgcttacggagatattggagacccgcgtaatggtaaagactggaatgaaagttgacaaagatgaccgagcattgcagcgcttgctcaacaaccgacagcttgcactgaaactaatcgcgaatgtgacttacggatatacctcggcctctttttctgggagaatgccttgctctgaaatcgccgacagcatcgttcaatcgggccgggaaactttggaaaaagcgatcgccttcattcattcggttgagcgatggggtgctgaagtggtttacggagacacggacagtttgttcgtctatctcaaaggacggactcgagaccaggcctttgacattggcgaggaaatcgctcaagctgttaccaacatgaacccccatccggtaaagctcaaattcgaaaaagtatatcacccatgtgtgctgctcgcaaagaaacgatacgtcggttttaagtacgaacacagaaaccagaaggaacccgaattcgacgcgaagggcattgaaacagtccgtcgcgatggtacccctgctgagcagaagattgaagagaaagccctcaagctgctcttcagaacagcagatctgagccaagtgaagagctattttcagagccaatgcacgaagatcatgcaaggacgggtgtccgttcaagacttctgctttgctcgagcagtaaagctcggaacatacagcgagaacggaacgctccccgccggagctctcattagcacaaagaagatgctagaggaccctcgcgcagaaccccagtatggagagcgcgtcccttatgtcgttgtcacaggtgcgccagggtcacgattgatcgaccgctgtgtaccccccgaaacccttctccaggatgcgcaacttgaccttgacgccgagtactatatcactaaaaacatcattcctcctctagagcgtatcttcaacctagtcggagctaatgtgcgtcagtggtatgacgagatgccgaaagttcatcgcattcgccgtgtagaagggacatcttctctggctggtggaaaaagcagcatccggaccctcgaatcatacatgaaagcttcatcctgcgtcgtatgtaaggcaaagctctatgatgccgaaatccctgtctgctcggattgcgtacggcagccccatgtctccttgcttgagcttgtctcccgccagcgtcatgccgagcagagagttgctactctcgagcgtatctgccggtcctgcatggatgtaccgtttggtgatgaagtgaaatgcgacagccttgactgcccagttttctatgcaagaacgagaggtcttgcccattggagacatacaaattccgtgctcggccctgttattaaacttttacaggacaattgcagcgatagcctggaatggtagtctggctaactgagagggcaagaagctggttaagctccctctccctctttctttctttctttttttttttttacaagctcacaatgttctcttagatgacaatggttttctattctggttattctccctggcaaatctattggctggtattttgattctgctaggttggtctgagtcctttggatacccgcatataataaacgaatgaatgaagctcatgagttccttgcgaaaacccatatccctactaaatttgagtagcatacagggtgatctaggaaagaaatagcatggatacattgaatgtgaagagttgtttgctcgggaaatgaaatctaaaaaccagccagctcgttcagttacgaagaggc

SEQ ID NO: 5575 - DNA, 4122 bp, Emericella nidulans
actgtgcataacaagttcatgattgcagcccgagaaaagtctcaagacatttgatcctattgctgtacggtttgcacgctgctttgggtcaatctcagcaccggaaacctgggggtcattttggtttcctgcctctggacctgtcaactcacctacggctacgattgacataatgctgcgggtgaggctcagatattaacatattccaagtcaatgcatcctcatcatgtcatgagacataccatcttcaggcaccacgtagtcagccatgcactccagcacgcctacagcgtattcgcacccctaaaccgacaacacgcctcaccacagagacagctcttctccagctcccgccagtatccctccgaatagtccaccgtaatctcagcgccggcgggtacacccctactgacaacaatgatcctctccttcccccgccagtagaaccgctgaaactgactatttggacggcacgagtggttgatgaatcgcgtgaaattgcccatccccccttggaagatctgatacggccgtgccttcgaacccccaatcatcacgtctaccccggtgatcccagatgtgatgaacccggtgaattcgccgatgcggtgccgcggtcgaaagactttcccagatcagttagcactcgatgccatggtacagccgggcataacacttaggcaaggagcaatgacgccgttattcttcccgctcgtcgtgcggaaaatctgtaccggtactggcgcgcgaataccaccgaatagggctggaaaacacatgccctggttctccttaatctcgtctgactgtttctcgtggcatatcggacaggtatcctcgtcaagctcgggaactttgcggggatccatgtccccaaaaacgtccttattaagcacgcactcgtcgatgaacttgtactgtagcccagtcggcaagttcagatgcctatatgtatcccgtaaggggagagctgggccatctggcattataacccactcatgcggatgcccgcggtaagcaggtagcgtctcctgctggatcaccttcaacagatccctccatccgggatgcagtgtgtcggccgcaacctccagactggaccgtatatgccgtagccgagaaaacagtccctctccgaactcattgcggtacttacagaacctgtatacccctgcgcttgcaaatacaagcgctgcccatccgccgtagtccttgatttctttgtaaccgcgccaaatagccctgcaaacacctgtcaggacctcaacaaaaaaaagcctatcgagagttgttggagtgagtcaagacgtacatcctgttccgtaggtccttttctttccagttgagcacaacacatgcttcccggatggcgatcatgcgcgcctcggtcctggacaagattggcttttcatattggagaacggcggtgcgtgcttcaaacgattcaacccagaacgcctgcacgatcatctcaagtgcacgcgaggattggctgcgggtatagtagtggagacagaggctgttgacggattgaaagacctgcgcagcgtgggagatatactttactaaaaagttattatcgagaaaaaagtctgggaccaaatgctgaccttcagacttgcgccggaccgaatgttgattgtgggtgtgatactctatttgcgtcagtagacggatccctggaggaagatagttgacataccgaaaattcccggcttaactgcacagacgaatagatctgcctccatatccccgcgatcagcttatcggaggatgtgggctctaagaccggtggttcgagcccttggtcccgttttgcgcgctggggaaaccgggtgtcgctgtggacctggcgactggattttggagccgcgtcttgtgaatcgtcatttgacgtttccccattaggaatgataccaagctttgtattacctgtagaagagtgactaggaagccgcagtccgctcacggtcttgtgccgtttggacggcccgaggccatgttcttcgggggcgaaatgagaggtatagtccgagcgggtggtgtctgcttcctcgtcctgcgagcatcagttgttatttaccccttgaactgcacataaggatgcgctggtcctacccttgggtcaggagtatgtgcgggtgtaagcgcctgtaaaggcacgagtgttccagtgcggagattgatgcatccctaggtagaaggtcagttgggctcggctgaacgcgggttacaacataccaacgggagagacccggaatgagagtctgatggggcattcgtagtgatcgacgcgtctatcctcaagaatatgtcctgttcgttaccactactattgccctggatagccgaggcaagctgtgcaggcaggaccgggttatgcaagaggtcgcacagctgtgagactagcgggggtaagctcgaggccatggtgcaaggccagagctgtgctctatgcggcaagcactttgcctgggaatattgtgactctggttatagatatgcggaatcttgaaactgaggaggatggagcaatgggaaaagactccacattcaagccaagacgaagatctgcccgggcagccgagctgactcagctaatactcagacagggctagcaatatcaaactggcaaccagcgaagaaagacatgatgagagaaatgaaagatacaaggatccatgatacttgcttttcaagtattagccttacatataccagacgccttttggctaacaagaacaatatgaagatataaagccttttaaaggaataaggctcgccaccaaactggtcgcctccatggaaaccccatacgtttatcccaatgagaagctgtgatcccaacgatccacttatagctagctcctcagcccaagaatatgccggatgttatatggttggtcctgtccactatttaatcccgcccactcggcctccctcatcgccatgcttcctacagatcaggtacattagacccttcacctggaccatgttcgattcttccccaatggagagtggtggtcctcctgtacagtcctccccggtatttcgtgagaaattcaccacctcctacgcttgtccctcctcacgatggcgtggattccaggctcttcacccaggaagaggcatgtaccatgatgtccgccgccggttaccatattactggagcgatatcaccgacgcttttacctaccggaccgttgctagtaccgtccgcatgtactttgtcaagtagtttccctccccatctccttgtcctcctacagtgcgtccactaaaaccatccagcctgcttcctgcaatagcctacactttagacatgtcccgccgcacaggaaacttctatgggataaacgagtccctcttttcgtcagcactggcggcaatggtgttcagcgtcttggccgcacagccattaactatcgttggagtaacggggctgatctcgctcttcaactacacaatctacgatattataacgcggtacgacccagccatatacgcaaacttcatgtgctggacggccatttgggccgcaatcttccattggattgtggccgtctgcaactattgcgattatatgcgctatgtgactgacttttcgagcgaaagttttgcaatgtatgtcgggattatttattgcggtacgttctctgactcgttttcgctgttcctacctgcattaaacggcagcgaggagtggtgctgataaatatcgctgcagtcaagggcgtagaggagcttagcaacgagttcgcattgtacggtccaacagctggattcctcagctccctcattgcagtcctgtacttctttaccgtctacggtcttgaacgggtcggctccagcacagtctgcaagccctggattcggaaattactcgctgactatgcctatgtggtacgtctctacctcttcacccacaccatacatgcccgtactctccagttaacccacctgcagataggaactctcttctggaccggcttcgtgcattttcccgggcccctcagagaagccggaatctacatggaacactatcacgaaggcattttacccgacacaaccacgaggttggtggatccatcttctgagaggatgtacgtcgcattttttttc

SEQ ID NO: 5576 - DNA, 5699 bp, Emericella nidulans
accgcatgccaccaagcgcgctctctgcaacgctgattaacatcactgatcacccaacgcacccttatatctcgtggaagctgtacataacggacgcgacgatgcggtactatctcatccccgctggccaccagagcgggcagatcgccatgttcgtcctcttctggatcatccctctcctgtccggctccgcttgcgtctatatcttcatgaagtccttctacaaggtcaaattcaacgaaatcggcgctgccggcgcaagcacggaaatgaagtcacttgtcccgcttgctctccgtcgacgcatgaagcagctcgcctctgggaatggcaagaacggtccgtcattcaacccgctcatgcgccttgctgaaaagtccggctttatgcagagcacgactgcgttggccggtgcggcctcgggcaagagacgcatggtcctgatcgcgaccatggaatacgatattgaagactgggggatcaagatcaagatcggtggtctgggagtgatggcccagctgatgggtaagacactcggccaccaggaccttatctgggtggtgccttgtgtcgggggcgtggactatcctgttgatacccctgcggaacccatgacggtcactatcctgggtcaggcataccaggtgaacgtgcagtaccacgttctgaagaacatcacgtacgtcttgcttgacgcgcccgtcttccgccagcagaccaagtcggagccgtacccagcgcgcatggatgacttggactctgcagtgtattactccgcatggaatcagtgtatcgcagaggcgatcaaacggttccctgttgatttgtaccatattaacgattaccacggctctgtcgcgccgctgtacctcctgccaggtaccatccccgcctgtctgtcacttcacaatgccgagtttcagggtctatggccgatgcgaacacagaaggagaaagaggaggtctgttccgtgttcaacctggatgttgaggttgtccgcaactacgtccagtttggtgaggtgttcaacctcctccacgcaggagcgagctatctccgcgttcaccaacagggctttggtgccgtcggtgtctcgaagaagtacggcaagcgttcatatgctcggtacccgatcttctggggcctgcgcaagatcggaaacctgccgaaccccgatccgtctgatgtgggcgagtggacgaaggaggacagcctgatcaaggacgaggatatcaaggtggatccagagtttgaagcaggccgcgctgagctcaagagacaggcgcaggagtgggctgggctggaccagaaccctgatgctgacctcctggttttcgtcggtcgttggtccatgcagaagggtgttgaccttatcgcagacgttatgcccgcagtccttgaagcacgaccaaacgtacagctcatctgtgttggacctgttatcgatctctatggccgctttgcggcgctcaagctcgaccgcatgatgaaggtgtatcccggccgcgtcttctcacgccctgaattcactgccctgccgccgtatatcttctccggcgcggaattcgcgcttattccctcccgtgacgaaccctttggtcttgtcgccgtcgagtttggccgcaaaggtgcgctcggcattggagcccgtgttggtggactgggacagatgcctggatggtggtacaatgtcgaatcggtctcgacatcccatctcctcatgcagttcaagctcgctattgaggctgccctttcgtcaaagactgagacacgtgctatgatgcgtgctcgctctgctaaacaacgcttccccgttgcgcagtgggtggaagatctggagatcctacagtcgactgctatccaggttcatgagaaggaggtttcccgtggtcatgcaggtggccgccccatgacaccgatgacgccctctggagctacgacgcccagcggaatgatgacgcctactacaggatcccgtggtcttaagcctctgtcccagggcgtcggcatgggcctctcggtgccacactcccgggagagcagctattcgaacctcaaccgattgagcgagtacgttgcgcaaaagactccgggcgagtctcaaccgcgagaatcgtccggtctgcagcgctcgctctcgctcggtgtccggtccggtcctggccaccgtggtcgtgcgcgcaagcagaaacccggcgcggacaacatcccggagggcaacgaggacggcagcagcagtgatactgagtctatccctgactactacgacgacgagtacaccctcaccccagctcagattgaagaaagcagacgggctcaggccacccgttcaatatcctccagagccagtgcgcatggtgcaccacgatagacccagcccgcgcctaccatgagtcccgggacgccaccgtcggttgagcagactctgctgcctccaccaaagccattcgctgccgctgacgctggaaacagacttagtagtgcatcagtgttatccctagactctgtcgtgggtgggaaaaaagacttcaagctccaaaaggtcgaccccttctttactgacagcaacggcgagtatgctcggaacttcgaacaacagctcgagaacctcaacggctccaactgcgagtcacaggtgtgtatcgaggagctccttgtcaaatcggaacgccgctggttcaacaagttccgcgatgcaaggctgggtcgtctgcgctcgcccacaccgtctgtcttccgcgacaaccacagccacggccggggctcgcccgatggatctatgtatgaggatgaggcaggccaccgtaatagtggcgatgccgagcacgacaacggctcagatgacacagacgatgagctccttctaggcaaagactacgtgcctcccacgggcctgtagataatggatgcagatcaagatcggcgactggccggtgtacacgctcttcctcgcactgggttcagatcatcgctgcaaactcctaccagatcacgctgctgacaggcgaagtcggccaaacagccgagaaactgtacggaattgccacaacctatgccataacctcagccctctggtggctcgtcttccggtacttcaaatccatcgtctgcctctccaccccctggttcttgtatggaattgcgttcctcttcattggctccgcgcactttgagtccgactcattcacccgcggctggatccagaatgtcggcagcggcttctatgctgcggcttcctccagcggatccatcttctttgcgctgaacttcggtgatgagggcggtgcaccagtgagcaagtggattttccgtgcatgtgtgattcagggcatccagcaggtctatgtcattgtgctctggtattggggttccacgatggcacaccagtccagccagggtctgctcacggcggataatacgatctcaaatacgtggaagatgacgtacgtccaaaacgaccctaaattacccccaattaatatacagaactcactaacaaactgatacagcgccatttgctatccgatcgccatgttactgtgggccatcggcctcctgctgatcttcggcctaccaaactactaccgccagaaacccggcaaagtaccctccttctacaaatcccttttcagacgcaagatcgtgctctggaactttgtcgccgtcatcctacagaacttcttcctgtcggctccctatggccgcaactggagtttcctctggacatcctcccacacaaagccctggcagattgtcatcctgtgtgtcatattctttggtcttctgtggtgcgcgttcctttacattgtcgctgttctttcgaagcagcactcctggtttttgccagtcttcgcatgcgggctcggcgccccccgcttcctgcaaatctggtggggtgtttctggcatcggacactaccttccctgggttgccggcgggtatactggcggcgcactagttagtcggagtatctggctgtggctaggtgtgctagattcaatccaggggttagggttcggaatcattctcctccaaaccctgacccggatgcatatgtgctttacgttgatcgtcagccaagtcctgggatctatagcaaccatcgttgcgagggcatgtgctccaaataatgttggtccgggacctgtgagtccagatatcacgaagggagcgggcgaactggcgaacgcctggttctgggttgcattgttctgtcagttgcttgtctgtgctgggttcttactgtttttccgcaaggagcaacttgcgaagccttaagggcagataatcataatgtttttctgtacatagtggcgcattggggcgttgctgacattccttgttctacaattttcttttctgcattgtcgtttcacggattttatgtggttgtatgtatatagacatggctgattggctgcccagtgaggagtcgagaccgtatcatacattaatcagggactcaagaactatgatgtatgctatttttgacactgtatattcttgagttttggcttagcaaccgtagtttggtaaattggctaggaaagctcgcgtaggcaacagatgtgctttgcactgggtaaatgtacgatatctgtatagcatttattggaatatacatgcgatcttgtgctattactgggtttgacatatttggggaatggtcctcttttggattaaagtaccaagctatcaactacctgcccttatcaatacagcctcctcaattgagtgctttgttatcagatgttacagctagaatatggggacattgtagagaaatgctgattctatgtctgtacacatatagatagatgatttctatagtgctttattcatccttgtttctttggtctagtgcatcagttgcttaagcgctctgtttcgtatatcgccctcaagagcatttatttacctgtttgactgcaggatagaagaactgatcatggctcccatcaatgtggtgatttcacaattgcatctcatgcaccatcaatcagaaaattggcaactcgcatcaacacatcatagggatcatactaataaaacgtggttgatctactagatcccccacaaaacagcctgatcgtggacattgccgttgcaactcatctcacccttcgccccaacgagtccatccttgttgccgaactgtgcaattgcgtcattgataatataaatgacttcttgtcctccaacaacagagttgacgttgccgtcaaccttcgtagtctccacgccaaagtgacaggatgcatgagaagcaatctcgcgctggttcttgccgacaacttggattgtccagtcagtactgccatcatcctggatattcaatatagtttggcagcagtctccaattttgggcgatgcatcactggtctggtccacaaacgtcgatttcccgcaatcgtcattgccggctgggatatcgcaggggtagttaggcgtagcgtttgggttgctctgttgtttttcaagattgaaaaactcgctcggcgctgcaaacgggaatacgcatatagcctgggctgtcacgttgaggtttgaggttcgttatgacctcgttattacccgggtctccatcaccaggcttcgcagggttctccctctcatgtttaatccaggtacggaccgagccaatcaccagctcgtcctttgtgatgccatagtagttactttcgctgaaaatatactc

SEQ ID NO: 5577 - DNA, 8287 bp, Emericella nidulans
  unsure (1)..(8287): unsure at all n locations
acaaacccaagaagttgttccaatctcatctacgcgtacgcaaagtttattcaactcactcaagaaatcaaacctagtgaatatcgaagtggatggaggaattagcgacttcgcggcagaaactcaacttgtcaaccagacaggcagggctgaactttcaaagatagccattattgggatgtcgggtcggtttcctgaagctgatagtccacaggacttttggaacctcctatacaaaggccttgacgtgcatcgaaaagtccctgaagacaggtgggatgctgatgcgcacgttgacctcaccggcacagcaacgaatacaagcaaggtcccttacggatgctggattcgggagcctggcttattcgatcctcgcttcttcaacatgtcaccccgtgaagcacttcaagcagatcctgctcaacggcttgcattgctcacagcgtatgaggcattggaaggggctggatttgttccagatagtacgccatcgacgcaaagggatagagttggtatcttctacgggatgaccagtgatgactacagagaggtcaacagtggtcaggatatcgatacctactttattccagggggcaaccgtgcttttactcccggccggatcaactattacttcaaattcagcgggcccagtgtgagtgttgatacagcttgctcttctagcctcgcggctatccacttggcctgcaattccatttggagaaatgactgtgacacggctattactggtggtgtaaacatcctgaccaacccagacaaccatgctggtctggaccgtggccatttcctttccagaaccggaaactgcaacacgttcgatgacggagccgatggatattgcagagcagatggtgttggcactgtcgttctgaagcggcttgaagatgctttggcagataatgatccaattcttggtgtcattaacggcgcatatacgaaccactcagcagaggcagtctcaatcacccgtccccatgtcggcgcacaagcatttatctttaagaagttgctaaatgaagcaaacgttgaccccaagaacataagctacatcgagatgcatggaactggtacccaggctggggatgcggtggaaatgcaatcggtcttggatgtctttgcaccagaccacagacgcgggccaggacagtccctacatcttggctctgcaaaatcaaatataggtcacggtgaatcagcgtcaggtgtgacttctctagtcaaggtgctgctgatgatgaaggaaaacatgatacctccgcattgtggcatcaagacgaagatcaatcataatttcccaactgacctggcgcaaaggaatgtccatatcgcactgcagcccacagcttggaatcgaccttcatttggcaaacgccagatattcttgaacaatttttccgcagccggtggaaataccgcgcttttgctggaagatgggcccgtttctgatccggaaggggaggacaaacggcgaacgcacgttatcacgctttctgctcgatctcaaaccgctcttcaaaacaatatcgacgcactgtgtcagtacatcagtgagcaagaaaagacattcggtgtcaaggacagcaatgccctgccgagtttggcgtatactacgaccgcacgccgcattcaccaccctttccgagtcactgctattgggtctagctttcaggaaatgcgcgattctctaattgcgagctcccgaaaggaatttgtcgcggtgcctgcaaagacccctggtatcgggttcctctttactggccagggtgcccaatatgcagccatgggcaaacaattgtatgaggactgttcacactttcgatccgccatagagcacttggattgcatcagccaaggccaggatcttccatcaattcttcctcttgttgatggcagcttgcctttgagcgaactgagtcctgttgttgtacaactggggactacatgcgtgcagatggctttgtccagtttttgggcatcattaggaataacgccatccttcgttcttgggcatagtcttggggactttgctgctatgaacgctgccggagttctatcgaccagtgataccatctatgcttgtggtcgtcgtgcccagctcctcacagagcgatgccaaccgggaacacatgccatgctggccattaaagccccactagtcgaggtcaaacagctcttgaacgagaaggttcatgatatggcatgtattaattcgccttcagaaaccgtcattagcggtcctaagtctagcattgatgagctctcccgggcctgctcagagaaaggactgaaatcaactattctgacagtgccctacgctttccattctgcccaggttgaacctattttggaagaccttgagaaggctctgcagggaatcaccttcaacaaaccgtccgtgccgtttgtttcagcgttgctcggggaagtaattacggaagcgggctctaacatcctaaacgctgaatacctggtaagacactgccgggaaactgtcaattttctgagtgcgtttgaagcagtgagaaatgcaaagctcggtggtgatcagactctctggctcgaggtcggcccgcatacggtttgttccggaatggtcaaggccacgcttggaccacaaacaaccaccatggcgtctctccgccgcgacgaggacacatggaaagtcctttccaatagcctgtcaagtctttatttggcgggcgttgacatcaactggaagcaatatcatcaggacttctcctccagccacagagtacttccgctaccaacctacaagtgggatttgaagaattactggattccctacaggaacaacttctgtctcaccaagggctcttctatgtctgccgcgagcgcgtctctacagccgactttcctgacaacgtctgcccagagagtcgttgagagccgtgacgatggattaacggcaaccgtagtagtgcacaatgacatagccgacccggacttgaatcgagttatccagggccacaaggtcaatggagctgcactctgtccttcagtaagtaagcccctcggatttgctatgaatcaggcctgacagactttaagtctctttatgcagatagtgctcaaacccttgcagaatacctcattgaaaagtacaagccagagctcaaaggctcaggtttggacgtatgcaatgtaacggttcccaaacctcttattgcaaaaactggaaaggagcaattcagaatttcggcgactgccaattgggtggacaaacacgtatctgtgcaagtcttctccgttaccgcggagggcaaaaagctcatcgaccacgcgcactgcgaagtcaaacttttcgactgcatggccgctgatcttgaatggaagagaggttcgtatctggtcaagcgaacgattgagcttctcgaaaatagtgctgtgaaaggagatgcccatcgcctgcggagaggaatggtctataaactcttcagcgctttggtcgactacgatgaaaactaccaatctatccgtgaagttatccttgatagtgagcatcacgaggcgacggctctggtcaagttccaggcaccgcaagccaactttcaccgtaacccatactggatcgacagttttgggcatttgtctggcttcataatgaatgctagcgatggaacagactccaaaagtcaagtcttcgttaatcatggatgggactccatgcggtgcttgaagaagttctcagcagatgtcacctaccgtacctatgtcaggatgcaaccttggcgcgactcgatctgggcaggaaatgtctacatattcgagggtgatgatattatcgcagtatttggcggtgttaaggtaaggaaattttggccgaaaggaatatcgctaacatttaacagttccaagccctatcgcgcaagatcctcgacattgctcttccgccagcaggactgtcgaaggcgcagacctcgccaatccagtcctcagctccccagaagccgattgaaactgcaaaacccacctcgcggccagcccctccggtgacaatgaaatcattcgtcaagaagtccgctggcccaagtgtggtagtgcgagcgctcaatatcctagcatcagaagtaggactctcagaatccgacatgtctgacgatctggtgtttgcagactatggtgtcgattcccttctttccttgacagtaactggcaagtatcgagaggagctgaacctagacatggattcttcagttttcattgagcatccaacggtcggcgacttcaagcgctttgtgactcaactcagtccgtcagtagctagtgattcgtcgtcgactgaccgtgagtctgagtattcattcaatggtgacagctgttccgggctatcaagtccagcatcgcctggcaccgtatcgccaccaaatgagaaggttatccaaattcatgagaacggcactatgaaagagattcgcgccattatagccgacgaaattggtgtctcggcagacgaaatcaagagcgatgaaaacctaaatgaattgggaatggactcgcttctctcacttacagtcctaggcaaaatccgcgagtcactggacatggacctgccgggagagttcttcatcgagaaccagaccctggaccagattgagactgcgctggacctgaagcccaaagctgtcccgaccgctgtcccacaatcgcagcccataaccctaccacaatcacaatcaacgaaacagctttccacgcgacctaccagcagcagcgacaaccatcccccggcaacctccattctcctccaaggaaacccgcgcacagcgtcaaagaccctctttctcttccccgacggttctggctccgcaacctcctacgccacaatacccggagtctccccaaacgttgccgtttatggcctcaactgcccctacatgaaagcccccgaaaagctcacctgcagcctcgattcgctgacaacgccgtatctcgccgagattcgccgccgccaaccaaccggcccgtacaaccttggcggctggtccgcaggcgggatctgcgcatacgacgcggcacgcaagctcgtactgcagcagggcgaaatagtcgagacccttcttcttctcgacacccccttccccattggccttgagaaactcccgccccgcctgtacagcttcttcaactcgatcggcctctttggcgaaggcaaggccgcgccgccggcttggctacttccccattttttggcgttcattgactccctcgacgcgtacaaggccgtgcctcttcccttcaacgaacaggaatggaagggaaagctgccaaaaacgtaccttgtttgggctaaggatggggtctgccctaagcctggtgatccgtggcctgagcctgcggaggacgggagcaaggatccacgcgagatggtttggttactttctaaccggacggatctgggtccgaatggatgggatacgcttgtgggcaaggaaaatattggcggtattacagtgattcatgacgcgaatcactttactatgacaaagggcgaaaaggcaaaggagcttgctactttcatgaagaatgcgttgggggtttgtgagcgccggttggtctgataatgtcaatttgtttgctttggttttggcttaggttttgatccattaatgctattctattgttgctcataaggttttactttcccgtttcatcttgtactctaaacataaagggtaaacaataataatcctctggttctaatataaaggttcttgagagactgcatctaagtgttcagccacaatcaattgcgatactctatttcctagctatttaacgcccaaagttttggaaacccggacaatagtgcgaacaacccaactagtagccgcggtataaacggtgtcgcataaaaagagcaaatgtacactagcattgcagtcaaaacaaccctgggtcaatgcaatgtcataattcataaagggccgcaatatgatgacatgctgtagtcgtctaagcaagtgaaggcatgtaaggtagtagtaggcacggtaacatccagtttcagcactccctgtaaacgtcatagagtgtctggcagtggggaaagaggcccaagaaacccagtccaacgtcaaatctgaacagaaaagatttcagaaggataggactttccgtgagctttccactcagaaaaacccggaagatgaatggattgctctggtttgtattgatcgattgaagtaaaacttaattgagagaggaggcatatggtatgtaggcgcgacgggtttattcatagggacatctcagaactaaacctaagagcgcttccgcggcctggaaaattagatccgttattattgattccagggcttgtaggacggctgtagttgttcgcatttaactttgggcttcgtggttgggtgcttgttgagcgtgtggatgggcgattcttgcggatctcgcggagctcgtcctctttcttctggaggagatcttcgcgtactgacagcagagattccagttctccaatgcgagtcaggtgtcggctttcatcgttttggatgttcaattcccgaagtcgggtggcttcgccggcggccttgcgtttaagagcctcgttttcatcccgaagagtgcggagttcgtttccagagtgcgcagcagcattggatgctgtttggtattgctcccgggtgtactcagcctgtttgtttgcaacgtcggcttttcgctccagtgctgcattctctgttgtgagacggcgtatttcctcccttgccttttctagctctgccatgtcgcctccgccggtcttgagagcatcgcgtgcttgatccagatcttgctttaattgagcacgttcatctttaagtntgataatctcttcgttctgtttcttgatcctctgttcataattcgccttggtttcaataagacgatcgcgctcccgtcggatattatgtaaatcctttgttcgggtctcatagcgatgttgaagcgactctaacaccctatccctctcaagtaagcgggtttgagccgcagacaattcttttcggagcttctgaatatcagctgcatttgaagctctcatctgcattagattcttctccaaaagttgtatttggctatccagtgattgagactccgcctttgaaccaactgtgagctcacttgtattctgagactcgcccatccgtggttttttcggaaatggctcagtagagtcttcttcctgttatgctgttagctatagacacataacaacaaagagagcaatattcgcttaccaatacgcgtttttgcaccagagatgtagcagatatcgtgttgtcaaccttggttggctcagctcctcatcttgacttgattcgtccatggtccatttgcgcagcggctcgactgggggtagcgaccagaaggcatcgaaattatctgagaggagacatgtcatgatttcatttgcatcttcatgcaccccaagagcatcgtcttgaaggtctccaactatgtctcgaagatgttctgagtactggagaattttagaaagatgcttcggtgttgaaggccccggatagcatagctcaacatgctcacttgaattagccaccatgagtctgatgataggtagcaagtgcccgttacgagcaaatgttgttcgcatatgttccacagagggattctttgtattcagtgaggagtcaagcgcaattattgctgacggagctttgtatacgttcactatcccatcgctttgagccagttgaacgccaaagcttagagcatccttggccaaagacacctctgcattggtgccgctgcccatctcctcgcgtgagcgtgtatacgaaaatcccttgccctgcaaataacgttcgacgatcccttgggtcttttctcctcggaccatgatgaccaaatggatatcatgttcacttgcggccttaatgagataattaagtaggagaaatttggcgcttgaatagtccgcccaggaggcttcctgttcgaacttcgattcggcactttccatgtggtccgcgacatttatatcaggatgagttgctgcattacttagacgttctaatacttgttgtattaatagcgctgcacgttccagctgcagctaatgtcaggataacactcagtatagcttgtactaaactgactcacctcagactccggaatttcctttctgccggaaagggaaacctcaagtgcattctttgactcctctagtacccgctcgtaatcatcctttacccgcgaatccatcggaagtggcacagcaaactcagaaggg

SEQ ID NO: 5578 - DNA, 5849 bp, Emericella nidulans
acacaatattagactgagttttgcactggacttgtcctcaacaagcagacctgatctgtgctttgctacctagtggtctgtactgttactcgctccctgcgggaccatcaccgtgtcggcagctatatacagccatggccgaaaacttccaacaccccttccagtgcatacagttcatcaagaaaagaaacggtgaacatagagacgtgttcgtagcatcagcgggcgcaaagctcttctcctacgcggcggactctgggcggcgcctctctgtctggccgcaagacggtgcggacaataatattcatggaaccaactgtgctggatctaacccagagactgaaggccctccggagaagaagaggaaggttgagccatcttcagaaaaggagggtgatgctggtactgcagcttcgaaaaaatcctgtacgtggaccaacattcccatcttgacgtccacgccagacggggaatatctggttgcgcttacaggagaggacaaatgtatccgtgtcttccagattgaagaggacggttcatttgtgcacctgagtgagaggtaagtttgtttctctctgaggtgacggagtagaagctaaccagtaccaggccaatgcccaagcggccatgcgccatcacattcatggaggacaacgacatcctgactggcgacaagtttggggatgtctactccatgcccctaataccaagcgctgagccgcgctctaccatgaagactctggcccaacggtccacgccgatcgcagccacaaacttaaccgtgcacacgcaacgcaatctcaaatcgttagagatgcaaaagaacatgcagaacaagcagaagaaagaagtagacaagcccgtcttcgaccacgacctgttgctcggacatgtctctcttctcacagacgtggtctttgcctctttaccgtctccggacccctcgtctactaagagaagaacctacatccttagcgcagataaagacgagcatattcgggtctcgcgcgggccaccgcaggcacacgtcatcgagaaccactgcttcggacatacagcattcgtttctaagctttgcatccctgaatgggctccagagtacctagtctctggcggcggggacccgcatcttatcgtgtggaactggacagccggccaagtactgcatactgtgcccctcgtggaacagccagctgaaggcgaagccaagaaagtcgccgtccacggtatctgggcggctactcttggtgcagactcacggcgagtcattctggttgcgctggaagggtaagcacctccttccctcctgctctcaactctctactgcaatatttcactgggacggatccgctaatcaagtcgcagaaacccggccctcctcccattcaccctggaacccaacggctccatgaccgctcacacgtctatcaagacctcgggcaacgttcttgacgtgcaagtccacaaagacatagtagtcgtctttgtcgactgcatctgctttcccgggtcaatgcaggaatggcgctgcaggtcaattgcttcaatcacgctcgaagcgttccagctcaagcaaggaacaacagagtgggaggcggtcactgattaccaattggtcaccacagttaacgctacggggacattacctgtcattttggcggatggtgtagaggaaaaggaaaaggagaagaaggcgttgaatgatgtgttctatgggctggagcatctgaggaagcagacgtcgtgggagggtgaggctacggctttctgatatagttgattctgttgagtacatgtatttgtgaatctaaaggtatagattgtgatttgggataacctaaagtcacctatgtatcttatagaaggatataatgcaatgcttggatgctgttcacaataatttgcatatataccgctcaacttataatatgcccaaatgaatcacgtaatgctctgttctggtcttgatgctgccccagagatgaggtatgtagacgtcaaaagataacaatatatctacgctcgtcactggaaacgtagactatacacaaaaagcccacccacatcagccatcatcaccactcctcccaaatcttccgccgaaccctagatctcttcggaagaacttgccaaggttcttaaggttctcgttcaagttagaccccacctcaccggcctggctttggttcggcccagaagacccaggtattgcggccggtgtagaagcggccaagttacctgctccagccgcacccgggttaacaggagtagaggacatgggcgtgcccagcctatccacaccatccttcgcagcggaaataagtgcagagccaagcagcgacgcatcaaagcggctcgttgatgccgcggcagaggtgccgagattgccaaggccgaggccttgggagacggaagttgaggaggaagcagaggttgtttggagtgcgcccagaaaggggtttgtttcctggatgtttgaggcgtagcgatcggaagtgcggtgaatctggaagagttcgacaaggtggttctgctcctggcggctccggatacccttaaggtcaaggattttgcggaagttgttattgtttcgatctgcgatatgaattaggtatgcttggacgagggcttctggaggcgatggttggacttgaagggtcttgagcaaggtttcgatcttcgtgaagctgttattgacacgcttgacgaaaacgaccgggtgggggcgccgggaggagtgaagatagaccggttttaagggtgtatgtgtctaggagcatctaaattgtgttagacatagctccttctctgagtatagtgagcttacctgttctgcacccgtctccgagacaggtttacaatggaagatgttttgcaggaagatgttcgaaatcaactccactatgtggtcagcaaaagctctggcgtattgttgcttgtggatcaattgcagtatttctgacgccttggagttggttttcgacaatagctctccaacataggagctttggtcgctcaccccttccagccgattccaaggggtgttgcgcatttctcgccagcatggctcgagttctgtctcaactttgcgcactaggcctcgcacagcagccgacgctattcccatgaatgagtcagcttgactttgcaagtcgacactctgcttcagattcttgtcgagacggccctttatcttctcctctaactgattacatgtagtatagcagtagtccgctgtattaagaacagcaatatagtcctcaatcgtcggcgtgcccagcggactgtggacggtgggctggtcgctgatatagtatagtagtacctgctgagcgtactggtcgagatacttgccgaacacttttgccagatccgcgagacttgcgcctgtagagagctttgcacactgctggagagcatgcctgtagaatgtgaacagctccatggaagaggaaataacaatgtgcgaatcgaattcttcgcctggaggtttaacaggctgttgacggtattttggtatcaagccggccaattgctgatcctgagcatttacccatacacttagataaggctcaaatgcttcggagatagcttggccgaatacaggcgtttccgctgacgcaaatgtatcggtggatggacgagaatcaatggcaaaccgtcgttccagggaatgttcaaagtcaagcgtttcctgcaaacacgagagcaacatactgacatcgatagtctggccattccgcacagaccgtgataatattcccttgaaatcatctctggtcccttcgcagaacgcattggccagtatttcatccactctccacgatgcagggaaaatagaggcgtactcttcatcgtagattcgcaggatccgtcgaaaccatgagtacctccgtgaaatattgtccagtgagcccgcctcctcattgttccggaaaacctgccggtactcgcgcagctggaaattacagtaccaagtcatcaatctcgatctcgcatgatccccaagcgcatccataacagagcatgcctccgagagcgccgtcttcctcgcgccaacctcccccttggcgaacgccagctcaaagtcttcacatatttgctccaacaagtctctttggatatccgccacattccggctaaggagcgcaatctgatcaatcgatctatacgacttgaagtgcgcgacgagctgaatcacggcctgaagcagctgggaacagtcccggtactgcctcgtgcgactgagaacacgcaattgatcatacgcggtcgtcaacatctgaagccgtttcagggccgtcatcgactgcgtcagattcttcttcgcgttgtctagctgtttgatatccgccgtcatttctgtaatggactgctcggtcttggacgcgcggtcgcggacatcgtcgattttcttgaacaactcggacagatctgatttagcggcttgaatgcgctcgacgctctctgcattggatgtaacttggtcttctacaagcgccccgatctcgttgtcgagctcagtttcgtaatcacgcaaccgttgagacacatcggaaacggaggacagcgtagaagggtgcgagaagatctcgttcaggtggttaatcgggtcgtagtccgctgaggcaataaccatcaatgaccaagctttcataaagcgtaatctcaatcgcacgactcacctgcgtccaacggatcgaggggcgcggccccgttggaagccatctgaccggtgctatgtgagatggtcgtaacgggcattccattagttctcgggaattgacgcaaggctcatgctgcaggttcgactggaacgcatgcgccggtttgctgcgtatattaggtatacttcagcgacgacgggggttctatgaggctggaccgaacttatggtgcggagagttggcgggaactgcagcttagtgatcggctccggccgccaagtcggccagtagagaacagcacttctctactacccaatctacagatctaagccaagttgatgagcaaggcaattggtttgattctcgctctctctaggacgtatcttcgtggtctttataatacaataaattgggatattcaaacgtttgataaaccttcagccatttcgccgagccatgcagccaccatgtaaattggaaacaaaattgaggaagaaaataaataaaaaaccttctgctatcctctcattccttgaacaggttgtagagatgcgtgatgattttcagattcggaactatgccgtaactcctggaaggaaagcgtcaggtggtaactggccctgtgtctattggcataattagtaaagctttacaaagcagtcggggcgtggttggcctacctttaattcctcaaagttcttcaaagcagcatccatgttccagttattccctgaaagagcaagttcggaatattgcagcgtcatcattgttttggcgctcagttgcattactaattgctcttgttgtacctggacatcggctttcccaggagctggaagtccgtagccagcaggggctgccggggccgccactcgggccgcgactggagctgctgctggctgagcagcgacaggaggaggttccagttgccatgcttcattgccgccatatgcgcgcaaacatagcacatcgctgataaccctaattcctcctacacctgctcccggcccgataataaaggttcgatcgaagcttcgagtttctactttccctgaattatcctcttcgaactttccatgtaccatgataaggaaaccaccaacgccggttgaactctgtccggatatatcaggaagtccaggaattgggaaacattcaatgagccactcttcaggatgcgct

SEQ ID NO: 5579 - DNA, 8527 bp, Emericella nidulans
cagtcaccccgcgacaaggggcgcctcttataccacgttcgcccccttccgcatcaatctagtcttcgtgtctggctgagaatgaaacttcatttgccgctgagtattgggtgtcttcatgcagacttgggtcgctttcaaaacaagttagcttgggcctctcaattctcgtgcaggcaccagaatgtgagcaagaaagacttactagtactccgcattacttccccgaggacgagtctcgtagtgggggcttagccgggtgtcatcgtatctgtgcgtataggcatctgcccacgccatggtcgatgctggagtcaggtatccattttgtggttctgagaccggatggtaggttgtctgaattggcgcgtactcttggcctggagctgagggtgtatattgttgctgattgtacgcgttctggtaaccttccagctgaggattatgcgtctgctgaggctcgtagccatacactgagccttggtattggtcttgattctcaagaggaggttgaaacccgttgtcttggggagctgtgtaaggctggtgggcgggatagtaagggtccgacatcttgagcgatttgcaaagagcctgcgagtgacgcagcagagaaagctgagagtgagcctatatttgggtttgtttgttactgaccgggttggtctgatgactttgtcagccgagggacttcacttgactcgcttgcggagttgcacgctcaggctctttgctctaactactcaaatactctctatgatcctaatatttgaccactcaaagaatgatctgactaacagagggcgataaacagctatatacattgatatcaacaaataacatttcagctacagttcccaccccttgacctctttcatgcgtgaataccagtcctggacatacggcagtgccacgtgaggaccatacagctcctgctcccactgtggtgttgggggaggaaggccagtttcctttagacacgactctcttaattgctccagagtcccgccgcgatcatatccctgatctgcctcaccccgagcagccatcatttttttcctcaatgctccagtctctgcttcgtcaacagcaaggctctcagggttaaccacaacgccatagttgtcgcgagcgccctggatggtcaccaggtgtcgacgaacctccagcactaccttctctgcaggccgagtcaatggatccccaaggccaccacctccccaggtaatccactcgagtaggtcacccgggtcgacacggatgtggtcacacttcgaggggaggacctcgactggcggagcatcctgcgacttggagtatcggtacaggatctttcgagaccgagctcctggctttcctccacggataccccacggcttggtgaaccaccggtcatcgtggatactgaactctccgcgggctaagaagcggtagtttgtgcgttgtgcattgccgccgcggtagaaccctgcaccgccgctgtcggctacgctctcgttcgcctcgatgcggagcgggtagttcagctctattatctccgtgggaatggacttaatagcagggaagagacagtggcagtcgagaccgtcgcctgcattgcgggcggggacacctccgaatccaatttggtacaactggtaccattcgccgtctggtttgtagccggagtagaagaaatgaggggagtcgctgaaacccgcggctgctgcgtagactgggttcctcatgccgatgagcgcctgcatgacatccatggttctgcccatcatatgtgtgcggcatgagataggagcgggccggacaggtttcaagattgagccctctgggatatggatgtcgattaggtcgtggaagccgtcgttgatgacggtgcctggggccgccgaggcaatcatgtagtatccgataaacatgcggaacatcgtctcagagaggtaaaagttgatactatggtcgctttgcggagaggttccgctccagtcaaagagtagccggttgccctcgatcttagtcatggtacaagttaaggcccagggcccaacgccatggccgtcgtcgtcgacaaagtcggtgaatgtgcttggtttgtcgccaaaatctgactcgatgatcttcaccatagcggtgcggttgcgcaggagcagctcgttgcatgccgcaaggtagatctcgcatccaaagcggacgacaagctcacagacacggctggaggcggttcggcacgcagcgatgatggccatcagatcggacctgtaccagtcgggctgtcgggaattgcggcatagcaggccgacaaggtccgtgttcatgacaccctttgtatagagcttgatacagggaatctggacaccgtcgtcgaagatggatgaggcattgatagacatgctgcccgggacgattccccctacgtccgtcaggtgtccgaattgcgatgcccagccgatcagcctgtgttcgtagaagatgggcaagaggacgatcacgtcgttcaaatgcgttacggctccttcaatcatgtacgtgtcgttggtaatgaacacatcgccctcctcaatggttcccttccacgccctaaggaattgggtgatgaagctgccaaactggccaacaagcatcttgccttcggcggtggtgatgacgttgaattcgtcctgctgttcacgaatggcaggagacatactacagcggagcatgagggtgtccatctcactgcggatggaagccagtgcagaagcaaccagtgtgggaatgagcggtgttgactgtacgatctctagggctgcttcgggagtctcgtccttggtttggtctttcggaccctcttcagatggacggatcagaatgttcccaatggaatcaatttcgccataacaacctggaagaatcagggtgttgctgtccatctcggtgatgatgcatggaccgtccacacggacaccctggcggcttatcttctcgcgatcccacagcgccgcttccattgcttgtcccttgacgacaatctgctttttcgcgaccaatgcatcggcaggaggctcagttgattcggccttggccagtcgaggaacctcaatacccggagaagcgtcgacagaaacaacctcgaggcgcatcagctcgagctcgaagttgggaaggcagtatttgaactgctgctcgtgaagctggtcgaatttcgcctgcaggagctccctccacggcccgtcttccagcagcaggtctggagcctctaactcaaccgttaagttcagtgcttggccgcggtagcgaaggtcgagatggtagctgatgttgagcggcatgacactgcccccatttgaggttgtcattgtatccttgcaaatcgcctctagctcgtcaaatcgctctttgaccttcttcgaagtcgtggctgagagtaggcggatgaaagacagtgactgagagtggctcaacctcgtggtagcatcgcctagggcacacagagtccctggagaggggggtacaatgactggccaagccccaagtaacttgccgaccgcattggcatgaaggggacctgcgcccccaaaggcaacgagggcgaactcttttgggtcgtaaccctgctcgacggagaccagacgcagggctccgtacatggtctcattaaccaagttgacaatgtcctcagcggcttgggttactgacagcttcatctgttcagcaatctccccgacagcagccattgcagattccgtgtccagcttgaattcacctccaagaaggttttccggcaggtaacccagcaccagattggcgtccgacacagtgggctcttttcctcccttattgtagcaggcaggccctggagtggcgcccgcactctccggacctactctcatggtctcggtgatgctcatgtacttggcaatagatcctcctcctgcgcccactgttcgaatgtcgacggctggcgagcgcacagtaagggagcccacgacggtctcgcggcgaagctgaggcttgccctggtggataatggcgacgtccgttgacgtgccgcccatgtcgaaggtgatcaggttcttatatggcgtgttttgcgtgacgacgtctgcaacgccttgcacacctccagcaggcccagacatgaggatgttcacagggagctcccctgccagccccaagctcgtcaagccaccatcagacttaagaatacggatcgtgtttccgtcctcggcgagcaaatcttgcaggttactgagataggtctgcaccacgggcttgacgagggcattggtgcacgttgtcagtgtgcgctcatactcgcccacctcacgaagcacatcgctcgacgaaatgatcgtcacaccgtcacctagcacttccttcacaatccccgccaccagaacctcatgctcgttattacaatgcgagttgagcaacgagattgccacagcgtccggtttctcgtcaccagtccacttcttcaggtcatctctcagcgcgtctacgtccactctcacaatgctcttcccgtcaacgctcatgcgctcctggcattgtatcactcgctccagcggcacgatcgggtccggtggcgtataatgcagccaagcacccaggccaccagggatctgcgacctgcgcactgccaggatatccttgtggccggtcgtaacgatgagccccgttcgcgcgcccttgccttcaaggacggcgtttgtggcgaccgttgtgccgtggtggatgaactggaacttgccgtcccatgggaagcggtccttgagggcctgttggaccttgcggatcccgttcttgatgccgatgctttggtcttcgactgtagttggaactttggcgcgcgcgacttggttgtctggtgtgaaggcatagacgtctgtgaaggtgccgccgacgtcggctccaagccgatagccaccttgtttggccattgtgtcttggttcccagaggtagataaagtaagcagtgaagagcgagtggcgatagaggacagcaaggggagggagggtcgtgatataggactttgagggaatgaggggcagcatggttagtgtctcagcacaagggttatacacatgttaattcaacaggacttaccgtaggtatatcttatcgcaaaaattcgcacgagtatctccgcatgttctccaaaggtagacggcaaccactgcaatgcgcaaatcaggaggctcacacgatacggcatccagtacctcttacctcttttagggcagagatagcgctgagagataaatactatcgcggcgtcgatcacggcccgcctgttatcaattcgtcggcccccaatagtctccaagtgactccaattgttatctcaaacggcgatcgactatctacttctcggcatcatgcacggtaaacgaccccaattctcctttgccatatggagtctgggacttaaggggaattgcggagtgcggtaaacactgcgagactcggaagattgtcttgtttctttacccagagcgtttggatgtttcctggtcaattttcaggcttgacgaccagaagaaggcattttagaccgtgagctgcatgcggtggactctgtgggcagcaggccagttgttcactaggaatgcgggatattgatagcgagggttatctgtaccgctccccccatgtttgggcaaggcaatgatgcatatctctctgcgctatcaaggctatatagccttccctttctgcggtgacccaggttgcctttacttgactccttcaagtattccgtccctccatcaccatgcaggacaaagagaaagcagagcgctccctaagcccagcaagccccctgccagccgaaaatgcggtggaagaaggcgagatcttcactacttcgtcctcaggtgtcaactttcgcaaggtcggctggttcaatgccactgtgatcttcaccaagatccttttcgcaacgggggtgctctccctcccctcagccttatactcgctgggcgctgtcggcggctcaatcagcatcgtcgcgtggggtgtcttgaactgttactgcttcgtgatcctgggcaatttccgcaatgaacacccgcactgccactccatcgcagatatggccgaggtcgccgacggtattgtcgccaaggaagtcaccggtttactctttatcatcgcgtacgtccttgtcacaggaagtgggataattggcgtctcgactgccctcaatgccctatcgcatcatgcagcgtgtacagtctggtggtcgcttttggcgacagtggttattaccgcaacggcatcgatccgcaagctcgagcatgtcggctggttatcctacgccggttcctctccatctatgtcgccgttctgattgtcgttattggagtgacacagcaagatcggccggctctgcgccgaaagagggcccgtttgatctagggtatgtcagtttcaacaaccctgggttcgcggctgggatggtggcgtcatgcacgatcttcgtctcctctgcgggaaccagtgcgtttttgcctgttatctcggagatgcgcaatccgaaggagtacaagaagccactctatctttgtatgacattggtgacggcgtcgtacttggctttcagtctggtagtttatcgatggtgtgggatgtgggtggccagtccctcattaggggtatgtcttttccccttgacccccttactacagaggactcatgaaagatcatttagagcgcaggccaaaccatgaaaatggtctcgtacggcgtcgcacttcttggtctgatcgtcagcggcacgctttacctacacgtatgctcagccacccctcttcctgctatcctttttcagtacctactctaactgctgttcatatatgaaggtcggcgcaaaatacgtctttgtccgcatcctcagcgaaacgcggcacctgcagtctaatactcttgtccactggaccgtctggttgagctgcacaaccatcctcggcgccctagcattcgtgcttgcgtccgcaatcccaatcttcaactacctactcgcccttgtgggttctatttgctttgcccccttggcgatgagtctcccaggctggctatggctgtatgaccacggagaatacagaacgggaaatctggtgaagaaggctgcatatggactgcatgtgggacttgtgctcctgggcgtgttcttttgcgttggggcgacatatggcgttgtagttcagattgtggatgcgtacgacagcgggcttatcggtaagtaacctgtgctcctgggaaccggaagggcttggtgagttgttgtggggtaaatataccgcgtgctgacagattgacgataggatcggcctttagctgtgctgataattcgggatcaacttgatgatttcatattctaagtctctgcgttgtcctagaaatctgtcagttagatcgtaccttgtcttggcctattggacttacctgatgcacttaacatgtacctatttatctattcccgcttgcttttcagactgtcattcctggctcgcactttttctacggcttctaaactcacagcatggcttgaggtcaagccagagccgtagtactatctttctgtgcgcctgccgacctaccaaccgcataccgtttccctccatcccttctttctagtgaagacagacaatagacttcaatataaattgcctacctacttgccactaaccaaggcaagagggctggactactctgtgcgtgactgccagaccatgtccaggccgcattattcaaccttacgaagctgaacagttgctctgctttgcagcatctgcttgaattcaacttgcctcggtaatgaaagtgaattggaaacggggatagagttatccgcaaggatggactcgtgaaacgagtaacacgtgggatgagatcaaacaaatagcccacaacgaaattctacacatcggtagagagggtgtaagtatgtacggcatttcgaacccacgagtgctaacctgtcttcgaggttagacattatcgctgtcactgggtaaacattgaacagcaaaaatacaggcaaaactccgtctttcccgatatatagactatcgttttatgaacgcaccccagatgatgtgctacatttgccagatatgttcgttccttacgtacgagccatgcttcgtttgactgggcctggaatgaatgggtggctaccagaggcagcgaaaaagggaaaagtatgctactgttctggttggatttaagagattgaaattcgacaaaaagaggagttgataaaggattagaagcagatgacagcgaggagaaaagagggttgagtttgttggaataagggcaagatgcgcagaatacggaatattcgagataaatgttgaattgaatattgaacatgaattataataatatactggctaaaaataccttggacctcaatcagaaaacaaattgtcgaagccaatgcgtactcccaaccccgtgcatcactctcattaggtacagtcgagcatcccgtatgtaaaaagtgaccagctggcgctcgcatcatgcccccagcacttggta

SEQ ID NO: 5580 - DNA, 4168 bp, Emericella nidulans
gacctatgccaaggacctacgaatattcctcagcgacgcggagtgttcaaaacgcattgggaatttcaaagcttgcgcttccactattgtggactaatggaagaactgttcgagggtgtcaaccgtacgaaagacccgtcacggtggattccgtttgaggcacgcaaatcttccttttccctgatggaagactggtgcggttattccccgaaccaagctcaaatctcccaacgggaggagcatatgcggaagcttgccattgctcagcgtcaggaggcaggcggggaactacgaggtgccactgcagccacagaaattgagaagcgaaacctcagggcagccgctcttggtgcaatggcatccctttgtgtaagcgatgacttctcatttgccatctgatactaacattggtaggcgggcccaataagtattactacagagagcggctcagtgctccaatttgatgtcggacggatgctgtcatggattgagatcatcttcaacactgtcagtgataaatggcatgcaatcggtcgacgtgcgctgaaaaatttgatcctccacagcaaaggacacacttacctgctggagcggtcggttgagatgtgctatgtgacagagcggcccaagtcccttgagagctactttgaagtagttaccgagattttgattgaacacaccgactatccgttgggcttctggagaattctgggcgctgtcctagtcactctgggcagccctaagcgagaaatcagaatgaaatcggccaagctccttcgaatccttgaggagcgtgagcagaagaactcccggttacaagattttgatattagtatatccgacaagacaaccgcggtctacaagctggcccagttcgaaacatcgaaacgtcttgcccagcagcatgctgacctggcatttacactcttctcagagttttcccagcatttcaagaacttgcggcctgacagtcagcgaaacttggtggcggcaattctcccttgggtacagacaatggaactgcaggttgatcccaacggtggccccacagccaagtcctacatgctccttgccaacctcttcgagattaccatccggtcaagtacgatactcccgaatgaggtccaagctttatggcaggcgcttgccacagggcctcatggaggaaatgtgcagttggtgctggacttcgttatcagcctatgcctcgaacgtaaagaacaaaactttgtggagtatgcgaagcaagtggttgtatttctgtcagggacgcctgcaggttcgaaggtgatcgagttctttttgatgcaagttggtcccaagaacatggtccatgaacgaaaagacattacgccggcaccgctagacgtgaagagtttaccatacgttgcggacctcgcaactgtgctccctgttggtaacaagcaagccgggttgtcccttggtcaggttgctcttattttccttgtcgacctcatggttgctccagtcacccttccacttccggatgtcgtgaagctgttgcatgttgtcgttattctttgggaccactatactcttactgtgcaagagcaggctagagagatgcttgttcatctcattcacgagctcattgccgccaagatcgaagatgatgaacccgcagggagccggcaatctatcgaggactttgtggagtgcattcgcagaagcgaccctaaagtagtttgggagtatgaggacagtcacgataaagaggatggcgaggatgacagccgtgtcccatcttcaatggctagcgttactcacgccgttgttgattttttcagtcttgcttacgagggaatcaccgatctatgggcaaaagaagcattgaactgggcgacttcatgcccagtacggcatctcgcctgccgttctttccaagttttccgctgcatttcgacaagcttggactccagaatgcttgctgacatgctggctcgactctcaaatacaattgcggacgaggaggcagattatagaactttctctatggaaattctcacgacgctcaaaatcatcattagttctcgagcacctgcagacctgctgcgatatccgcagcttttctggacgacatgtgcctgtctgaacactatccacgagacggagtttgttgagagtgttggcatgctagagaagtttttggacagggtcgacatgagtgacccgatcgtagtcggggagcttgtcaagggccagccaccgaagtgggagggcggttttgatggcatccagaacttggtctacaaagggctaaaaagttctcaatcgctcaaccgcacgctggatattttacatcgcttgagcggccttcccaacaatgagctcattggcgacggcaaccggcttttgtttgctatcctggccaatctatcccatttccttcgccagttcgatccaaacatcgatgatccaaaaacactcgcccgtgccacgttattggcgcgcgtggccgagggtgagggatgcccgcgtcttgcagcttctctccttggcttcgccaatgggcagtacaaggcggagaatgatttcttaagtcacatcatcaccgaaatacgatcctattactatccccaacaggattttcaaagcctagtcttcctcatgggcttgctcacgaacgcgacagattggttccgtgttaaggtcatgaaaatactgtgtgcagtgattcccgaagttgacatgcggcgatctgatgtggcaagtcatggccctgatttgatatcgccccttttacgccttctacagaccgatctttgccctcaagctctgcaagttatggaccatatcatgaccgtttcgggcaatcctatggagcgccatcatattcggatgagcatggcttcatcgacttcatcgagggcaatccggaaagaatacgagcgaatccagagtctttacgggatcccagaacctacggggtggtctatcccgatgccggcggcccagtcagctgttacacgacataatgtccacgcggtattctacacatgtgctgaagttgatcgggtagatgcgcaggaacctgtaccgtccgaggttgagttccacgctgacgattacaatgacaattttttcccaatgcgagccgatacgatgcaatcgattgagacgcagacggatggcaacattggggatattgtgcagaaactggatagtctggacgacttcttcgaggacacagaatcatcccatccgacgcttgatgctgtgcctgatatgtcattacgtggtttcgcaggcggttacgtggattccaacgcaagtatctatgaccagcaaaccgccccgatactgcgaaagtcgctcgcgcggacagcctcaacatcctcatttcataatggtctcgttgactctcgccctacaaatatgcgctttgacggtgttggctatcataccgccggcacatcgacacctcatctatccacccaaacgctacgtccagtatctcatacacgttctgtgacctcaccggtcaatcacgtcttttctcaaagctcggctggtccgcagttctctactccacccactggagttcatgagcccacctttttctctgacgatgaaatggaggatggctcattcgactttgatggacgcctaatggtgaacaagcaccctgcgcaccctttgaccagccaatcacgcagcgcaacggacggctcgtcgtcgctcgaatcgatgatccgaagtggcatgagacgactcaccggaagcacagcagctggtcgagataaagagcggcagcgtgaatttgtccgagctcagcaccgagcgatggctcacactgtggattcaccacgtgtgcagaaggtgccgacggaataccttggaggatctccaagtcatccaagttcaccgggccagtaatgtgccgatgctggtctatcggctggcttataatttgttatacaacgtctgttctctatcaactggcacttggctgtgctggctcggcggcgtttcaagggaattcgatattggaattatattgcataccttcatacccatgtttgtctacaatttagcgtctcataagagctggcgattttattttgcattataaaaaaaagtttggacagtcttagattcatataccattttcacttaattctcgcattatctcattaatatgctcgtg

SEQ ID NO: 5581 - DNA, 5928 bp, Emericella nidulans
ccaggtcaaaaggaaaaacgagaaaaacatttgtctaccgcccattccgattccgccgcatattgtccttacactcattacaataccatttgactgtagaccgttagaatatgaacctaaagtcttctctatcaaagaacaacgggagaactcaccattccgtccaggcggcttcgtgagcccaacacatgacagatggaaccactcgcggggacacgcatcgttgtcacacgcgaccatctcgccgaagctaatttcgttacagtagcagtaccgcggctcgccttcctcgtcctcatcatcgccttcgtgaagcgactcttccggatccgatactggtggcggttgcacaatggatgaattgttgccgattttattgtgagagcgtttcggcgcggggtctgaactccgcgttggtctcgtgcgctgctggactggttctgcggaagcgagtacaggagtcgagttcttggaggaccggcctttaggtgcactggttgagacgggtgcgggtgtttcgatgcgttcgactgattcggcgagcttcctgtcgatatcttctctttgagtgtgcattattgaggaatctaacggatcgatggcttcagatatatcccgctgtagatctgagacagggaccaattctgttctggacggcgtctcttttgattgcgccttgttatcagtagttttgcctacaatggttagtgatgcccagaaacgtaaagagaaaaacgtacctgagctaggcacacggttggacgcagaagacgagggtctttgccgagaattcgcctgcgttgcaccctgctgtgttcgagaggattgcggtctagacgcaggccctgggctggccgcactgcgtgagatattcgcggcgggagcagtcccaataagcggggaagcaggaatgacgggtgagtccgcgctggcgactccagtgttgtttctatcgatattagcagattacccaggaataatcaaagtatacataccgtttccgggcggcggcgttggcattaggtgcccgtgagcgtttcttggtcgcatcaacagcatctttcgacactgctcgtccagaggctcctgcaccactagcagaccgttccatagtcgcgccagcctccgcagtaccaggccgttcgaccttgcggcgtttcgtctggctcgaaccagccgtgccagcttgcccatgtccatgatcacccccgatagcacgatttttgttattctgtccctttcgagacccaacggcccgagcttcttccatatccgaatccgcatgcgcccgacgttgcctgcgggccaacacggcctcccgtctcgcctcacttcgcgatgcggcctctgcttcgtgcaaagcatgcgcaagatccttgtttgacgcagcttctcgtcggggtcgctcgttcgtggcagtcttgggagcattccgattcgagtaagcccagtgagtgagactaccaaggcgagcctcttcactgatttcgccagcaatgaaagggaatatagagtccaagcgcataagttggcggtcaagctcatcgtttgcatttgatatcacatggtttttctcatcagccgtcatcataagatcggagagggtatgtcgaacacgatcgaaaagggcgcggcggttcttgctctccgaggattcggggggacgggaagagtcctatcgataaccatataattagtgattgcatgcttttggttaactttgatgaacttacagcaggtaagagatcctctcggacaactccttcgatgataggcgcaggattaggcgggtatggagtcggctgcgactctgatgcagccttcaaaagctgcagtagattatcctcaagagcccaagccttagcatcgacctctttcagtagcgaattatgccgtcgaaattcgcgcggaagggcggttatggcgtccgtaaaatgggtcagggctggatagaagccatgcggaacaggtgatgatacagaatccaccattgatgagtgcccataggcaaaggaggagcgcccaagggttttggatgtgcgcgaggggtttgtcctcgtttggcgcgcggactgacgagcactgtgaccttgggcgctgacggccgacggagcgactgcagacattgtcgaaggggtacggggagcgaaagtgttcccagtgaggatgtggcaacaaaatagtccaagtataagactagagcatacacggcaaatacattgacaaaaaaccgcgactctaggcggacgggaaggtttgaagcaaaagcagaaacgaggagatgcgaactgcggagaaaggcttgaataagggctaaggcatcaactgattagcacctgaatgtacaggccttactgagccggggataatgactaagcacataagactgacgtcacggcgtcaccatcgacgcgtgcgaaaagggcttcagaaatttcgagtggtcaggaaaaaatggagatagaagctcgaaaaaacaaggaaatttcttattatgccaaacgtgtacttattttacatatacgcggaaagacatattttaggtatacaggccagcccaggaaatctataccagggtcaaacccaataccaatgtccagcgcacccaggacagatgcaaaacagaagacaaagtacataggaaagaagtcatacagtggaaaccaaaatgaagtagacgctgagcccgctcccttcagaaatagatcactcggaaagaaaaaaagaaatgcttgacttgtgcaagtctactcgcccttcaaacgctcctggtggacggagaaagcctcctcgagcatttcctgctcttccttcacgtgaacggatttcaagccggtggctacggaagcacttggcgggcgaccagcatacatgacgtggcggcggttgtgatgctcggtctcgttaagcagagtctcaatgcgaggctggacgtagctccatgaaccggcattcaggggctcttcctgagcccacacaatgttgcgagcgttggggtagctgtcaaggttctccttcaactgagcccaagggaagggatgcagctgctcaacacgggtgatggcagtgttgcggatgttgttggcttcgcggtgcttggtgagggcagcgtacacctggccagagcagagaatgacacgctcaatcttctcaggctcatcgatggcggttccatgagcagggtcgggaatgatccattggaagtgagagtcgccagtgaactcctcaatagaggagcgagcaagtgggtgacgaaggagagacttagagaagaagatcacaagggctagatttgattagcttaggtccatattgtaagggagggaacaacatacgcttgcggaattgacggtggatctggcgacgcagcaagtggaacaggttcgcagggctggtcatgtaagcaacctgcatgttgcagtcctggtgctggcggtcgagcttgtcctgtgaggggaagacacggggctcctcattacagagctggaggtaacgctccatacgaccggaagagtgctcatggccctgaccgtcgtaaccatgaggaagagacaggaccaaaccggagcgctgcagccacttggattctccagaggcaatgaattggtcgatgatacactgagcgttgttggcaaagtcaccgaactgatcctcccacataacaagggcgttaggagaggtcaaagagtaaccatactcgaagccaaggctgtaaacaggttagagaattgcgaaagagaatttccagtgaaacttacgctccgaattcactcagagacgagttagaaataacaaagctaccctggtccttgctgatgtgctgaagaggggtgtaagtcgcctcagtctcctggtcgtggagaacagcatgacgctgagagaaagtaccacgctcaacatcctgaccggacacacggacgtggtaaccctcgctgacgagggaaccgaaggcaagagcctcggcagtagcccaatcaatatttttaccctcctcaacggtcttcttgcggttgcccagaatacgcttgaggttgcggtgaagagtgaagccttcaggagcaccactgatcttgtcggcgacatttttcagaataggaggctcgacagcggtgggaagatgcggcagcacctcagtggcaagctccttgggagtcttgaaaccgttccaggcggaggtcagccactccttaccggtgggctggtagtccttgcttcggtcaaagctgtcattgagcatgccccagacccacttcttgtgctcgtcaatgtcctccttggtgaaggtgccctcggaaatgagcttctcaacgtacatgtcgagctgaagctttttctcagcaacgcgcttgtacattagaggctgggtgaaagagggctggtcagtctcgttgtgaccctgcttacggtagcagacaatatcaatgacaacgtcacgcttgaactcggcgcgccagtcagcagcgacctggcagacgtagttaacagcctcaacgtcatcagcgttgacgtggaagacaggcgcatcaatcgacttggcgatgtctgagcagtaaggtgtagagcgagcaaagcgaggatcggtggtgaaaccaatctggttgttcacgacgatgtggatagttcctccagtggagtaggcgggcaaggagtggaagcccatggtctcatagacaataccctgagcagcaaacgcagcatcaccgtgcagcaaaacacccatggcgctatcgaagttcttctcatcattgttgtagtgctggatagcgcgggtcttacccaagacgacggggtcctcggcttcgagatgggacgggtttgcaacaagagagagctgcacacgcttaccagagggggtggggcgttcgaagttcatgccaaggtggtacttgacatcaccagagccctcatcggaaggctcggcagaaccggcgaactcactgaagatggattcattgggctttcgaacgacattggacaggacgttgagacgaccacggtggggcataccgatgacgatgtccttgataccataatcgacactgcggtcgatcaaagccttcataccaggcacaagggtttcgcaaccctccagaccgaaacgtttatcgttagggaacttggtagccaggaaagcctcaaagctagaactccagatgagacggtcgagaatgcggcgcttgtcatcgacggagtacttgtagggctccgggacctcgaaacgatcacgaatccaatcgcaaggcttacggtcggggatgtgaatatactccacgccgtacgagccacagtagatcttttcgcaagcagcaatgatctcacggagagacatcttcttacggccctcagtagcgaagcggggaagaatacctggaccaaggtcaaactcctcatctagatcgcgctcggtgaagccgtaatggtccagctcgagctccttgggcttgctgtaaccaaaggcttcagcttcgccacggatacccaggggatcgatcttagccttgtggtgaccgcgacgctggtatgcgcgaacaagtagttggaccttcaggtgctttgtgacatcagtgccttgggaaagaccgagaccagcaccgggcatctcctggtggacgcccccagtgggcgtcggaacgagggtaggagggggctggaaggcctgggagattggcattttgccctcctccatgttacggaaatacgtctgccacgagatgtggacgcttgaagggtctttcctccatgcgacgtacatctcatcaatatagttggcggtgtttcctgagagaaaggagtcgctggcggcctaataatgagggaagcaataagtcagtcgaatatcaggaacaattttcgaaaaggacattcttaccacgccagaatcctcggcagacgaggcatagaatctcttgccaacaagggcgagaggtt

SEQ ID NO: 5582 - DNA, 3583 bp, Emericella nidulans
gggaccatatattatgtagaggttccgcttaatctgcagctttcctagctccaccaatccaccaatcgcagcccgtggtcctgttcacggctgaatgtacatctccagtcccctcaccccctaaccttaccaccacgcctaatcgcaaaatgctctcagggatcttgatttttaaccagaaaggcgagaatctgatctttcgcgctttccgcaatgactgccgcccccggttagccgacatcttccgcatccaagtcatctcgaacccgcaggtgcggtctccgatcctcacgcttggatcgaccacattcagccatgtaaagcacgagaatatctacctagtcgctgtgacgaagagcaatgcgaatgcggcgctggtcttcgagttcctataccgactggtgctactgggaaagagctactttgggaaattcgacgaggaggccgtgaagaacaattttgtgttgatttatgagctgcttgatggtgccctctttccgcttcctacaatctttatagaaacagctgaggctaatagtatcttcttgtgataaacagaaattctcgacttcggctacccacagaacaccgaaactgacactctaaaaatgtacatcacaaccgagggcgtgaaatccgctataacaaataatccgtccgactcagcgcgaataacgcagcaggcaacgggcgcgctgtcctggcgccgcgcagacgtcaagtaccgcaagaacgaggccttcgtggacgtcattgaggacgtgaacctgctcatgtccgcgacggggacggttctacgtgcggatgtaaatgggcagattgtcatgcgtgcttatctgagcgggactcccgagtgcaagttcggcttgaacgaccggctgttgctcgataatgatgcggcgggtgccggggtcctccaaccccggagcaggagggaggggagttggtggacatagctcgtcgaagacaagggctgcagcgggtagtgtcactctggaggactgccagttccatcagtgcgttaagctaggccggtttgactcggatcggattattagtttcgtgccgccggacggggagttcgagcttatgcggtatcgcgcgacagaaaacgtcaaccttccgttcaaggtgcatccaattgtgcgggaaattgggacgacgaaggtcgagtacagcgtagcacttaaagcgaactactcgtcaaagctctttgcgacaaatgtcgtgatacgcattcccaccaccgttgaatacggctaaaactacggagcggacctcgcagggccgggcaaagtatgagcctgagcataacaatatcgtgtggaagatcgcacggttttctggaggctctgagtatgtactcacggctgaggcaacgctctctgcgatgacgaaccagaaggcttggagtcggccgccgctcagtctgaacttttccctcctgatgttcacgagctcagggctacttgttcgctatctaaaagtctttgagaagagcaattatagcagcgtgaagtgggtgcgatatatgaccagagcgggaagttacgagattcggtacgtttacttcgagtgttcgtggtaggctgatgctaacatatatatttgcagattctgatcgagcctcgtcgttatctatcctctttatagtgctagatcgtttgttccagcttgctggttgagctcggtgttcggcgtttacggtaatatttaacagcataccctactccaactctcggagtacatgccaaatatagatactggtttcttcacattccgctatggctttcctcaaccttctgcatgtccagtagttaatacataccaaaccctcgtcactccggcctagccatggcatccacacctcaatcgtagcttctcccaaatcgtcgagtgcagcataacaaccaagtggtaaagaccgacgaaaagctctgactctacgcccgctttcctagtttgctctactgagaatcgccatccaggcgcaggctccattatcatgaaataacctagactatgtaaacaacgtgacttcagcaaaccgcatccataggacaaactcaagtgcgcagaattatgtgcagttgtctcattcattccataaaggcagcatcattatgcccggttcttacgtgccaaatctcctgtgtgccttgccatgcttaataattgggattttgtagtccagtccaaccctagttcaaggttccagacaaatctgaataaattggcctgcgctaggggcgactctgtatttattgcggcgtggtgctgcttttgagtaacttcagccctagggacagttaactgaatgtttggagtcccacatttctattcctcgtgataggactgtgggagttcgggttgataagggatttggtgctgagatattgagagacagagttacaatagactcttggctaactgttccaagacgacaagaacttgggatccatgggtatatatcctttaaagagaattgcgcatgcattagatcagaaatagaagcgttggaagtgaatgggagagtgaccggaatagtttgttaggctgatcgataggtagagattgaaagctagatatacagagtatagtacaattatttagaagatgtgcatggaagcacgaaagcatggacaaagtgaggtttgtaaggaaagcatgtccaggagcagtagtcaaacacatatcaacatataacacagagagagaaaataatagctagcaagaaccgggactggcccaagataaagtacagttaacgaagtcgtagatgtacatcggaagctaattgaaataaggcagattggtatcaaagcaacattcccgcccgaactccgaatataaaaagaaaataagagcaagacggcataattgtgaggccagagtgtcacatccaagcctcatgaatagccttgcgaactctgcgtccgccccgtcgcagaccaacattcccatctccaacaaggacctgccatcgttggccgacgcttgcatggtctttgcccatgcgccttgcgcactcgtcccagtcgcgctgggaaagctgaaatttctccagtacgagttgcacaaggcggtcatcctcgtcacttgtccattgactgtcatcagtgggagtggtttcgcttgactctgagctctgctctatgacggggttttcaattgaaggaagagctgcgtcggggttgtataacggcatcgatggtgtttgttcccgttggcatgtcgcagaagccggcggagattctgtaatgggtggcgattggagggagtagaaatccatttgggagaggccgaggggaagttcgtaggggaggtgtcgcgatcgtttgggtgtggatggggtttgtgaatcaaaagcgcaacctgtgctcgaactcccgtcaactacaacatccatatcttcctcaaatataccgcgtctccgcttagtaggccctctcgatggtcgcggtgataggagtttgtgattgtaggtaggagaacgcgagcgcctcttgctctttcgcgatgaagctggcgatggcggcattgggcggaacgtgagcgggctttgtagacgagctggtttcgt

SEQ ID NO: 5583 - DNA, 8004 bp, Emericella nidulans
caaagtgcctcgttcatctggccaattaccggggcatcctcggtagccgtgatcttctcaaagccgacaaggcagtatacactctccacgccctgcccaatctcaagggcggcgtcttacagttcagcttgacgtgaccgacaaatcctccatcacggccgcaaagagctacattgaagcgaccttctcccgcctcgacattctcgtcaacaatgccgccatctaccttctcaatcccacttcttccgtcgacgctctccgcgcatccttggacactaatgtgattggcgtcgttgctcttactgaagagcttcttccactgctcagaaagtcggcaagccctcggttgattctagtcagctcctctaatgggtcactggaatataattccgacccaagctccccgcacggagggacctgggcaatggagtatcgcgtgaccaaggcggcgttaaatatgctgcttgtgcagtaccatgctagtctaaaggaaatcacagtactcggcgttgaccctgggtttagtgcgaccgaagttattggggacgcggacgcgcctgaggaagatgggcgctgctgaaccagaggttggaggggagatcattgcttccgttgttaggggagagaagggtcagcctggacggatatatggccctcaagggattgtgccgtggtgatgtatagtgaagttgactgctatctcatctatccttcatctatctatggacgtccagtaccaagattaaaccattgattgaatacgttctcggggtccaccctggccttgatggctctcagttgtcccacgttttctccgtatatggtcgtcaggttctcgtcgccatgggcaaaattgacatacctgtctttgttagctctgagcagaagaatccatgcgggcaacttacacagccggatcatccagcccatcagtctcccaccacaaagctcgcattgtctccccccaagctatcgcgctattttccagcccctggtcatagtaccatggtatagcgacagcctggaagttgaccctgctccgccccggaaacgcggcggagtcgtccggtagagcacgggccctgtccagcgaatacgcttccataataacaacgctgttctgcgtctcttcgaccgccgtgaatgcaacatactcatcccacgccctcttccaggtctctggcactaacttacgtagggcagcagaataagccggcttatacccaccgctggtgcagaagccatctgacccatcattccagcgggcatacggcacttcagcagtctggtcttcaatcggaccgatgtcaagaagggatgcaaaagctgctcgccctcgtgcctcgccttcatcgccatagtagaacggcgtagcgatgaacctctgcgtgccgttcactgtcatgtagtataagaagatgttcatctcgggcgtgagagtcagatactctatagcctgcacgacggcctctacctgttctccgctgaatacaagctgtcccatccacgctgtgatattagtcgcagagtccacggggtacgccttgagggttgccgaagtgacaatcccgtagttagggcccgcgccgcggagcgcccagaacagatcatgatccttgccctgacggccaggcgttactgtatgcacttccccgtcggcaaggactaccttcaactccaagacattatcaaccccgaacccgaccatgccaagaaggttaccataccccccgcctagaatagcgcctagggtcccgacgcagttgcagttgccagtaggtatgagagtatcatgctcgactgctgctgcaaccgcttcaccaatggaaaccccgccgccaagggtaacctgcgtccggttggcattgaatacgaccgtattcaactgcgtgatgtcgataagcagcccgcgtctattgggtcccaagtcaaatgtgtccgcccagccatggcctccattctgggccaagaatcggattgagtttgagacgcagaatttcacctgcccggcacaagtacattatagtcagtgcaggccattttcacccccatcagactggcagatcagcgggggatcaatccataccgtctttgcgacgtcctcctcagtggctaccgacaccacgacccccggctggggcgcgctgtacgcgctccaacgttcaaagtccgactccacagccccaggctcggttataattgaagccagcgaggagagctggggcccaagttcttgtgcgaccacatcaggccacctaccggctgcccagacgcgcaaggtagaaaaagaaagggtaagggtgaaggtaagtaaaaggtagccggtcaagaacagcgccattataatgtctgggatggagatgttgtgtcctgtgtctgagcaaccttgcttggtgggcgcttttatacagaccaagtgcaaatctctcgtcggagattgaatacgagttgagcccacagaccattgctattcttgtctctcgataagagacaaaacgtgccgagaggatagccagagtcaggacacatcgtgatgagactgcccctctcgctcgtcagcccgatcacgggtctgattggattggttgcaccgttatagaccctaattctgctgtgtaaccctaccaaaggcgacaaaatcatgtggcacgcatgtgtaatataagatccatggtccttccttgtcagctgcgtaatgcgacggtatacggaaatgaacgttccgtaccgtaccatacggatgaggggggctctgaattgttactgacatgagagccatcgcagctaagcccttccgcccaacgtcagccgctgtacagagtaaaaatagggtgcagagtatatggtaatcttagtctttgctcctcctcatcctcctcctcctcctcctcctcatgtccgtaagcctaatctatcgctgactgtagatgtttctatcaccactacgaccgccaggatgcccaccgattcatactccaaagggctgatgatcgctttggggatcaccttcctgatctttccctgtatattcgtcggccttcgattttgggccaaatggcatcagcgacggagcttgcagtgggatgattttctgatatttctggcactggtaggcttgcattcgtctgagataggtgtttggtgggctctgatagtgctagacattctcgatagcgtgctcgattacccaacttataggtgagtccgtgaaatatctagggaaatgcgggtaggggtaattgaaatataggcgctatcgacggtcagctaggccagcatcagcggacagatgaaaacaatcagcccatcctagatgaccctcgttttctgatctatgagaaagtattcatccctacgacccttgggcctcagacaacgctactaactagaccagtgcaaattcgccagccagatgctcgccgtaatcgggctgggcctcacaaaagcgtccattctcattctgattcgaggcatcttctctgtttcgcgtccgtttcgtcatctctgcaacgctatgctctttgtcgtagcggcctggacgatttccttcttcttcagcaatctgttcacttgcttccccgtcaccccgctcgttgagccgttctacggcaacaagtgcatcaatggactggccatgtggtatgccggctgtattagcgatgttgttgtcgacctgatcattctcgtcataccgctgccgatgatctcgcagctcaaactgccactgaggcagaaggtggcaatcggcgccatctttttgctgggcacgacgtacgtctgatccttcctgactgaggtatagcagattgacaatgtggatagggttgttgtcattagcatcacgcggatggccatgtatttccacgtgggaacgacgttcagggaacactataacgacatgacttgtaagttacttatccttgtctctgcaaatccacggtatcatgcattggatctcattcgcgccagattacacctcccctgtcttcttctggacgaatatcgagatctctttggccgtgatcttggcctgccttccgactctgcggcccgtttggactgtcctctccggtggccgtgcaaggaagagcagtacgtatcgcccttatgatgaaatcgaaccggagaacagcgagcgtatgagacgcgtcaagcccacgctcgacactattgaccggctggaaagcagtattgcgctggtcaaggttcctgcgggaccgaggtaggtaggcaaaggcttagatctatattgcatatgaatcaaccggtggacccaggatggagtatccattgattgtatatctattaattagctcagttacagtcttacgattatgactttcaacaactcatattctttccatcgtgttgacttgaacgagttcatgtgccattagtttacatacgcaaactcgtcagctacacccatcaagatgttaacgaatgatcccaatcccaatttgctagccattcccacctcattccgtcttgtgaggaaatattcgtttcattgaccggtctactataattcgcaggcttctctctcaaatcgccgtctcgcctgagcgtattagtccaggattttgtatttgatggcccagctagtgagaaacaagggcccaaacaagtggtgacgcctctgcagatgtcgagtagatcggtagacatgtgttcaaaagtaagagttataatgagacagctttgtagaaatactggggattaagacccttatctaatattagaaaacaatagtgtggaccggattcggcccattgtaccgtccgcctgtcacgggcatcccacttccccttgtagcatagcgccgatctctcggatagcgtggatccttgccgcttttagtgcaaagccctgccgcctccaagctgctgttcatctactccattggagtatatacaggcttgacttcctccttgaatcacgtaactttctccccactctccctcttcccatatcacggcacgtgctccgccatgttcttccagatgtcatttcacttgactcgcatatttagtcaatgtgaatgcctaaataacaattaaatatcacaatagcagacagctcaatgagtcatgcatcgaatccacacttttttttttctatttgagactttgaacctgccgagacatgctaagacgcgctagctagctctactcctaggagacctcgtatttcttaatcgcgcagttatcttgtgcttcaatcattggacagcatgggtgatcgacctcgtgttcgtgttctgcgatgtcagctgctgatcgaaattagtgcggctttccaagagctgtccaggatgaggctcgaattaagagcagcccttcctccgtagttggaattgcgcaactgtggaactcgtacgagaacttcgatagacctcgaacagaccgcgaatagactgtcctgcgggtgtagctagtggtcaagatgtacaacgcagtccatccgcaagaggcacctcaacagatgccccagatccgcgcgatgggctcgggtggcctccccgatcctcctcccaatctcggcgactgggcctgtgcccctaagcctcacactcgccagcgacaacctttcccctaacgcctcgtcggccttcagcatgatcccaatatccatggacgttgaggagggcgctccccagccggagttcagggatatccagccctgggacttaaaacaccccgtcgccgtctatgcaaacagagacggcaagcagctccccgtcttctatgacgccgcaacgcaagaatactacctcttcacaatcgagggcgcagtgttactacataagacgcctacaataacgatcaagaaaaggcaagcccgccaagtcctcggccggatttcctattcccaaattcggagaatcactgaaaccgagcttgcggagagtatcatgaagggcatagatcttcctctctcaagctcgccgttggtggatagtgtttcgcttttaagaaatgccatgcatgactcaatcatcgttacgaggaatagtcggcctactacgttcttccggttctgggaggataaggatgttagggactcaggtactttgggctcagacagcttgttgatgtatctgaggccgtcgatggatggacttgttgggcatagatgtgatgcattgtggcattgtacgtctacactactctactggatctccgttcctacgaaagcttccactctcgactaacaatgatgataaataggcgggaataatgtcatctactgctccaaatgcacctcctaccgtttaccctccacctgtcctacatctggggacgcagacaaagccgataacacgctaacctttggcccacccattccggtgggccgagtaacagtaggagtccatatcacccgcaaaatatttgacgggtgtctccgaccagataagaagggtctcaatatccctcatgcataccagactctctccaagatctttcacaagcctactattgattctatcccaataccacagacttatatggtttcgaatttgctcaaggatagtctgttcgttgttgccgatatgttcccgaagactgcggctgaaagctgggcagattactttgatgttggtggtgagcatgcacagcaggggatgtccggcatgacaaatgctgcggtgggtgtaacagccggcagcgcgattattgggacaggtgcgatggttggcttgagaattgcggaggtagtgggggtgtaactcatcctagcggcaagagcatacagccgacggccacagaaactaaagccatttgcaaccgggacagctcagagaaaatgatgtatcaaggatgtgaacgtaggaaacgtggtaagcgatgctagatgactgatgcacccaataataggcttagttgtggttacgaagataagaatcggggcagtgggaaatactgctaggatggctctaccatagcacgcgccaagcagagcaactgcttctgaccgaccgaccagtccgtagaggcaaattccgcctctagacccccttttgcgcggatctgatcccaaaggtgtacttttccaagagctttgattatatctgcatccccagcgacactctgatggggatccaagttgacgcggagggtggtgccgtccataaagaatggatcctggagtaccacattgatgcgtgagcggagtgtgcttttcgaaatgctgcgatgttgcatccgtccatcagtatgcgtccggcctggacgcttagcatttgtagtatcgccataaccaaggaggttttcccactcccggacggaccgcagagggcgatcttctctcccggtttgatgctcatatttaggttcctaagtatggggacggttggctgactgttatcatggcttagcctaatttccatatgagtaatgtaaccacacctactcgtatccagcagtgagaccagtgatctcaatagcacctctgtcgggccaatcatgcggtaggcccgactggacaatggacatgcattgttccttttccgaaggggtatcctgcgtaaagcggagcacacgtgtgacagcgccgatggaaatttcggtcattgtccacatcttaatcgcattagcaaggactggttgagcgtcaagatgagggtaagcgccacgccaatcgctgcggcctggaaatgatcgcgcaaggatgcaattatggcgatcaaaatgaccgcgacagctccgacaacaaggtccagcactaatgttagccattgctgtacgctgtacatcatgtaaaacggtctttgagaacggttcagaagagcatagttcttttcccgtaagtggggtccccatttgaaggactggatgctggatatgccgcggattgtctcgagaaagtgcgtgtataaaggggcctctgcctcatatgtaatactcgtacttggcgggacgactgaggtcatcgactgatgaagacagaccagcccaggaaggatcggacgcttgttttgcataatcgatataggggttatga

SEQ ID NO: 5584 - DNA, 2903 bp, Emericella nidulans
gtcactcccagtacccacctccttctgcagaagagatatagccttggcgtctaattgcattccgaggtcctactttcaactatagatgtggggaaatttccttgctccatccttcaggcactgtattgccccattataccctttatcctgcttgagtgcctctttccacatgtcacctttctcacacagctcgcgtggtggctctccggttggttaaagggtggcaactaccatttttcccaagtattttttactaaagagttgcatcgtacgagacttgaccctgtcatctttatcatcaggcatgtcttggtctctccgtgaaagtgcatcagctctctgattggctgaccctttcctatatactaacttgaagttgaaccggctgagaaataaggaccatcgtacgtgccgctctgtcagtttccttggggagaagaagtactccaggttcttgtggttggtaataacttggaattctctacatgagcgcagttcagcatcccaggcttcaagacattgtacaattgcaagtagctccttgtcatagatctcgtagttgcattcagctggggaattccttttagagaagtaggcacatgggtgcaattcccctttttcattatattgagagagaactcctcctatattataacctgaggagtcagtctctactactgtacagtaggaagggttgaaggttgctaggacaggtctagtaatgaacttttccttaagtagatcaaagctatcctggcactccttagtctacaagaagggtgttcctttctttgtcaagttgtttagtgggcgtacgatccctgagaagttagggatgaacctttggtagaagttggcaaagcccaggaatccttggacgccctttatagtagtaggggtttcccattcctttattgctttcaccttctctgggtctattttgattcccttccctgcctgtattataaagcccaagtactttgtctccttgcactcaaattcgcacttcttaatatccaaatataggcctgcttcttccagtttcttcaagactattcatatgtgcttccggtgctggcagaggtccccattggtatagacaagcacattgtcaatataggctgagcagaattcatctagatattcccggagggtccagttgatgtatttttggaaggtactcagtgcattagccaacccaaaaggggtgactagccattcaaagagcccgtatctcatatggaaggcagtcatccattcctggcctttggctatgcagatcttgtagaaggcagcagacacatccagcttagtaaaccatctggcttgtccaatttggttcagtgtctcatggatcaggggcaatggatagcagtccttcttggtaatagtatttagagcatggtagttgatgcagaaccgcagtcctcctcctggtttttgtacaaagagtactggggctgcagctggggaatggcttacacagataaagcctttctgtagtagttcagagagtgttttccagaggactattagttcttcctgggtcatgttgtaaagggggccccaggggacttcaggatccttcccactctcctcccatatgagctcgattttgtgatcaatcccatctccccggtgcggtggtagttcttcagctttgtcttgttcgaagagccttaggtatttccagtattgccttggtagctttgtacaggggtcaatatgtctctttggggccagtgccttctgtatatctgccaatgagaccgcaaatatctcgatatcttggccatggcaccttttcctttgtataaatcctcccatggttgcagctgatatctgtgctatgtccagctttggtaagggcctctttgtagtactctatagacagactccagtagtacagaggtacagcctgcccctcttagcctctaaccttccatcatgttactccagccaggggagtcccaagatcaggtcatagcccaggttatcaggtatcacatagaagtaggctcctttttctgtatgcaccctgatgtctagctgaacctgtataatcttattaatctcctctatattcctggtcactcccttgaaaggtttcgggtggataggtatagtaggtatttaatgtatcttgacaaacttgtcactgattaccccataggtcaggcagcctgtatctattattgtacgagcattataggtatggttgactagtgcttccaccaagaatgggggggtattcatgcgcgagctgttaaaatcttgccaatcaagtagtatttctctagctgtataacccctctgtacgcgactttgcacagaggttattcattttctgactcgctcttgctgtagtcatcgatttggtcttgttcttcctggactgtggccacctgcctagggcgtctggtaggttttatagggcactcttgtacaaagtggtcaggatcgccgtagtgtaggcatttgcccttggacaacctcttttgcttctcctctgcaggcgcctgactagcttttcttggggtcctggtccctttcatacagagggccgcaacttccttttgtagggctgcaatttgagcatgggtggcttcccagtccatttaatcaggggttccggtccggtcagagcctcctgctggtcttgtacgagcgacatgcatagggacagcggcgtgagatccttttcatgtaagcctggccactctctggaggttgtggttgatttcgcgcagttgattgtagtagttgtcgtacgaatcctcctgcctaataccaaccatggcttttagcaactcaacattaattgctgtgtccaacaaggccttcttctggttatcatcccaattaatccctccagcattaagaagttctttgtcaaattcatt

SEQ ID NO: 5585 - DNA, 5661 bp, Emericella nidulans
agaaaaaacccaaatttcgaggaatttcgatcgaggcaatattcaatggatcagtttatgcgaaagctctcggagttcagttatactcaacacctgcatcgcagtaggcaaaatcatccaaattgacaaattgcggtttcttttcagctccaacgtgcttaactacggggttccgcgctccaacggtcggttcttgaatatgagactcctcgttctccttgttatcgggctggccttcttcaccgggctccttgtcgcaggcgcatgaaggattctgaagctcgacttcatactgctggtgcgtgcaaccgggcttgggacatgtctctccgcaagatgtaaacacctgaacgtcttgattaaacgattcttcaggattatcatggtctttttctagttcagcatctaccgcggctttcccgaagcgctccctcgccacggccataaacgctgccaggaagtcttgcttgaaaccgtcacaataaggctccgaatcatggtcatctgtcatttctcgcgcaggtccacggttcctgcgcttctcacgaacgcggtctaaatggtccacaagcgtctgacagttgtcgtgggtacggcacatatcagaagggttcttggagtcgaacttgagctctgccggggcaaagtcaggcccatcgataatttcataggacggtcccttgtcgttatcagtgcggggaagaggacgataacgggggactgcgatgtactcgttaggcttcgcatccagcatgaatagcattttctttggcatgatgccctggttgaagtctgtgaacgccttcatgcgagagctcaaacctcgccttgtacccccaaatcctggcatactggtcgggtcacgataccaaccttcgacctgatgataaatagcgccgttaagtccttcgagcacgaggtacagctccctcgcttccctgagaaaacaccatgctcttgccaaatcagtgtggtgacccgcaatcatagcacatttgacccagatatcggcaactcggaagtcttgtacgcgcattgccgcgagatggtcgagcagcatagacgcatgcaggtacgcgatagccggtttattagatacgatgttcgggtcctcgattcggcgcttgaggcggcggtagtgacacatggctttgtcggctgaaggatgcggcgtcgcgcagaaccgacacgcacatagaaagccgaagcggcgattcatagctgctcgcctttctctggccgttccttctgtctgcatgtatgcgatactgatctccacgttaggcttgatgtctgcacaagcgcggacgaccgcttttcccaatctcggcttcttgtcgtagcaaatctcgccctttttgttcgtgggatactcgttccggaaccgcagaacacagttcggaatacagcagtgattcaaccaagccaggttcaaaccaagcacctcaccgacgtttccctcccacgccgtaggcaaagcatgctggtcccatattgcgccttcaagaccaagtctgcgctttctgatcgcaaagcccttcttcttctgacctttcgcgagtgaaaggaactcattgttccactccggccccattctcgccgccttcgcctgtagcatcgcattcgtgtctccataagacttgcacttcttgtgctcacctgaccacaaaatcatgagctcgtccgcaataataactgtaccagcaggaatgtgctttgtggccaccaaaccaaagccgcttttatcgttaatccagcgcttttcaaagcagtccgagacaacgggctctcgcagatcacaattcgagagatcctgagcacgagtgaggttggcggcggtgagctgctcgtgtgggaggtcgaccgagtgccagttcttgttgccttttggggctgagctgttcacatgttcgtcgacaaacggtaactgcaggtactcaggcggtatatcagccaatgaatctggcacgtttgaggttgaagggcgaggcatttctgacggcattggtattcccaagcattcaatcgcagagcgagagaatgagcgaaggggagaaggagaacgagcacgaggggcagtgattcgtagacccagtaggtctgaattctgtctgagaataagtgcaccaggcttcgcttgtaggattaacggtccggtcgctgctcctaaatggggcccttggtgtttggtaacactagttttatcttcctcgacaagctcaggtgtaggagcgggtgaagatacagaatcagagtcaaaacccgcctcaggctcagactcagacccggatacaggagccaattcagagccagctgagatgtgttctttgtggacttgatcctcgtagtttaccaacagtggactttctttctggtctccgctgtggatttgatgtccgtaacggtcgtcactcttgatgtcggtattgctcccgggttcagagttaaccaggttctgtctgtcttggttttgggattcaacgaggagaccttgctggctgttgatctgatgctcgctcgagatatactcttcgtgttgatcttgactctcaacccttagacccttcgcaagcataagagcattttcagattcgatctggcattgtgcgtcttgtttttctttgaccaccaatggatcttcaatctgggattcaggctcgagattggtctgactttctctctcgtccaggccttgaggcttgctctcggctacaagctcagaagtagacgaagagactgactcaaagtcagaacctgagacaggatgatgctcaaggttggatgccggagtatgcttaggttcaggtagtaacacaaacacagatgcagattcaaatctggagccagcgtcagaggtagacgtgccgttcacgacagcttctaaatcagcttgcgtagcttctgccttgggatcacgatcaatgtcagccttagtgttagtatccgcaggctcagcaggatcggactcaggttcactttgttcagggttaggacaagcgttgccttcaaaacaactagcggtagcccctactatgaagatcagaagaacaagttagccaactgaactagatcaaatgtagaagtgcatcagaaaagaaagaaagccaaggcacaaacacaagcacaaggagagaagtaagtgtctttgcttgcatggtcttttaatcatatcgacggcgaggcagttaaatggagtgaaggatactcacgtgactctaagaaacctaacagcttctgcatggtgagcaggaggaacaactcgactagctcactaagaagatcgttcttgctgagaacgctcagatgaatcaattcaatagcgaggaggtcactccaggagttgacgcccatgctggcggatatgtagaggagctcgattagattgttgacgagtgtcatgtggaaaagggtatttgttgggatggattgaggaggcgggaatagggaaagcagcaagaattacgaaggcgaagggaaatagaagatgaaacggcttagctatgaagagacgtctgtttatgaccgtaggaagtgaaaagccttgttgggctattatcggtgtcttcaacatccaaaggacggatatcgaagacgggagatggaatgtgtttggaggaagaggaagaggaagaggaggaagaggaggaagaggaggaagaggaagaggcagagagggatgttttgagagaggagaaaataaaatgccaattgtgaagctgtgtgctcagcatcgtagcccacaacgacagaagcacaggttgtcaacaagtcaggtggtgaatggcttgcggactcaaaaggcaaagaaagaccaatcgtaaagaaacgtaagcatgaaggctcaagcgacaatgtatattaaagctgacttttggattgcccttactatatgctgtatttaccatatatgccaaccacccctgtccgattaatcggcgaccgaatgctaccagcagacaagcaaacaagtcttttgtacttaaacatattccaacccaaaagaatgaccatccgcccactcgaccatgcaagtattcatgaagcagcagaaaagaggagaaaaataagaaatgttagactggagttggcgtgaggtaagtctatcaatgaggataacgaaatgcgactgaaggtggatagacgctgaagagtaaccaaggaaaaagaaaaacgaaagggtatagatgtcgtcacaagaacagaaagtcatggtcgactggaaggaaagtctttatgcatggatggcttgtggtagtgttggtgttgggttttcatcgacggtggaggagtctgggagtggcaccgagcgtagactgttatgaacgttggttgatggagaggaaggttcctgtgataccgtggagacagcgctctcagaacgaactgagcgtctatcgagtttgtcttcagctttctcctctgaaagcctaaccgggatgtccagtgatgcccgcagtccggaacgggtcgactctccaccgctgactaaatccgtgtctgatgctcgcggctcctctgacggtgtgggttttcgaagcttgaggcgctcttctggcggcatgttctgccagtcagagccaaaagtcacaatcgacgccttcttaccatgcacagtgaagctgccgcccttgcgagagagaccacctgcatcgccagacccttgactgtcttctgcagctgtaacactcggcgcggactcgcgtttctgccccggtcaatgctgcggtttgcctcagtctgaactggataaatgctctctcttggatcgatgcggatgagaggctgcgctgacgctgcagaacctgactcgaccagtcaaagtaacgaggcagttggcaggtctcatgccactggcattgacattatctgcgcatattcgcgcattaatacccctgcccagttagtcttgagtttctatgatcgtttgctcgggaacagtcggtacgaatgtagcccctcgcctgcccgtcagttccgcaactcaatactttatcccgaggtcggatactcacttatccctagtatgatgcaagagaaccctgatagcataaccactgatgcaaacgagacaataaaaaacgtcaactttgaacgaaccgtcaaaatttaggcaagatatggcgccataaatttttttcacattaattgtgtttacacgaatagatcagattttggttgggctaggcttggtaaagaaatggaccgagaacggtagaacagtctagcctacgccttcgctcggacacgaggtgcgtaagcaccaagctcgagaatgaactactagggtgtcaaggtggattattgctccctggtccccacggggccacaaacgtagatcgggatcgacatactaatttagtcggggcgtttctcctcttgcgacattctggacttttgctggtgtcttaagattctgattcatgagtcgggagaccgattgtcaggacatccaccgtgtctgagaatgtaggtactcctgcagaaaaccactcgatcaagtccaaacggggagaagatcgcctcttctgattaacgattttcaacagcgcactcaggtagtaaaacagacttgatttatcctaggggtatcatggcgatattgtacattataagaagtcagagataagtgccggtcatcatttatctataaccatcgcatca

SEQ ID NO: 5586 - DNA, 4698 bp, Emericella nidulans
aattcatgtcgttcaaaccgaaacatttccgaaaggtgtgcgaaggttgggacatgaggcgtgaccttcgagttgatttcgccggaggcgacggtcgtggtgccggtgaatccttcatagtgattcaacgtggtgatggtgaaaatcagaaagcctctattcgccggtatactcgcaagcttcggtcactccatttatcaacatccccctctcagcctggtactcctgcaccgcgcgctgcgtcgccctccatatttggagggcctgttgtctctccggaagtttcatcagccacaagcagtatcccatcatctagggcgtctggccaaattgatgaacctgtttgttctccctcaaatacggaatggtacatcacagacttccacttcgaaggtcgtaaatccgtccaaatcacgacaagcgcattggacctttcaacctacgccgtgttaactcctgatgaagatctcttaatgtcaggcgactctggtgcttcctcggccgtgtcgtcgccgcttccgcatatgcaacgatcatccgattctgggattccggggcagcgtgggcgatacatggctgttggcactgctactggctccgtttttgtatgggatattcgatctcccacttcgaggaattctgagatcattaattctattgctccgattcggattatattcacggagtctccacgagtgtctagtgtcgcgctgacatcgttgtatctggttcatggtggaaacgacggactagtgcaggcctgggatcccctcgcttccactacccgtcccattcgaaccatcaactcgcgattttccacacgggcacgtcgacgcctaattcaagccgaagcctctcttcatggcgttgggaacaacttttatgcaactggcgctatatgtcttgatcctgatcccactcgtctgagaggcatggtggctttgggcacccaccttcgttattggtcctacagctccaccgcggccgatcagtataagagtaacaaacgtcggcttcgctatggccaacggggcggcaatgcagccgctggcggccagcgattcaataatagcggacgcggagccatcaacgattacatcgaggacgagaaacgggaaatggagcgacaggcgcgggctgacgaaaaagagagagctcatctgagcaaccgctttggcatcgatctcctagggccggacgtcagcgaggaggaacttctcgcgtacgcacagttactgagtcaggaagcctacagcagcgaagcgatgaaacgcggtgactcggtgggagattctgtcataagtacttcatctagcgacactgtggggccgaatgacagttcttttgctctcgatgagctttcctccgcctcttcaccatgtgatgatactgttgatgatttggacccagaaatagctgaagcgatccgtctaagtctcgaagaatcctctaatcatgggcggttcgaatcaccctcacccttttccgtcaagtactcgattggctccccatcgggtaagagcgcatcatctcctgccaagcccacgatcgcagaaagcagccgacaacaggagattgacgatctcgatttggctatccagctgagtctcatggagactcacggcaatagtgaacatgatgagcataccaaccatcaagaggaagagttccctacgcttcctgcagggccattcccagcttcttcgaaaaataagggcaagactcggatggtgtggtgaccaccctctgaccttcaataatggattctttgcgggtttgtttccttttaattgattctacatatattgattcactttagttgcaatgtaaggtcaaactttagggcttccaatgcagccatgaacatattcaagctggtaaatagagagatcatacgaagtagattatcttacattatcaatacctcctcgaacatgtgatatcgaaccgagaaaaagaccgatggctcaggcaggtaaccagcaccgtttgtcgtacggtcgctcttgcttgaagttactgaatacccatttaggtaacttaaccctagcttacaccttccgaccacagaagtactgttccgatacctagtacattactagtcgctgtaagtataaggtttagaaaactctccggaaaagttaggagataggatttactagtcttgaagggaagaaaacatttgagaagtataatataggccaagcgagacgttatctaagaatgaaatagatacaggtcaaaggggtgatgagaggaacagagaagaacctgaagaagtcttatgtacgaattgaggtatgctggctatctatagcatgaccaaaccaaaaagggtagcggcaatagtagctaggccgacaggaatagcgacaatgccggcggcattgtcatcatcgccggagtccgagtcgctgccagaattggagctggagccaatagagctggagccgggctggttagactcaccgtcggcaagaacagtcagcttgaggccggtaatttccttgccgttgtggtcgtagatggtcgtggaaacctcctcagactcgacatcaacgagcttaccggcgtcgaccttggagtagccatagttgatcaagtcctggacaccagggggcctttgcagggagggtaaagttggagctgaaggtaccgttcttgatgaggtcggcgctgcacttgatgggcttgacgctggtctggctggcgttggaggcggaaatgcggtccatgtcgagcttagcgtactgagtctgcaggttgtcaaagtcgacgaggagggtgacggtgtcgttgttgttaatcttgacgagaccgtagtcgttctcctcctgggtgtactcgtagacaagaccaccggagaaagtctgggtcatctcttcgccatagatggcctgaacctcggtgaacttacggggttgaacttcattgcagccgtactcggagaagaagacagggatggtggcttcagacatcatctctgtgagaacgtcgtagccggcgctcttgtagctcgcatctccgcaccacgagtaagagttcagaccaaagaagtcagaggaggagttggggtagtcctcgtcctcgcacatgaaatagttcagggtgtcctcaaggatgggacggacatcggcagcagagtaaccgacagggatttcgcggtcaaggtgcttcgagatgtattctttcatgtcacgttggacagcctagtgccgagttagctttggtatttctagacgggaaaaaaaggtcgtgccacatacgcggatatactgagggacctgctcaacactgtcctcattgataacctcgttaccagcaaagaacgcaagggtgttggggtagtccttgaacgcctcgataataccaaagacttgagtgtaatagtccttggtgtaggttgtccagggagccgtacggtcgatgtagccagggtacagaggcgagttgacatcgagaatcatgtaaataccggcggcattgaaaatagaaacacactcatcgtggttgagtttcggcgacaagttgtaaatacggatggtgttcacacccagttgctgcataagggcagcatcacgcagacacgcttcgcgatcagacagaggatcggatttgccgtcaacggcgttggtaccaccgggctggtagctgttggatggcaaaggacgatcagcaccaccgctttctcaaccaagtaacgagatcgaatatccttgaggagatcttaggtaggtaaatccttactcaacaccgagaatctggaaccgatcaccggtcttgctgttgacaaagtcctttcccttgacctcaataggagtaactgcgcttgcggtggttgcgagcgcgcaggctgcagcgaggatgcgaccgtatgtctacctttgttgtcagttcaagttccacattgctcaaccgggatcagtagagagaacgaacggggatcattttgtatgtagatgagcgattagacgcaacgcttccgtaacaattattaacgtggatttggtaagagactgtatagggctttcccccggaagaccctgaatttcaatacggaaggagtgacggcggtgctgatgaccgaaaatgaacgagcgtggtatatcaacagatggtaaacaaacgatcgtcagaaagaaaaagacgttgaagaagcaatgaggagaagattaagagagaatcgccagaagacgaaccaaccgcaaattaatagagcgcgtttgatcggccgtcgactcaaaccaacaaggcggcaagcccgaaacgctgggcaggaaactcagccgtcagcacgcagccattgattaaacgagggccaaaactagggtgctgggcggggggaataggagggtccagcgatccactcctattaagacccctgaaaggagacgggtcaattggcgcttggcagcatcaccttcatgaatcatgatagctattgtgagaccaacgctgagcagaatccagtgatattcgcagtccaactgggatcatgggagcaccaaagaggaaggactgaagtcgcagtgtaactgttgatgcggattgaacctagactttcgcttagtcgtggaaccacgtgagaacaacagtgtttatgcacaattttcacaaataaacataatctatcatgcgattttctccctgcaactacaaaggttctagaatacagcccggctccctcacagggcatcc

SEQ ID NO: 5587 - DNA, 4590 bp, Emericella nidulans
gggcggtctattcttagctcgtcaattgttctggcttcatatttgaagccgaaaaggcgaggaattttgagactttgacatgccgccagcagttgagtcagcaagactagtagatgcttttccaccgtcgccattccgttaggggcttattcacgtcttaacatgcaggttatcagcatacgcaagactcaaagagggcttcctcggtctcccaaccctcctcttcacaggctttggtttaggcttagacttatccacggtctcaacatcttgcactcgcctgctagcccttttgacggattccatagtttcaaaatcagacgtatcgctcggctcggcaggctgggtacgatatctcgacgtctcagccctcttgacgatctcgaaagcggagtcgtcagggtgggtggttagcgcgctcttggatgtttcagccgagacaggatttttggggtaagtcttcgttctttgcagtttccttgtctctgttacatggcctacattgcctgcaatctcgtcaaccgggtcggggtcctcggacggtacagactcttcctttgttcgtattgaaagattgagctcgtcgtgtgccggtaatggtggaacagggtccagagctctccgttttgcatccatgatcacgaataattgatagctggcgtaggcgtcggcggcggcatctgagaggtagattagatgttgcacttgaggggagaaatttcgtcatgggggtcctaggatttcttacaatgagcctgtggagccgtgatgggcttttgccagttactgcaccgtacgctgattccttttgccagtggaagccccaagtgttcttgcacctggtcagcgaggcggacgcgatgtttattgatcaattgaggggtggtgtggcagtacttgataagtttatacaagtggctaagctcaaaggtaccacgagcgttgattcctagatatttccgtaggcgggtacagtctgctctaatattaactccagttttggtgattcccgggttttccacaatgcttttcagttttgcgggcacgaggtcgtcaagattcaggttaggcataaaccgggctatgtggaaaattgcaattctattgcggctcgctagctgtatggtcgaaatgttctcttgaatgctactgtacgtagtagctgcagcttgccattccatatcgaatcctagaacggtctcattcagaaataactgtgccaccttttcggcggtggctagagatttgcagtaatgaaccgtgattgggtttccatcctctgttttatagagcctgtggctccagtattggcatgtctctttttttgatggctgcgcaggcgacgctttgtcctgcttccatggtgttgtcctgatatttttgttctgtaagacgttctggctagagtcattactgtcaaccgcagcgagcggtattcgagactcagaccgatcactgaacgatcgtttcatctctctagtagcggctctgctgtgtttcccggaccctttagaatataggattggatgaggacgataacactgcgttcctgtggattcacaatatgaaagaacttgctgaaacagacaatcagaatgctgtcccgaagttcgtttcagaaagctagaatagaaggccatgaagcttttagaaagggccaaggatctgactggcagaagctagatggtggaagtgtgagctggatagccagagaaattcatgcaggcggctgagttggaatgaaggtctcctaagggcctgagcaggaaatgtaggccaaacaacagaagtcttgcaacaaagtctgatcaggctctatacacaattacgcaggttgagccttgtaaaaatagaatgttttataattataaacagacttggtcgatggccgttgtagagcatgaggagtagattcccggaacggataaacatgggatcctcaatgccaagtctcgcattggaatcgtccatccaaggctcaagatccaccaactacaaatatcatatcccctcggctttatacaactcgcagaaggttttctgttgggaatctcctgcatatcctaaaatggcatctcaacttctccctctgggtatggaactgcctgtattctgtcatagatacccgctaactgccatgctagaattgattgacaagtgcgttggatctcggatatggatcatcatgaagaacgacaaaggtcgacttattcttgcatggcaatagagtacgtactgacatggacagaattctctggcactttgctcggattcgatgactacgtcagtaagtgttaactgcaatctatcaatctgcgagattttggctctaattccttttagatatggtattggaagatgtgaccgaattgtaagtgttcttgtctttcagctggatagtgctttttgttctctgagcgcgctctattcgacatcacattgtcaacctctgaactaacatctggatagtgattacactggtgcgcaggtcaagctgccaaaaatcctccttaacggaaataatatctgcatggtaagaatcttgcttctgtgacactactaaaagactgactcttgttccagttaattcctggtggtgaagggcctgttggtagttcttgaatgaagttcgacaatctcatagtgatgcaatgacaacttaccacgactagcgatgacatacttgtaatatctttcagattatagaaaattaccttctcagctgcgctacatcatatccagaaatgttgacttgactttcggcgcagaccaagggatttgcatgtttggtgtttctcgcttgctaggtttttggtttgcagcattgccacaataaccctaggtacataataacctgaaacagtaagaggaacagaaactcaggacaggctcattgatttggcgggaaggtggtgatatttgaatgagtggaagcttgcaacctcggggtctacccagaagaagcctagcgatatcgggaatagcgcttccttatcagctgagggacggccactcaaaccgaccattcccaaccccagtcacctttaatttcgctatctcccgacgagatcaccctgccacggtcaggtagccacaaccttcacttatggcattccgattctctcatccatcatcgggattacctcctcgtacactgtattccgtgcggcccggatgttcgtcagactctccatattatatttaggctgagcacatacgataagagaaggccttaattgaaactcctgtattgatcccgcttgttgttcatcctcgtaactcctctggcgcttgtcactttgacctgctctcgaatgcctgaaactggcgcatcaaaaaattcaacggtggaagcgaagtgaatgagtacaatggacaaagactttttgaagggcaaccctgaacgctcaacatcatctgactctaccccagtctatggcgagtctacatccagacgcgcaagcctgggacagcgggttttaggaagctttcaaagagacccaaatgcccatgtcactgctttcgcgtcattttcggatggcaaaacatatgacatcgaaaatgcgacagaaaaggcagccaactctccgctacatcgtagcctaagaggtcgccatctgcagatgattgctatcggaggctccatcggtatggacatgttcgaaagtctttatgtggcactgctacgtttcagggctggagacttcattatagatgctgatattgtatacttctgttaggtaccggcctgttcgtcagctcggggagggtccttgctacgggaggcccggcttcgctcctcatcgcatatgcattgattggatgcatgctctactgtgctgtacatgcccttggggagatggccgtgatattccccgtggctggttcgttcgcccactactcgactcgctttattgatccggcctggggtttcgctatgggttggaactatgctctccaatggctagcaattttacccttagagatcgtggcggctgcaattaccgttgattactggcaatcgaccactatccagcgccgcatgggttgtcctacacatgttcgtcaatagaccctaatctctttttccaacttttaatttgatttagagttgcagacctgcttgtttacgtctatacaacatttggttctttgatcctttctataatcttttcttacatttttactagtatgatattgtcacatttctgactctactttgcctccagtttgaatgcctttccctatcttgcatttatccttactctctatatttttctctctaaactttcactccttcttttttttcctcctcttctttttactcctttcctgtctattaattttttctttatctatcttttatatacttcctatcataattaccatttcttttctttgttattttcttatttaaaaacctactttttgtagtttttttatttatatctccatctctcttccttactacacaatgttattcgcttattctctctatctaatattctaactttacttctctattatcttatttacattctatccatttactacttattatatataacatctttccttgctatcttccct

SEQ ID NO: 5588 - DNA, 3027 bp, Emericella nidulans
ggtcacgatagcgccggcgctgtcgtacaggtgcgcgatagtgtcacgagcatgaaagtcggcgatagggccggtatcaaaccgatgatggacacgtgtggagcttgtactagttgctggagcgacgaggaatcatactgtgcgcgggacgtgcatactgcgctgacgattcctggtgtccatcagcaactttctggtgggcgctcagacattagggttattaacatcggaggtgctagcacttaccagcagtacgtcgtttctcccgcgcgatatgcaacgcctatacctgaggggatccctgatgagatcgctgcgccaattatgtgcagtgcgtcaacgatataccgttcgcttgtagaatcgaggctccaggcaggcgattgggctgttttccccggcggtggtgtatgtcgctcttatcatatgagtatgcctggtctccaggactgacagagccagggtggtgtcggcattcagggcgtccaactggcatcggctatcgcatgcgccccattgtcgttgatactggcgaggagaaaaagaatctagcgctcaagatgggcgctgaggccttcatcgacttcaagaccgtccctgacgcagccgcagccgtggttgaaatcgcggacggcataggtgggcacggtgttttcgtcacagcacaagctgcgtaccccactgcattggcatacctgggcacccgcattggcggggatttgatgtgtattggcattgcgccggccggaaccatgagtatccccgttgaccctaacttgttgctcttcaggaacacccggatacaagggacactggttgccagtcggcatgatacgatcaaggcgttggacttcgcacgcaggggtaaactaaagcagatctgtgaggtttggccggtagagcgcttgcctgaggctgttgatagactgaggaaggggcttgttgcaggaaggatggtggttgattttaaccagtagttactccgtgtacctgaacgcaatccagattgatgcttctctgtgataaggaccggtagaagccgagtattgccaagaaagctagtgtgatgcggttagaagagatttctatggtactaacgtagtgttggcagcttaccgaataccataatgtcatattgcgttcaggatgagattttatattttgaatccagagtggtcatctctctgtagaatgagagcggcagggagagcaatatagccattacgctgacatgacactatgataaagacgtttattgaacaaattgagctgtggtgtacaaaagatgagcatgaggtagaagggccgacatccaactggtgaggcagctcctgccaaaaatggacgcgacgtcaggtgacctttttacctaacacaagtgctcggttcttccatctggctcctcttctctactgggaactgatatcgtggatttctcatctagtatagacccttgtcgcatgaccggtatcattcatttcatttcgtcgtgtctacttggcttggccctatattcccgccaaactctggctgctgacctgcgagaatagcatgaccagtatcccagcttctaacgagtacgcttgtttccaaaaagacggcgaatgcgtctccttcatcgcagccggtagcagctctgcaacatgtgcattgacgtgcttcttccctccgcctgcattcttaatccaaccgccatcgccatgaatacatggaagcgagccattgacaccgaacaagcactgccgagatgagcaagatgcggggagtaaacaatgtcaagaaactcgaacaattggccacgattcaagggatagggtgcgagattttgcggtgagctctgaacgcggacgaaaaatttatccagcagcatctcggcttcgaacttgcttggtgtacacgaagggtccacgctaggctagactggtgacagatcgaaaatgctcgggtcaatgtcactctcgagaaccattccggagatatcacccggtgcagacgtccaatccgcgtcgaggccgagcgacgaaatcgaggagctgcgcgatcttgacggtccaggcaggcttcttggggacaaatagggcataatattttggttcggtgatgggcatgcagccatcggaggcgagatcgctacagtgacaggaggccggagactgtccacactgtctaacggagtcgactgaggaggagcaagcgggcgaagtaatggcgattgggacagcgacaccggcgacactggagatacaggcgagagggtatctgcgtaatcgacgacttgaatactcggtatctccaagtgcgataatgtcggaggttggatttggccgagctcgtcaatggatatggccggtcccggagagccgaagtcggtagctacgggaatattcggccatgtctgtgtcgaatgtttacttgcctcttgaccctgcgtgctcgatatgccacctgtgaattcagcgatttgcgcctcgagctggcggacgcgttgttctaaggcttgagtatcgttcttctgtattcgcacgcagttgatccgaaaccgccgacaagtagcacatggcgtctctccatcacaacgaatttttctccttcgacatctttcgcatgctgatgtgaccgtctttcctcggccataaccagtctcactcgatgactgagtaagagacttccctggctctgctgacgtccgagatacactcataacgacctatgtctgactcccctcatggcgcaaggataattgtctggtcgagtgctgtccgagttcggaaggcgtcgtggcatcagcagacaagacgagcgtataccagaggcgaaagcaaaaaagccaaacacgcctcgtgcgctgagttgcaggctctgactgggggagcaacaggttttgttttcaacccccgctgcactgccaccctcctagctgccacctcaacccgtctacccctcgcatgaatattcactattcctgtaccagtgaaaggtctcccgaatccaggacgatgcggtgatcagatactgggaaggaaagat

SEQ ID NO: 5589 - DNA, 5994 bp, Emericella nidulans
  unsure (1)..(5994): unsure at all n locations
ggggataacactgatattaatactgtagatatagccaagcttttaggcacagttcagcctgagctgactgtctagtagcataatatagattatacagtgcaatgcctgtatcaagcctggtactatctattagttataatactatttatactaacaactggcttgtacaagaccaagctggcttgagtttgtctgaccaggtttgcgtgacctggatatgtagccaatacattactggcactgtgtatagtattaattagctcttatagtttagctggcagcctgtacttgcaagctcagtctatattcctcttacctataattctattctgctatctgcctacacatataataaagcaacaaatctgctatgactctctatataactaattcttaatatattgctgtcagattatgctgctttgtactcctaataaacctgctataactagcagaatatagcctatatctctataccctatctattagctattgcctgcccaaggaaggccgccaccaaggtgacctcctgtatatctactatataggtgttgacctggtgctgtgccttctgcatgtatactatctactgcctgactatctatctggccaaatagtactaccaggtagactatacctgagccccatgaggcctgtatagtatccctgcaatagtcaagatcagcaccctgtactatagatactcctgcctggcctgccagccctagcagactaactatagcatcctataccagaaacaacagcagaacagtgtatagttaatctaggattacagctatactatctactatttggcagtctagctgtcaggataacagcagttatatagcttgtggttgctgttatgcctagctactatatagatatagtattagtacagctattactgggcctcttactcaaggaacttgtgatccaagccctactgtatagtagccatctgctgccagatagcagtatgctggtattatactagtattatgctatctgctaggactgtcaaaacagctgcaggaggtaccagtgccttgaataaggatactactgctgcagatcacagtacttaggacaggattaatacagctaaggttttagacatggatcaagatcaacaattaagcagaacaggcctattttgtgtattggggggattattaggctggttacttatattaatgttgcattctgctgctgatgctgctggcaatagtgataataatagtatcagggtttacttatcctgcctatccagccagcaggcattgcacagcagcttgtcaggatcctgatcctggtactgctggcatgtatatctattgactgtcctgtccaggtactggtcaaggacatactaacaacaccccacccccttgacaacctctatgtacacctgcacacgctcgaacttggtatctaatacctggttaacccacagatcaaggttgtcccagccctgggggtatataataatggccttgcttgccaagccatcataccctgcatgtctactctcctggctatagttaagcagtatctatagctgacctagatagattatatactagatattagggatattaatgcccatgcccaaggtacttgttatggcaataatataggtgtgactgctatggaactattgtatcatgcctgtctagtctagaatagtactataatatgccttgcagcccagctcgcggctgatagtattaacctagctcttgatattagtatatacaattacctggccatcaccagnctgctggatgtgctgctggataaatccctatatattaggctgtgtcaactactggtatagctcacaaggaacacctcagggcagcaacagctgaaccacgcaatacacaacattgtgccgacttgtccgcgcgcgatggataccaaccttgctatgttcatgcttaatgcgtcgcaggaactatgcttcctctgttgggggtaatattgctgtcaaaaacaccagctgtatctgggtactgacaagatacctgaggcacgccattgctggccagaaatccttctaattattaaggatgacatggtacttgttgataataatctggttgagctgttgtatctgctgttggcagtttaggaatatatagaaatccaggttcttggttgactcaggtattataagcacaatcactgccttatcagggggctggcggctctcccataatatatacaagatgcccagggcctgatagtatatcatcaggtctgcgcacagcaatagcaggggtactaccatgatcatgcatccccctggggctgtatatacaggcaatatgaacagcatactcttgctattacctgtaggcataattacaactacaggactagtactgtcctggattaccttcagtactagtgcctgcaccctgtgcaactacagtgcaggctgtcctgtcatgtactgtaatacctatactatgtctatctaggccagctactattgctgttgctcctgatagttaatagcctactccttctataggttggtgtgcttgcccagcactgtattgactagtagcaggtctggaaaccccagaaagcaatgctagtctgtgcttgatacttaaaattatagccagcacattgttgtgctgccagcaagctcactgctctcacacctatatattatcactgctatatagggtaagtaccctgcctgcttatctgtaatattacctatcttatcaaggtccttgtctgcctccagggcagccattgcctgcttgtacttggcctggatattgttcaggaatatacttgatatatataggaattaacagctgatgccaatagtaatattataataattagtaatatttagcagatactaggtactgatactggtcttatttacctgcttcagcaccttgtacaggtacttactggactatttataacctgtgctgatatctagcccctatagatataggctatagtgtattatcagcttgctggtattactgccctggctggtactgctaaatattacctggtactatgttactacaagctggcgcacaaatagcagcaccagccataagtactatacaacaagcttacctactttgtaaggcaggtactagtagatgatcttgacatcattgctcacataaaaccccttatagtacaccatcacaaatatgacaaggctgtccttaataaagatgttgtgatgccagttattattagtattaatatactggatactcagcagctcaggtatatatactagtaccctgctggtaagatacacagccactgccagcttctctttaaatcatacaacctgctaaaagtacttctataccttgtttatactgacagtaccctgggtaataaaggcttaagtaatagctagtttagtactaatctggttaaccagccatatcttccctgttataggctatagtatacaagcatcctgcaggaagctctagtctacagtatctttagttagattattaaataggtaatcctatgggatagctggctattactagtaattaggctggcacagcaggcctgccatcagctcttatgcagccacaactacaccatatacaaaactgcaaaactggcctatagtgaagcctatctgcttgtacagcagccgctcctggcccatccatatcacatatcctggtgctatggtgttgtagtgtaccttcagcctatatatatgccagttgagcagtactttgacagggctgtactggccatagaccataaatcactgtaccatccagtcaacaccggcctgaaacaaccacgatcgaatacagccaatcatgcggccttgggatgcagatatggtctctaggcttgacagacttgacagggacaaggcctcggcataccctttgtcattgaacagccatgccagctcctggtctgctgccttgcccacccacaagccctgcttagcagctgctgcctatatctggataatatcccagtactaggggtcaagccacaatgccttctgcataacaagaaagcatgccaccttcagcatgtataagaggattagtagatagctatcagcattgtgccagccctgcttgctgtaactaaggacagccattatatatactaacaggctcttatacttatatatcttagtcttctggttaagcagctcaatgcagaaatcaaggcaggctgtctccaacagggtcatcataaatgcctcaagttggttggtatccaagatcagatcagggctctggcatgatgctggcaaccaacctaccttatcagatctacaggcaagctgctatagttgctgccaggtctactgctattatacagtcataacatagcttagctttttttattattatggctacttagtctgcatgtaaataaggaacagcaggatctgctgccatagctatatatactttgcaatacttgtcttatccatatatgcctgcagtagacagtgtgggatctagttaggcactgtgctcgcagctattatacaaatactattcccacagtgctgtactatgcactgactatgctgagccagctgcctcatagcatcctatacatgctgcattgcctggctgacaggatctccttattcatgcagggtggcattgttctcattgcagtcaggggcatgacaatattgagaaggtcttggaagtacatattggcaaggtattatgcccatcaggtcatgcgcagccacgggttcatattatacagtatattgctcttggccgtctggcaggccgcctgctgcttgttgtcagtcacacatgctctgatcttagcagtgatctgcttgtaatcagttgatgggggtcagggcttgttgggctcggggtcacatgattggatgtgcataaggtgcaagttcttgcgcgtggggaatacctgctgccaggcaacaatataatataactgctaaacctcttataaaccctgtactttgatatcagcagtaatatagccttggtataggtgctatatccagccatgggcctggtaccagtacttttgcatagtcttaagacagctgctaatatatagatataatagatcttgctagcactacatactattagtatatatagggatcataggaactaggtgatcaagctcacaggggatatagatagtagtagtatcaagatagatatcatgccattattggatagtctggataataggctgaatcattgagcttgagaggtgatatttcttgtagagataggcctcagcctccttaatatatataccatactggcattaacagcagacaataaaccctagttcagggactttcacaaagataaaggggtctattatcaccaacaaggtgctgattcaggggaatcagagtaaaagtcagatttctggccagatcttaccagaatcctgcattatttgcttttcttatcctatatctataattaggatagtgtatacaactagtcccccatcaaaactacagaccttgacttacaaactttggctcagcaccacagcctgaactgacactggaaagctctaagatatttcctagttagaattaagtaccttatctatatcctgtaaatttctcagccttgttagtaactaaaagtataaagagatgctcaaccaaaaaaccaaggcgatgcaagacctgtttgccaagacttccctaacaataagtaaagcgctgctcttcatatcttcgcccccagtggattaggtttgtattatgcagtatattactcttggctatctagcaggttgccagctgcttattatcagcagcatgtgctttgattttagtagtaatctgttaataggtagttgttagtactaggggcttgtcagggagnggggttgtataattagatatgaaccaggtgcaagttcttgcatgttggaaatacctgctgccaggcaactatgtaatataattactataac

SEQ ID NO: 5590 - DNA, 7376 bp, Emericella nidulans
tcccctggctccatgcacaacatataggtggctgcgcgctcacatgatggagcttctggaacagcaggtgctgacaagcgcgggtcaatggtgagagggtcaggcgactgagatgcagcccgggtgatatccaggctttcattgtctgttcgaaaccatgggaggtctagcaacttggtagacttgaataccgcaactcgactagtgggtggacgccctcgttccttgccagctggcttccgtcggccccgtggagtaatataaactccaggaccttggcggtctataagcagaacactatattcggtccacgattcatcgaggcccatagctttgagtttctccaactcagacattccagcaaagttttgggattcacgtttaatctttcggggacgctttggtactggcgtactggctaagtttgcgtctacactggacgcccgttctctttcaacttccagcagcgaagttgtatctggagtagccagtcttccagctggtgactgcacagaatgtcctttgattccatactggatagctaggcgagacaaacaggagtcagcattatctcctgagggagaaattcgaggacttaccgtatgtgccatcatctaattctacagccttggggtcgctactcgagatgttgtaatcctttggtttaacaacccacatgcagtcggagagagagcaatcgccattcttcaccaagtcgctagctgggacgtcctgggggagcccgtaagcatcaagctgtggttcggcgtgtacgggcggaatggaaacggtgttcgatctgttattccttgggatgaactcaacggcttcccatgaggactctccagcttcaaccaatttgccaaagttcctcgcagagtagtggatgtaatgcgtaatggtgcgttgcagagccgtgtcacgcacgagagcgaggtggcgtaagtgtggaggttgcgacagctgccaacattcagacagacgggccaatgtgttttccaacggtcggcgccagagcactccggaaaaggttcttatgacatcctgcgtttattagaatcgaggctaacgacgaagaacattgacttacagagttggtagaccccatagtccctgctcggtcaacaacttcaaataattggttatggatgactcggtcagggctccagaggggaagaacacgcccaaagcctccacgccgtgttctccttccatcgctcggatatctcctacggcgggcgcttctccggttgcctcttctccctctgcgtcatcctcaaattcggcttcgtcattctgtttgatgtctgaatacatatgaatgctgaaatcgtggaacaattcaatgtccttcgccgtgggttctcgcacaagcattacacaagggtggtacttcttcatggtcttagcatactgcgacatggctttgacccgtttgactacgcctatgcgctcgaacttgcgcagtgcacgagagagaaccttccaatgccagtgatcgttgaagcccagcactctcttcagatcgttgcgcgagatgattttatgctctcgcaagattccgaaaagcgtgtcggtgaacgaattgaaatcaatcatcttgacggcatttggtccatcttcagaagtgccggcggctgattttccggcatcttgcgatacgaacttgcgcagtgtgcagaggctggtacgagcacccttcagttggatggctctcttttcgatataccccttttgttgcagaacatccgtccgtttcggtactgatcttttgtcctggccgctgagttttatcaagtctggctgggatatcccactagacttccgagaggcaatgatagagagaagcgcgaactccatgggaagaactttggtgtcatcgggttcatggccggtgatggcgagccatgttcgctccaaggagacaaacacattcagcggtttctcctccgcattgttaatcgcgtgttgacgcctttcggcctgttcaaggctcagcccattcccctcccggccctttcctactgaaacttcaggattcttggtgagccactgccagactttctcctggaatcgcctgtcaacaactggtgcgtggccagagccatcttttgcgcatttagcatagaataagttaatgaatgataagatgtctgcggtcgatgcgcctaaagagtgtcaaccgatttgcggacatttagatagaaaaccccattgggcggggcgggtgcaggggtggatctttatcacgaaaagcttcaatgtaccactgaccttgagtgccgcagagcgcaatctctgcaagcaagaaatcaatcaagtctcgtaggctaggagccatggcacgtccatatcctcatgtgctatgatatcggtttgctttccaagtaagtgcgcatgttatgaacgagataaaacttgccaccaaaaaaaaaacgttggcacaaatgaagagaaagcgcgattcgaaccgccgtcgtgggagagaaaaagtcgaacgtaggtggggtgacgactacctacacgtgacttgttcattgacgattttatgcctcaggcaaggttcttgatttgcgggagagttatacgcttggaagaatacaaagatctataactgttatatacacaccttatgggcatccttatactgcctggaagaaccagtataaattcaggctgagaaatatccggactgtcaacagctctctgtcgggattgatgtgactatttgctgcaggaacgagaatggtagcaataaacatctccaaaactattatcaaaatactagcttatatatcttggtaatatatattgatcgtcttcgctcaagtacgtactatcacttttcatagtaaaatcctcccgcgcagctcagcttgcagtctatggcatggttcagcaaactagggaaaggtcagccgctcgtcttattgtctttgtgaggtttaactgggacactcccaaagtcagcagcgacaaggaaattctgttaagacctgcggaaacccatcttcattgggttatgggtacttccatcttcattacgaacgacctcggcagtgtttcagtatctagatcctggggagagaggatatgtcccgcaggcctgagcaatttgcattcggggaatccacagaaatagctgcgacgttcccataatccgtcttgatgacaggggtcttcgaagggttttcgagagcctttgcttcaaaccccggctagttgcaattctcctgacccctgagtctataacggtcgactgtccgatccgcctgtgaacgagcgttcgttataccagcatgctgcacccttcttagctccatgagtgtacaggaaggcccaaagcgactgattgccgggtggataaatatagagcatccggatcgacgtaattaccagcatcaactaacgaataatataaaagaatgaaggtctgattcttacaatctagctctatagagcagctttaaatacacaagaaataataatcaacctagcctaatacggcagttggaagagacataacttttgaaccgtggaaatagctgaagtctctgcataagcatcggcgagccggagcttgcagttccgatatcccaaacaggaaagttccatatatgactagccgtcacatacggtcgacaataaattagcgtgagaggcagctctgaaagttagacaggagaaccgaatgggaagtgctagagttggaatgaacgtgccctcgttatgatagatcagagttgagagataatgaaaagttatctcgcatcagaatcagcatcgtgtcctctgtgggctgttgaagattggagtaattaagactcccgagttcagcgaggcgatcccgaccttagtcaagggtccaatttatgcagcgtagatcgtctgatcataccttagcttggcagccctctcggtctagcccgtctggcgcactatttcctattatccatggatgcataaagatcctacggcattcgctgacggtattggacacagcctcgggaacacctgggcaggattgtggatgaaatcgtggaatcgtgccactggccgctggtcacaggccagcgaatgaccttgcccttggttatccggctgaagaactggtccgaagccgagcaccggatggaactgtggccttggtgtgaaagaaatcgcccaactcggcttatatcattcagacctcattatctgcttggccaaacgacccaagaatcaccaacataagcattctgcagaaggagatattgtgacaggatctagacagcgtcgatcatgttggcatgtgttcagttggtcggagtaagaatgttttggcggaagctcggcactgacatcaccgcttgctttacgtcagaaaggcacaacctcaggctcagccctggccttgaaaaacaagcccgtcagctctcaggtcttttttttgatatttccgtctgttccggacttttacgggctatgattctttgtttggaagagcccagttattcattgaaacaataacaacctccttctctccggttttgctaccgtcgaattatccttatcgtttttgtcctgttccagcgcctatccacatgaacacccgaatgcctgaactctctgaataacctcaacccaccacattacactcacgctcaccacgtcaccccttcatggattcagaagcgaatccttctacagcagaagcacctgctgctcctgaaggcagcacgtcagaacccccaccgctcccatattccctccgagaccggaaaaagtcgattgcattcttctggttcctatttgtcctcgattgcaccgctcagccgctcggcttatattttgggctttggtatggcacgaacttgtcgcataatctgggtacgtttatcgcggaatggcctgacttcgaaagacattgcagccggctaatatggtcgctcattagtcttcaccatcgtcaccatttcactgggcggtatctcagtattcgagtacttttatcggctctataacctcttccgctccgattctacaacccggccgttaaatgctaggaagtcatgggtaggcgcatagcaagatcattgaataggctcgatgctgacttcagtagctggactttttccagatcaatttcaccattgtgtggttgatattagctgttgagcttatcacgtacgtcgaagacccacggtagacagagttttgctgacaattctcaggggaacggtgccagaagagccttatggtgaggaccagtcccaatgaacatctttgaatagatgctgatagctgcttagtgcgcctcgtcgccatggtccttccgacagtgatgttctatttcggtgccgtctacctttcactggatatcctccgcgcgtgcggattcagagcaccattccgaatttcctcaacacccaagggggccgttatgcccacagccttgtacgttcttatcgaagatgtggttgcagttgatggagctggaggtcagatgtaccgatacgcccttcggacgcggtacctttccagcccatatttccgccggatgctcgtgcagatgaatttcttctgggcgggcggttccattatctgggctgctgccattacggcgatggtgtttacaacaccccaagacgccgccttcgttgtatgtactataccccactttgactcaatatgtctgctaacagggctttcaatgcagatcggatggtcagtgccatttgtctgggcggccctttggaccgttattactataccctgggttcaaagcgatctccggcgcgagaaagaagcgtggcgcaccaacggggcccaaggaggtgagccctatgccgacgatatcaacgctccaagtgctaggactcgccttgagtcccttcatttccctcgcttcttcccgcaaagactagtccgagagaaacggtctgcacagtcgatgtcggaaacgcaatcgtgaacgattgtcattcgagcatccatgtgatagtccacaccacgtattggaacaaaccagttccccagtgacgttgtacgattcatgataaccgcgatagataccccacgtctttctattcgttcttgtattattgcaacgcgtccatatttccttaagataccccatctcaccgattctcgtatcccgacgggggagcaagtacagcttaagcctggagcaagctgtataggggctcatcgcagtctgcaaacttttattgatctttctatttgaatttctatttgaagccagatctggggttagttggcggtaagattctgatttgaatctgcagctgcagatactttcggagttttccttccagtcccagaacttccagctcagctcttgtgtcgcaaagtgtagaattcagcaggaagcaaattgtagttctcttagatatctcttccgtaccttgacgcaattatactcatcctgcctttgtatgcagaattcttggcttctccgtccttgtcacattgctagcctcttcatcgagcctattgcaccaatttatctgcagaaactttcttctcggcgcccacaatcttgcaccctgcagcactggggcagcagctcaaccagctgcacacccatcaggtaactaggctaagccgcctcaacaacccagacatcgcagaacctcttgttgacctgtccaaccctgggtgttgcagtacactccatgcctgggcctgctgcttgtactcgcatttgttacagctctccgcaccttgcacgggacttctgagacccgcgcaggattatatgtcagtcgcggtgtggtggtggttgtgtctactcacacaggtgcagccttggttcgagactcgtcaggggggagtactaagcgcaaaatgagcccagaatagagtttatcgtgccacgtcagtggctagccggctattatattgtttaatgcggtgggcgctaagcagttcttgtagtggtgcaactggtctcactgtatgcgccaggtgagacgagggcattgtgccgctgcataccataattagtcatgaagtataattatgtcagcacatatctaccatattaggaaaagtgccttgtctcccgccggcctcaaacagccctgatagaccaacatttctcttaactacacatcatacataatcatagaacagtatagacaatgagtacccctccaggcccaagccatactgcattcacggaatgggctgtgttcaacggcattaaaatcaatggcatcgccccagcccgcttcccaggccgtggactaggcatgattgcaacgcaggcgatccgagtatgttttccatctaatacagttgcaatcttccgttctctatgtgacgccttcatcccaaatgagttcctgttaactcaaatgccaggaaaacca

SEQ ID NO: 5591 - DNA, 7467 bp, Emericella nidulans
  unsure (1)..(7467): unsure at all n locations
aatgtatggcgatataacgtaccatggtatcccaagattgagctccgcctggacggatatttactatagcgaagatccccaggcacacgcaggaggcggcgaggacgatgaggatccaaatattgagctggatttccggccagaggtagtgttttggtgcgtgccggcggggcatcttctcttcgcttttcccttctcacagtatacaactcttttcactttcaagagcggtgacttttgacaaagctattgttgaattaaacgggtattgcgtctcatatcaatggcgccgggcagaagctgaagctgaaacagcgacgatggtgatgtttagggcaactaggtatagagggtacagtcgggtagagccctgcgtgagaactatcgagtaggcgtcacacccacagggccagttgggcgccgtataggatcaggtgcagatttcgagaagacaaggccgaggccagcgcatctgcgctgtccggagtgaggctgtattgcagattgtcgcgagatgggtaacgatgcgctggtcgaatcggcgttacataagcatggccggggttgggttgtctgtcgttgggcgttgaaaaggtgctgtaaaatcgagattataattcagtgatggatgacgatatggaaacaatggcttgacgattttgacttggaattctcttggtttgatgggagaaatgttgttaatgcaaagaaaatgggggggcgggggattgttttctttttctatagttcagattaattccagtggcaggggtgcaggtctgcagtctgccgcaacctcgcacaacattactagtcattgttaattggataacccgacaatcttcataaatcattattcttgtctagctctgttaatgaaatcgctgactgacgtaattacagactctagagcagggtatctcccaacgcactacgcaccaacgagcaaccggtccgaatggtgtcggaagcccccacagcttccaagctggggttgacctcaaccaaatccatggagatcaagtttcctgtctcgtgaacacactcgcagatgaagtctccctcgcgaagagtcaaacccccacgcaccggcgttccagtgctgggcgcccattggggatcgagtgcatccacgtcaaaggacagatggattggggtgtcgtttccgatgtgagcgagggccatttcgaccactcgaccaataccgtggctaaagccaacgttagcaacatttatctccagggcgtagaacccagacgaggccgagggctaaacgagggcaaatgcggataggaagggggtagtaccgatcaacatcatgcatgctaaacgccttgattccatgctcccggagcaacttcttctcaccgcgatcaacatctctcagtccgatatacaccagcttgcggaggttgaccttgtgctcctcctgcaaccaaccaaagatatccttcttctcctccgtcgccaaccgcgtcaagaatgccatcggcattccgtggatattcccactgggactcatttcgggaatgttgatatcagcatgcgcatcgacccaaatgacaccaatctcccgtcccagccgctcgcgngtcgccttgcattgcggaagatactcccaattgcgatcgagtggtctccgcctagggttagcgtgaacttgccctccttggagtgctcgtacacctgcgagctgagggtttctgtgacggcgctgacagcccgcggcttcttcatgccccggtggtcggggtcttcagcggggatctccttctcatagtagtgtacggtgttatcgtagtgtatttcgtagtcaagatcatcgcgaagctggtcgagaaggccggcctcgacgagagccataggagctgcctcaacgccaagcttgcactgtgtcatgggaccagtcatgtcagcatccgtcttctacagggtgcaaggtgcccctgcgcgagactgtaatgcactgcaatgcaaagatgatcgacagagcagcgccgagccgtgggtatccgtacctggccgccattaaaaccaacagcaactacgccgagctggtttggcttggagaggaatctctgcttgatagtcgagggcgaagtcataatgactcttgacggtgacgactgtatcaaaaaccaaagatggagacacgagattatcgagataagatctgacggtggaaaaagcagactaaaagattctagaaggactaaaatagttccttctgtcagtgtggagctgagccagagagacgaacacctactgtattgtacctcaacagcaacagcaactccaggaaaaggactgcagtttaccacctcagtagaagatctatgcaatgaatagaagaagaagagtcatgaagaagaaagaactcctttgacacaagggcgaagcgagctttgctttatggtggtggccagccgtggggcatcgctaagacctgcttttagggaatgcggctttcccctaagtacaggtcgaggagaaagacggctgccatcccactccaccacgcggtatccgcggtttttattatcaatctattgctgagagaatagataccgctgggacgtattgggataggcggtgcgtcattgctgattagggtgatgggactgactaacgcatattgtcatgacatctttgcttactgtatctatactacacgatctggcttggtgtacaccggatatcacagcgtgaaactgtgtagccagtctactaggattacagtagacaaacatgcagacccacttagggttagaaatagctactaagataccacggggcgtcagcaacccaacttagcatggcaggatacggcatgaaaacagccacacagcatgtgcagcaacttactttataaatgcaaagtacggcacgagagcaatcttggactcatccggcaagtctcgactcatggggtttcaagtataatctacatagaccctaagatcatgaagtatgtctttaagctcgaatagaacgctcagtcaccttgtattgcactcatagtctgtctatttataactaggtaaatagagcaattctataacaagaatgctcacctgcagccccggaatgaaacacccataagggctaccccgatgatgaaaatcaccaacccaccgccttcgacaactcgggcaggtcgccagcccagacggggccatagcaatccatttatcgaggcagcgcttgtggtagttcacgccgcatccagcttgacaccaagataattccagtctcgctggatactttctctcgcctactttcccttgtctgctgacgttgatttccggccctccttcacaaatataactcagcacgcgatgatatgcataatccctcctcatcaggtccgtaagtcccggtgttcctgtgtcggtttcgtgccattggcaggaagagtcagaaaacgggctagacaggcggtctgtaattgagtccgtatatgcgtaatcagtatagaaatcgaagtcagacggctcgtctagcagtgagatcaagcagatactgcagtcaccgtcaatgggctggcggaggcgctcgacggtattgtcctggtggttgcgtgacatttctgttttcttaggcgccaggcgtgagagcccgaaggctgagctgtgattccgagttggagctgggataccaacgggtggatgctgggcgttagtggaaggattattgtatattccatgaccagtgctggtgttggtgctggtggttcttccgggttcagggtcaatcgaaaattcacgatcaacattaccattccaatccgagctcgaaccctggagatgttgatgagctagattctcccggagggccctgctagcatataagaacccaggatccctgccccgtacaagctgagcgagtgccaggtggtcaaagccccactgaatcccgcgggatacctgcttataccagctttcgttatccaaatccatcttcatattattccattcggtcatcatatccgcatcattgagccccaatattatttcagtaccatggacgaaagcctgaaaatctgccctccacctctgcacaagcgaccgagcctgagcctgatgagtggacgccgaacagagaaggcgacgagcgagttcttcgagagtctcgttttcaatgtctctccacatcccggcgcgaacgtctgctgtcgccatattcaggagcgcaatagcctcactgcggtcttgtggctttgtttcagttgtgcagcggcgcccgttggtgtccacgtagccagcgcagcggtgatcgagcgaggggtcgagcgagagtatgtaggaaaggtgaggaagatagttgattgaggtcgaagttgatatatcggcaggcaacaccctttgcctggggtatattgtggacattatgcgtagaatcagtgtcctcagataggttaaaaggtgtatagaggataaaggtcggggaatgcgctgaagattatatagagggattttggatatgaattagctgaaggccatgcgaaagccgcggctatcagcttcgaatctgcctgggaatatcattggtacacgcggtatcacagcctagcgtaataataagtatgagcagtagcattcatctcctaatgctatgcaaagtactgcaatgagtgaacgcagtcgtcaggatgtgtggtgtggcggagcgcagtaaggctggagaagaaaggtgccttaaatcccaggtgactacggttcatctaggctgtcctctccaaccctgggttaattcttctcaaggaccacgtttgtctagacatcgtgttacacaaggtgttaacgttaacggctacttcgttttcttaaaggcctgggctgctttcattagacgggggtgatacaaggctgactaggcacaaagaatatcttgactgagcacttccttctaggtctttcagccttacctgttccttacacatacatatcatgacaggctgcaagttggttacctaactcttcacatattggcattggtctcagaattccagatatcagctctagatctctggcagcccactggcagccctcgactcactcgcgatcctcctcaattcctccgcaacaacatctctgctccacccctcctgcaatcccctaaacaagacctgctgctcactattcggcgccatgccactcggcgccggcggcctctcatccagattcgtcgggaatgggtacccatccccaatcgctctcactagcgcatccagcttcccatccacaatctcgcccgcagctttatacatcttgaccatctgttcccagcaccgttccacaatgggcaccgcatcaatcgattccatcgtcttgcctagcgcgcagctgatctgtaaaaggttcgccttgcgatggaacccgccatcaggggccggttcagtctcattcgcacccgcggcatggaaaactgccgggttaaagaacagtccatcacccagcgcaagtggaagcgcaacgtaattcttttgaaagtaagctctgaaatcttcccttcgccaggcaagatatcccggctcgtaggtctggctgaagggcaagaacctcgttggtccgctttggagaggcatatcactatgtgccactgctccctgaagcgtaagatactggctcgcaagctggatcgagcgcgggaacgcagcgcaggactcttcgtcctggaacccgagatggtagtcacggtgactgtcctgcgccgcgccgccgggtttgacaatattcacctgagctgtgactctgtatgcgggttctagccaggccttactgacgactttcagccatgggttcgagtagtactcagtgaatgagattgggtctgcaaaggcgtgtttggagaaagagttccatatgcggtcatttttgccgcccgctgcgaaatggtcgcctatgcggccgccggctttgcgctctttatcgatgattgcctggaacgcggcgttggttgcagagagcgtctgggcgtactgcgaaggatcgtacatgcccttcaggacgaagattccaggcccggaggagaggatgtgataccattcgtcttgaagcgcagtcgcttgatcggtgtcaaagggattgtagttgtgcgcatcgtagatagggatgttttgggttacggtcgaggagagggggtaagtgcttggttctgtggtgcgggagcagatcgtttcaaagtcggaaagttggatagaagatgttgtttggaagagtctgctgctgatgcgattgctttgcttacttatattttcgtcggtatgtgtcatgatgcctgatgagggtattgtcattgtcttgttgttctgctgtactggggcctgggagagcggggatatatatcgtaggtggtggatgaggaattccgaatggcgtccggaaacatcgccgacttgtcgagagccagaagatgcatgcttttacccaccatgatcaagccaatcgtatatctgacacttcctgatctgctaaatggcaaaatgctcaccccagatttttaggccacgtgagggtcggaaacctaatcccgctatataatcccgctatatgctgaacgagctggtaggatgtaaaagaaatctaggggagtaggttttatgactttagcgtctaatatccttcttgatagactcgggctcctagagaaacagtggggtagcagatgctttgaacatgaacaaggcttgagcactcccagaatatacaaaggctcaagccatccttcccttctggcttcaatcgcgcaatatctagagtcccaatgtagcattctcagtaccttacaaaatgtctagagaaaaaaaaaaagagaagagaagaaaggaaaggaaaggacacctgcatgctggtatcaatacattaaagccacctgcgccagaatctatagcaattttcacccgagacaaagttgaggtacagaagacgtgaagatatctgtcagctgaacaaacgatgagagcaagacaaaagggtatccaagggttgaaaagggacaagggtccagtttgcatgttattcgcccatcgggacgtcattgtccgaacacgaaggtgggttgagggtgcttcgttcagtagcacttgattccttaagcgtaagcggattctcagacagtgtttccatcagcggcgccagccgtccggtgacggtgaaaaggaccttcagtaagacgttctgctgcccaggcgtcgaatcggatgattgtctggtatggctcacaaagattcgaacaagcgatcggatgtattgatctgttgattgatcttgcagccggtccagtccgtctacgacgcacaagagtagcggcggtgcgtagtaaagcaatgtatcgaccaaggagagcactttttgccacgatgctagcgtaccatcgaagaggggcgaaattttttgcctgactttatgcgtggatgaacccgtgactaccggagggagatactttagtagttggccggatcaacct

SEQ ID NO: 5592 - DNA, 11918 bp, Emericella nidulans
agctgaaaccattggttctctacccttggcccgaattgttgacagtagtgggctgagcagatataggatatcggcattgatagtgagaaatcatatgttactaccagactatatacttacaacggacttccctatagccaagtatcacttctggccccagcattgggcctttctgtcccgtctacagtctggcgggtcgtgggcaaaatattcatgatattgctcctcttcaaatatcttggctcccgagtccaatgccaatgtatgccggaaggagcagcatttgaacttagcaggacaggatcccccaaaccatactgatttttccgatctgccgatacggaacaaaccgctatttctccttcgcaatgctcacttattagaaatgataatgagagcaaaggatagacgtttcacagccttttgttctctggaacgttttagacgtgcatgtctcaaactttgccatcaaccagccacagttgtagagcatcagcatcatgaacgggtcgaatctgcacttcgcgaatatcacggtgactgtggatgactctgctgccccgagcggcgagaactgggcacaaaatacgggtggattcgttaattcccttgcacgactctactttcaaaagaaaagcactaatactcagccgcagataccatggacgtcaacaacctgaccatgcacaactttacctttaccggcggagacgactgcatcgcaatcaaaccgcggtcctataacatcaacatctcggatgttatctgcaacggggtaaacgggatcgcaattgggagtctaggacagtaccttgaagacagcagcgtaaagaatgttacgatatctcatgccagagtcccatcgaccagatacggaacatacatcaagacttggatgggcgagcttgtgcctcaacccgatagctacgagtctgactacaagccacaaggaggctaataaggggtagccaggaatattgttcttgaggatattgatgtaacgggggcttagcgtgcggtgcttgttacgcaagataacggggctgagaataatagctcggccaaaggaactagcaatatggagatctctgtgatcaggttcgtcaatcgctcggggacgctgagctcaagcaaccgtcttacggtggattgcagcatagtggatccgtgctttgataatagctttgagggtgggatgtcttgacgcaggatgggtatgagttgacgggaaggtgtaaatggacggcggaggatggagcgacttggctggatgggtgctagacaaaatagcgttgaataggatctggataagctagaggcggaataaacattatctataatctgtcataagtacatcatggtgatcattctatggtgtaagttttcgatacgttggggacaaataaccccccatcttggtcccctcaactctctgtaccgtccccgcgttcgcctcgacatcgtcttgtctaggcgtgacagtcccctcgctttcaccagcctttgtctttcgtaaccccgtaagggtgaccgggttggtctgaagcaggtacatataccagtaataagttccgacaaacaacccacccccaactatatttcccaacaaggtcgggataatccccttccagatatacagccccaccgagattccgggggcatcgagccagatcgccaacgggatgaatgtcatgttcgcaacaacgtggtcaaagcccagactgacgaaagcgtagatgggtagccaaatgccgattatcttagacgccatatcccgaccctgcagaccaaggaagcacgccagacagacgagccagttgcatccgatgccacgaaggaagatactgtggaattcgggcgtcacttgtttcttggttgcgaaggagattacggcggagcggaaggggtcagcggagaagacttcgccgtctgagtgacagtgtcagccaatgactggaagggtgtatgtaaaacagaggaagggagacgaacagccaaagatgatggcgacaacgaataacgagccgcaaaggttcccccaaaacgttatgaaccagtgcaggagcattttcggccaggaaagtcggcgatggagagcagcgacggtcgtaaactaccaaccgaacaagcagtcagtatactattcaccagtctctttgcccaggttgcaggatgaatctcataccataaatgagccagtgcagaggtctgcaccagtaaggatgatcaagaccaacccatagggaaagacaagcgcactgatcgtccggatcaggccgggggcgttctctgtgaaccagggactagcgttggtgctcagagtggttccgcatgccagtgctagcagacatccggcggataaagagctgagaaagatcttgtccagccgcatgtgccccttaactgagccggcacgcgagacaaactcgactacctcgagtggcgtgtatgcatcgatagacggaggcattgcagcagctggtttagtatcccgtatacaagacagacggtcaacgtaggtgaagaagagcggaatctgggaacatgcttttattatctcttcagcactgcaatgacggtaatatgcgtgtaaatatgttggccaatgggagggtagcgatgcttatcttgttggtcttcaataagtcgggtccgaaacaatatcgtcagatatcgaaccatcacaaagctaaagctggaagttcaggggccccagcaaatgacatggtctagaacgccaaagtcagtcttaatccgagttcggcttccccagaaaggataagagggactggggtcttatcttctttccgcggagaaagcaaatccacgacaaaattatactgtagggactgataagagatagggcccgaagccctaagatcgagaactagtgacaaaccattggagagatatatggtattttgcagatcacaggctcctgctctggtagatcaccctctacatagataccgaatcatgtttgctgtcagccacaggcgccatatctgcacctttcttttgttcttctgtgctgtattatgtgcaaagtaaagcttgttgataagaagctttttgcatcagccatgaaagcagccgagatagagtaggctatctcagggctttcgtcccgccgacgaggggaatggtcctgcagtacgcattccccagcagtaacattgctaaaattatctcgaaaatgatttaaggctttgacggggtgtcttccccgcctgttctgtgggttggctctcacctaacgcaaaaagagggggaaagggggtcttataggtgtggttattagctggaaataggactgataagctcgtgaggatccagcgaagtggtttaagctttgcggcacatgattttcagacgaactattgatgtgagataaagtaatacaatggcgtatcgcgcttactgtacaacttattgaaccgtatccacgcagtgtatgcagataccacctctagccgtagggccaccgctcgagtggtcgaacctagctgatctaggctgcatcaacaccatggctggcgtagactatttgccatccgacctgctacaatatacagccttatttgttggatactggggctcagctacctcccaacagtatctccgtagacaataggaaaggccctgataacttgaagaagatacttcaggatttctcatccttctctgggatcgttcccgccgaaagtcactcaagactgggtataaaagtgattcaaggggcgcaatgaagaaaccatacctctacttttgcgtcctgaaaaggtgctcctggggataagacgccgcctaaagcgataactattctgacagcagctcagttctgggctacctcatatgaaggcagcatagaggtatacagctagctaaccgaaagcctctctgactcgagtccgccgtcggcgctgtacgcccagaagactacacagcattagatgcctggtctatgtggacgtagtataggagcttgtctctctctcgtgtaattatagcggagatggcgtccatttgggccatagataatggtggaaagaggtctttagcgctgccacctagggcgtgacagccaagcgtgcgcgatctgctgggtatgcgaaatcaaaccggcgcttgggaacctagaccctatagcatgtaaagactatatgacccgctcatattgataagggagggtttgggttcggaaatctgccatgactttgctgatactgcgcagcgtctacaaggtagaaacaacaattgctacatcggtcgatgccctcaccgccggtgttatcatgatatatcgactttattaacgcactttactaacgcacgtccccttgtcattatttgatctagatttgtagaacaagcttcccaatctgtttcccctgccagatatactcgatcgcctcatccgccttttcgacggctcaaccgagtagattatatcgtccagcggcatctgcaccgcagctagagccgcacaaagatcatccatgtcatgcttcgacccgccattgatgcctctataacatgaaaaagcattaaacgaccactgacgattgaggaggagatttgaatcaccgcagaatgatcctccggccaatcagcacatcgaagaactcatccatatgcgctgggtccctcttactcagataccccacttggctgattgtcctgccgcgacgggttcatttcatactcttgacgagcgaattgctcccaccatcttcgacgaccaggtcgacgcccgtcagtgagtttgaggacttcttcatgccactcgggatgcgtcgcatagttgacagtcagtagtggcggaatctgggaactgtgctgagatcttgaatagttttttgtcgctagatgaggtcatgatcaccttcatgccggcttattgggcaagtttcagcgtgaacatgctcacgccaccagttcctaaatcaggccagcgctcgctaaccgtttcacagtgtagggtagggtcaaccctggatgagcactgtcgtccccatgccgaatcccagcaatgacgaccaggccgtgactccagcgcagggaatgatacaggcagggacccagtctagatgagccggcaacttgcaaaccttgcactcgtcaaagacgatataatcagctaggacattgtgttcgtcagcagccagccaggatcttgtgggctctcgacccgtgatgttctccgtatcgatgatcggcgcgactctgccgcccacggagatggacttgacattcttgcctctggcaataattccgcccgctgcgtcattgcaggggatgccatgcggtgtgacaggccacgggttccggccgttagcaatattggcgtcacggtaattgagggcgacagcgtagacttggatgagcacggaggtgggggagagaacagggagcgcttcggtgagaagctgcactcggggggtgccaggcgtatcgtcgtctgttcggcgaaagacgcgacgagatgttatttgagtggacatcttgtcttaactcggaagactggctgctttcgtcttccatccgtgggatacggccagctttatgcaccgatccatgttactaattcgctctgtcatggagcgacgaccctctgtgtcagtgccccagtcggacgcccatgaggtcactcctagggaatatacagatttggcagagaatgcagaggctgtctgtctcttcggttggcccttgatctatccccatgcatgaactcggttgtctctatacttacggatactcttcccgccgttctcgggttgggttcccgcggcgcagttccattctacagatgctggcgggcaggccaggggtgttcgaaaataagtatccaaatactctgataagaaagagcttattctcttttcttcaatcttttggtagctattgaggctgatggagttgaagttctcatccgccacggccttccatagtctcataaccagccctcccgtctgagtaccatcttttctttttggtaaatacctagcgagacgtcagaattaatatcaagctctgtttgtctcgaaatcgtgaaacaatggagcttccctttccgcagggcactctcatttggctcgtgctatttcggataaggtatacacagaaaaaaacgaccgggaaaagatattgcgcaccactcaagaaaacgaagagagaagggttcacgacaagtacgctcaatgaaaagggtgtctcatttttgatatccgtcctgtcaggatttggagtctcgcgcacttcccagcttccgcttgggctaaagatgatctacggaactgctgctacgcaaacggcaccgtgaggtcaaactttctccttcaggctagttaggcgtgtatacacatctccacggcgccgtgtagtttgcttcacatttgacatatataaaccgaaaaacccggaaatggcctttttggacatggttgttcctctctgccgtagacggtttggaatctggagaatcgtctcgcaacccagctatccgaaaattacaaccctcaacactccatgctcataaaaatgctccattaacctagctcagtcgggagtggcacttcagatacaaaagtgacgtaaacacttgtttgggcgcagcggtagatcgtataatgcaatagaccaacagggagtgtatgagaagaagaaggtaagggattgagggtgacgcggctctggtcttgcctaaaggctgcaaggctgctcaaagtacaaagagattccttccggcgcagattcgcttctctcatacttcttctctccttgaaacgaaaaaaaatgcccgacctgggtatcaagcacaggcttgagacacgtagccatcgttaatgggtcgtcgttatgttactgtctcggccaagtccagtccaagagtcaacacagggacatcggatcaggcttgacgggaagcagattaatgctcaaatccgtgattgattggccatatagtccacaggggaaagtggctagtggcacttgcctatatctcgctagaggttaccggagcatagagtagtggtatatgatctgctcagcatttcagcgcagtgtcgtcgggaagtcaggcccttatgtcgtataaaattgaaagaaggacattttggaggatggctggcgataaagatggtagtatccttgatcagtgcctaatttggcggattcatttttcgacatcaagtgcacacccagaacctcgttcctggaacttgtgaaacagcatcaagatatctctcaaggcgactatgttcctcagtcgacggcccaaaccactccaactgatgaggtgcagattcgttttttggggctccctcaaacaggcggacgagtacgccctattttgacagccgaccccaaggcaatgaatttccagctgcctaagctctggataccactacctagagagcttctgttatagggaaaggcaaatgcccctgactccgcgtcaattgtagggtatgctgaaagatcatgtcgtgatcctcagccgggtaatacagagatctgcgaagccatacctttacagccagccatgccgcaattgattagaacgaattccagctttccacagacgccttatgagtagcgaacgagatcttcctagctgtaggtggtacttgtcgccgcaaggtcttattaggggaccggtcatataatttctgatagagggcgacagatgaatatacgcaagggatggctgatcctcggctattttgatctattcaaggctgacgttacttacagccttcgagaggatattgcactgcagctcaaagatctgactgcagccgctcgtcatggttggagtgcgggtccgttggctaatcgatttcaatgtggccggtcatcacgtagcattgaccatctgattgcaggaggtggttacaaccagctaaggaggttgttcctaaccggcttttctagcaactgatgggcgtaagtccttgagacgcgtcattgatcgcgcccagaaccacaccgaataaaacaactatcgatagcttaggtatgagctgaatggccagggatggcaaacctccgccaaaaagtactctgagcgtcgatacacaccgcacatgtaagggaccttggcaggaggtcgagcgaggttactcagtcgcagtcttatagcgggagtgtgtgtcgccagatgtttgcatgctgagcccctgagctgataaattctggcaacgcccccttctggcgaagtgcatcttggctgtgcaaccgcgattgaatatactattccctaagccaagccattcgaagtcaccgcagaaagtgtggatagtttcagtcattcctgtctagcagggaccgagtgttaattccgggctgatactcaagcagccgatgtcctttgacatgggttactattgttgggacatcgtcatggggttgtacagggctcctaatggtccatgaccaatgaggtccagcgcatttactcgcctaatgtttcatggtcacaatgctagctgtccaatgctatcgttggccttggccattgtacaatcggatattcggggaattggcggggagtggggttacttgacggggattcctgggtcgctgctttgacaatcggcccaggcgggtggataacaaccggtcaggccgtaaaactagattcctccatgagtattgcaggagccctagagtggcggtggccccattagtggcatggccaacgaacagacatagtctcgagtggctgttatacgcatcttcaagacccagtggtccctcctccctcctccttccctacgtttggaatggtccagacctgacgggcaagccgccttccccgcgtatgacacgcatttgggcgattgggtacaccaagggcgcggggccgctgttcctcgtcctgccatccttgttgatttgcaacagcactctatgcggcgagtgttttgacacccaagaaatgacccaatagaaccctagccctaggtgccaggtgatgcaaggtactgtcagtataatagccgcgatgcctaccaggcggatcagttccgcatggcggacaggaatttcggcagtttcttccacaaaccaccccagaacctggatatcttaaactttattctgtgctagggaccaggcccgcctcgttggtgctctgctgcagattgtgattgtcgtgattagtatgaccttctgagtaaggcggagtgaactctataggccagcaagctaaggaccaaatcccgctgcgtcatagggtagccgaattgataaggaaaaaattgctggtacattcgaatgctgcaaagacttatcagatgctgggtatcatcactgctgtgagcctcatggttgcataagtccagggagtgcttgacactttcaggcagaatttgtcagggatgcgcaagcatcaaagaccctttctaggtcaaagaagcaacatggatggatcaccacgaagtccggagtgacatggatttctgcgtcgatccggtctttgccctgtagctagggaaagatctggatgggcctcggtgaagtattgctagtgggacatgagccctgggcgtgcgcctcgatacgtcatctgcagccacaggctccgatgagcctatttcagtacttaatactgtacgctactgcgagcgccagaagcagatatacacagctcgcaggcgtattgagtgtaagcgtattagtattttagctgcattttatattcgctgccggatgtcagcgggtcaatccgctgagcgctctgacgcagtgcaacaatactcggtctctaagagaaaatcgaaactgcggcactgaggccagccacagcatcgttgactttcacactgagaactgtatcaaaaaagagtagtaatcaggctttagaaagtgccggtctgacggatagcacaggatcatttggaactatcctgccgtaagacactcggtacagcgatatcatgcaggagacgtcataagcagataagcttgaagctcaccaagacactgctggcgtccagaccttgtttctgcccgcaaagcagttatcatcgattgggattggaatatccagagtgggcagtctgaaatcgaactgtagttgggctcaaagccgaaattatggtcagttgaacagcgacgatgtacttctgggatgctgctagagcaagtaacgctggaggcaaaagtaagtcgctgacgtgatatgacggatcctccagcactccaatagagacgctgtgccccaagtgatagcagaataaaaagaagaaagctgaagctgtattagagtgtaagtaacgtactaatcatccattatttacatcttttgtgaagtatcatcatcgatcatttttgtcttttcctggttgaaaactgcgacggaggtaagcgcagaaggctagctatttgggggtcccgaaattgatctgcctccggaagctgttcctggtctgaattgagggcccaaggcgatcgctccatcgtaaaaaatagggccaatggtgatgcgagactacacctggtattccaatcgtgccttgtttttccttatactgcataccaagaggacatatccatggctgtgctcagtgcatctcgctgccattgttctcggtattctttatgtagtattttggggttgactgtgcagctggcgataataattcgtttgcgatttgactgtaaagataacggaaacgagtgcagatactgtgcggaccgaggcagtgaggtccatccagcggcctccattccccgacaaagacgccaagctagtcatacaaacgcataccttgccaaaacagtatggatcctttggattttgggctggtgaagtgaaggtgactagtggcgtcaaggtcatagctccgatagggaaagaacaggtactatcaaagccgttctgagatactgtgctagtcaatcctaggttggctcatggaggcgacacattgccgccaaggtggctgtattcaacaggagacactgacttgagatggcggcccatgccagctcatcaataccaagcggataacaattctgactagagcaaactccggtatttgtatttcgagtcttgggatttatcagccctgttttgcgttagcccctgcaaaacctgcagccccaggtcggattgacctaccatgatcccagatcagcctgctattgcagagtcacgtttttcgtaacatggatcgagtttccctcgtgagcagaagcaaaggccactttatcaaagaagtcagataaacggaagagagccccgggtcaaagtgatgcccagctgtcttagtctcggacagcacaataccatacattggccgacaaggcacgagcctcttgttgctcattcctacctcttcagcgtagtcatcctcccagtcgtctaatgtccccgaagactcacctaaccccgacatccgcaaacgtcgtgattcatgatgacggagcccttcccgtcgagctcggtttgctcactgtcgagttctcgtcgccttcccaacggacagcaaccacgaaagctccgggatagctgcatccactgtgcaaattcaaaggtcaagtgcaacaaggagaagcctatctgcggtcgttgtgttcggcgtcggctgccttgcgagtataaagtatcccgccggactggccgtacttcacgcagcatagcacagctcctgggatcgggatccacaggaagaacgacagaaacattaacaatatccccagcaatccatccggcaaataccggcggcaacgcaacctcaagcgtcttgccatcaaaccctgtcaccagcggaccatcgcaaaccccgttattgacgccgataacccctatcccgacgtcagagccttctccagatcattgcatacccaaactccagacgtttggcggtcctcttgtctccagcgcgttcacccagatgttgggg

SEQ ID NO: 5593 - DNA, 4925 bp, Emericella nidulans
gttagtctgacaaagagccttgatgcaaaccctccggggcgtaccactttcgcgtacgaaggcactcacctcacctgttttgctggtggtatgcttgccattggcgccaagttgtttgggcttgataaggatctaaagctgggtagtcaactgacggacggctgtgtctgggcatatgaagccacaaagtccggaatcatgccggaagcattccaactggtcccttgtaagaaaggcgagccatgcgaatgggatgaggacgcatactacatggccatggatccttatgccgacaagcggccaatatcacataacaaacgctccgccggccctgaaaaggggaattggcacgtcgtcgccacagccgaatcgtcttcgccccaggaagataaaacacagaaatcaaccactactgagggtcgacacaccggtacaactaccggggcaggcgcgctctcgcacgaggaattcgtcacgggaaaaatcctcaacgaccgactcccgccgggcatgacagggatctcggctcggcagtacctccttcgcccggaggcgatcgagtctgtcttcatcatgttccgcctcacgggcgatccttcctggcgcgaaaagggttggaagatgttccaggctgtcgacaaagccacgaagacggagctggcgaactcggccatttccgacgtaaccgtcgataatccacgcccggtggacagtatggaatcattctggcttgcggagactctgaaatacttctaccttcttttcagcgatccaagcctggtgagccttgacgaatatgtcttgtaagtgatgcttgacttaatcgactgcttgatgctgacttttcccttaggaacaccgaggctcatccgttcaagcgacccaagtactgaagtactaatttaaatgatcttttagcctgtatctatacatggccgctccgcgtgtagaagcattgataccattaagacagtatcgctgcattttgctgtaccatttgagcttgccagaggaacctctttgtatcttttctgtccttaaagtgatccttttccacaagatactttcagcacgtatataattgcattgtataacaagatctctgatcctcggtgctctgaagtaaatatagaaaggacgttgagtagtgccgcactagagcaaccttgagtgggtttcagcccgctttatttagtcagtcttgctctcgtcgtcatcgccaatcgggcaacctgccactccttcacttctcccgttcttcttctccctctcccgctcgctcttttcccagttttattctcaatcttgtgttcttccacgcaggagacatcatcgcttttgcgtctcttcctccaaacggagcccacgaccaacttgtgtgacgggcgcaagacgggatgagtgaagcagagacccaacaggcccgaggacaacgaccgagttgtgggaaatggagcttgaggtctccgtggataatgagcagcaattctggaccagtatgattgtgcttcccgtattttctgcgcttgtggtctccgttctgagaactgacctgttccgcatccgcgcaggcatccaagagattgtatccgccccttgctcgacggaagacttaatcgatgatgcgttacgggcgtatctaagtctgacgactaaatataaaggtatcgggcattattttgcaaatactacggtccgtcgcatgtgctaatcaacttccgcacccctccagagcaatatctccagtccgagtttgaggttacaacatgttcgctcacactggtttcgtcggcaatctttgtcgctcataaggactatgtccggcggcagatgatatacgctttattgcaggtaccgctcgctgtttatactattctcgaggaatcgctattcatactccagacaggaagatgatcccgtgacgcttcatatgattgcatctttccttctcttcgatggccggcaccatgagattccactttatatgatgaatgaggagggtgcgttcccgcggttactcgagttgcttcaagtgcaatcgctacgcatggacgatgaaagcgcggcgaatttacaccggcttttgatggaccttttgtatgagttgtcacggatacagaaaatcaaaattgaagacctcagtgagttttcaacgctttaatctgttgccgtgctggaattgctaatatgttcatgataagttcttgtggacgacgattttgtgcggggtcttttcgatatcattgagcatgtgtcgtatgatgccaatgacccatatcactatcctgtcattcgtgtactggtacgttcctctttgccgcctctctgcaggtcacttgctgaattgcgcgacagttggtccttaatgagcagttcatgatatcagctcataaccctgatggggagcaatcgccattgacccccttgaccaacaaggtcattaaagtcctttccatgcacgggaactcgtataagacgtttggagagaatatcatcctactaataaatagagaaggtatctcgcccgttgcgccgtttcgtccatattatgcgctgacacttggctagctgagacttcgttgcagctcctcactcttaaactcctatatcttatcttcacgacaccaagcacctatgagtatttcttcaccaatgacctccatgtcttggttgatattctcatacggaaccttcttgaccttccggaagaagcttcggctttgcgacatacttacctcagggtcctctatccgctgatcgctcatacgcaattaagattaccgccgcactacaagcgcgatgaactcaaacgtatgcttagcctgcttgtccgaggtcagctgactggtgacgctgctgccgactctgaaaagatcatgcactttgatgaagtcgacgaaacaactcgaaggctagtccttcgatgcgccgccgttgactggctgcgcgatgaacctgagccgcacgagtctagccggccctcacaaagggaggatagctcgattttgtctttcccttcaattgacagcgctctcctgtcggatgccgacatagggacgtcattggaatcatcccagtcaatcggttcaaacagtacacgggaaagttcacttgaagacttatcatcacctccaggcgaagaccgagaccgttcagcatctgcagacgagacaccacgcaagcataaccaaatcgagcggctagggatgcacctcactcctgcctcatcgtcttccctcagtgtggacgaaatcgcgtcccagcgcgaaaagccaggagtgatcacaccaagccgccacgacgggcctgtacccaggacacaagtaagccccaccaagcacaaagtaaaaccgctgcccccgaagacaagacgctcgcgcggccgaagggcaacagtagacgaaaccgcctcccctatctcgaagacaagcatttcagaggaaagggggaacagcagtcctagccctttcacaacaacacctatcatcactacctctgatcaattcagccccgatatcgaacggcgagactcatcctccacgattcatagtcaaactcacgccctgccagtccctccagttcaacatcaacaacccccaccaacaactaacaaaacaacccgccgctcagcctctaatccgcctccggcggtcccgcctcctcgccgctccacccaccatcacctccacttctccagccactgcacacccgttgcaagcttaagcccttcgcgccttccatcgcaacaaggtagcatcacccccactgccaccggcactcaagcccagcttccgaaccaaggtcaaaaccagagccacaagcaagctcaaaagcccgaaccaccacggacacgccgttcgggccgcaaacatacattcaccgattcgtcagacacgtcgctgtccagtcacagccaaggcgtgaatagtattagcagctgtgcgagcaacggcagcggaagtagcggtgttgccacaacgttcttgcatccggattatcagtatcagtattctcataacaattcgtctgctcctgctcctggatttgctgccgcggcggttgggattgtggaaagagaagatgggaagactgcagaacctgaatcaggcgcgaatgggcatcagcttatcagtgttgaagaggctttgcagaaggtctcgctgcactaatataccgaaacgagcgggtttggtcgaggcataatatcttaatgaccagtatatcttatatataattcctcctgtcggtatatgtctaactacttaatcaagtcgaaacaatttaaacagcctacatcatggccggcgtactctcttgccttttatcgataagactatggtagatccggtgtgctattatttcaggatatgtacatgtcctggcgacatctgataaagtatttaagcattggcagattgttggggggggaaaccgaacaagagacagaaatagaaagcccaacctcgctaaagagtgctaactcattgaactccaatagattcaaaaaaaaacaccatatcaagtgagccgttgtccagaagcgctcgtaatgccgtacgtcacggatccaaactaacagcctccaagcccgccgtcatgtcatttaccgcagtaacaggagcaggcttcttcctaggcgaaacactccttggcttgggcttaatctgctgcagtagacccttacacatgccgcatctatgtcttccagggtcgatgctcttggagtgacgtccgtagttctggcagcagtccacacaggtccagacgtatttgtagtcgatcttgtagttgtgtttcgtagttacctcaattcgactaccatagattgggtggtcttttagtgcttccttgcattttcttccccatgcctggaagctagcgccgtgtggttggttgcggatatcgaaatgatgtagttgcaagat

SEQ ID NO: 5594 - DNA, 4951 bp, Emericella nidulans
tgcgcgcaccagagccaccgcggctctggcgacggactggcatgtttggtgttcctgtttgttttacattttatcaacctcctctgcatcactcgagtcgactgcagaatcaagcgtggatcaacgctgaaggagaaccgtctatctcgataccgccaggcggccttttacatgtcgtgccttcgagggactcagaccaagcaccagatcgccagaatacctcctgcgccagcatgcttgagaaagagcaccaggtggggttttatcgggtatcaaatgtgtgtgctattgtggcaattactggttataagcctcgtttctgatataatgagctgcataccccagtctattcgtgaccaatacttcggtcaaggcgcggaacttcacgtcttcacccttgatcgtgccaactggttcgccagacttatagtgacccttgtcccgacatttctctatgcctatctctgcatcgacatcgcgtaccacttcctatcaatcttttgtgtgctgcttgggttgaccagcgcggaggcctggccaccgttattcgggagcattcatgatgcgtatactgtgcgcggtttttgggggtaagggttttggatgatttccggttccttggtgctaatgcttaaactcatcgaaacagcaagacatggcaccaaaacgtccgttggccactaacaagctgcagcaccttcattacgctgcgcgttttctgccttcgccgtccatctatcctcgagcgatatgtgcacctaggtctcacattcaccctgtccggcttgatacacgccatcggcgcatttatcgagtcagataaccaggaagcattgagtacgctcttcttctttgcgtccaacgcagcgataatcataattgaggacgcactccagcatctgtgcacgaaactaggcccagactcgcggcgcaaatatacgaccccatatacgacccagccacctagcgtctttaaattgatattgcaatatggctgggttctgagctggctcactcttgtaggtccgctttgggattatcgcatgctccgtgtgcactggacgaagttatggccagcggtttctgcgcctgttagtcaacacgctgtagtccccatcgccgctaaggggtgttttgtcctaatttcggggcttttcatgaaggttatttttaggattagcttgtgaaatgcgccatataacagaactgcaagcttcactcagagcaccgttatttagtgctgttatgagtatataggttgtaatgggtactagtctggcgacagaattttgatgttataaacttgattcgacactgaaagataatatattccccactagggggaagctccatgtatcaacataaatcttcaaattattaggctgtacatcctgagtcaataaatcacaaaaacgttaaaaaatcagcactgtattgctctgggcccttccagctaggcgttaatggagtggctacatgagactacgatccaaccatgaggtgcttgccctggataaggtccctagtccacaagcttgagacactctctcagcgctcccatttccatcagtacgctagttgccatctctttacggtttgtttatctgtagccttattaatgtccttatgtactgtaacaccgtctcctggagaagagaaactagccactcattccctgatccgagcctacagtcgtgcccctacccatcgacttcaaccaaacgcccaaatcaaactttctttcactcaaatcattcatatttccaactactgaaacacatacccctgtcctcagtaggtctgcctttagttcatcagcggggctgtcaggataaaccatccgacaagctcctggccggtaatttcccgtttcgtactccgcgagacgctcggcgtgcttcaacacgatagacaaatcccttaacgacacagtccgagtccgctccatgctgactctcgtccacaggtataacggcaggatactgttcccatagctttaccttgtagccgaagatccgggatggtcgaagctctggtacgctgtccagagttagtatttcggcgagcagaaccggatctgctagtgtgccgtggatgaaatacgctcccgctgccgatgcaaccgaggctggagttgaccgggagtgaaagagaaacccggcatcggaacagtcttgattctctgggagaaaggtgaggccttcagattgggatcctccggtggaggtggaggtggcggggtggaaaagctatgagttatagcttgttcgttgtattgatcagccgacattgttgtgagataactttcaaggtgccgcagtcttgcaaggcctggatctgaacgtggaaattggaatcttagtgttttgtgtcgtggttatcaaagctgtagtgaaatccacagttggtcagaggaagttggcatagaatagagagaactaagtgatcattgtctgagggagcgagctcatggacttagttacagaacagaaagatgggagatacacgtgtcatcttatatagccccttaatattggagtatcaactactccaactccaagcaattactccaactccaagcgctaagccatattcataacactccccttcattcaatagcgtagtaacataaagctgattgaatgccatatctatcagacactccccttggctccagacactctccaagacgaggtataggccaaacaggccggcaaggtcacagagacctaaaagaagtcgggcaaccaatgccctctaggagacaccaagtctacctaggccaccaaggactttcgacagatcattaaccagatcctctaggcgccaccaaggctacctaggccaccaaggactttcaacaggcaatcaatgcccggccacgcaggccttgatatcatgcaccagcttgcaggggtgcccagcttgcatctcactgagggaatccgtacggcttggcagatcactatcctctaggatcttggacgcccttctatccagcatgaatctatttccagggcagctttagggatcacacaccccaggggacacatccctaaaagctttcagaatcactatcagaatcagagagcccaagcttcgcaatctgttttgcaatcttggctggctccttctttagtttagtaatcttcttggactatggtctcttttccttgtcagattcctcaggacaatcctttcaaacatgaccatacttcccacatccataacacttgatcctttcctttgtacagttggccaagtcagtatataagggggcttcagcagcagtggtgggtagggttgattcagctgtcttaagagactcaacagcctggttgaaggataggtcttgaagcataagtatttgccaaaaggtctcatactttggcaacagccctttaaggaggacaataatcatcatctcctcagaaggggggtctccacctagttcaggaatttggccagctaggtgtcggaccttattgacagcagcaaggatcttctgatccggcttcattctccagctgagaaattggtctagagatttgaccctaaggactcagtccgttcgctcgtacgtctctttcaaatgcaaccatatatctccagcaaatgtatatctcttgacaatattaatatccaccggtgatattcggccgaggataactgcaatagctagtttgttagcctttttccatgcagctttcttccatagctttcaaatcttttcaacttcggttgtggcacttgtctcgatcgatggttccggggttgaggtaggtatggttcttcgcggggcaggggacaacgaagctcatggaggtaggaagaattcatcatcttcatcaacatcaggtaatgggtctaagccctggcggatcaggtagatgtcttgaactgggtaccagatctccttcccatcaaggactgcttgcatcttggtaaaccaagtctcagcattctcgtacgacaggatctccagatcagagaccttcagggataggaagctgtcagatgccatggtaggagtgaggcagtatctctagctgttgagtattgctaggtagggtttgtaagcctagtctagcggcccgggctcataaccaatgtagtgaaatccacagttggtcagaggaagttggcatagaatagagagaactaagtgatcattgtctgagggagcgagctcatggacttagttacagaacagaaagatgggagatacacgtgtcatcttatatagccccttaatattggggtatcaactactccaactccaagcaattactccaactccaagcactaagccatattcataacaaaatgctatccgggctgagcagcgaaaactgtaaatccgggttagttacttatgtacgctttgtgtcttcggcccctgagccaatgggatctgtacagctcgcttggcgcctcaggtgcgatcttagagtatacctattatggccttgtggcgattccattggggaggatgagattggtttctcattgatgttaggtggggaatttgtaacactccgctagctgactaaggctattacataacataccgagcctcccgcacaacagacaataatatacgtacatatgaggatcgaaggcggtatgtagcacataacaataccgcagggcacaggtagatcagtagatagacttagaagttatctgaggctagagaatgataaagagcccagtaggacgcacctgctgagccttataataaatattcttcagcattgctggttactcaacttctgtccatttgtccaatctcattcgctgtcattgtttaacgtacagttttttatttcttaactcttggacttacgccctattgagtgtatatccaggaaccaagaagcccgtccttatcttgggagatctgcacaggataagatctggacagtatatcgagtgtcagctaacgcga

SEQ ID NO: 5595 - DNA, 8033 bp, Emericella nidulans
tggggcgtgaggtggaaggtgcatcacaagtctatcgtcgtcggacgctgattcggagctattgtccgagtcgtctgattcttcgctcgagcaggtatcactcgatgcgtcagactatgaatccaggtcggaatcttcagagctagactcatcagaagatgagtcgtctgacgtcgactcgtccgagctggttccttctgagctggtatcatcggattcagacgtaactgaagctgtgcgttttgttgaagagggaacatcaagtttcatctcggataagagcaggcgcaagagatacagcggtttgtgctctccgtcaccaaccgcaatggagtattctcttagtgtcgtcggaagagtaaatctttcatctgcgtggacaacaaccccgctctcatcatcggctgtagtagtttgatcagagccaccaacaacaactaatcgcggattcgtgagccggagagagttcaactttgagacatctttggtcattgtggcactgaggaccaccttcctaggctctttagtctgcaaagacatcccgagatccgccaggaaccgtccacttggtccgaaagccccgtacgccttgcgtgcatcaagggactgcataacgacatccacccactcctgaaagctctcgttaagcaatcggtcagcctcgtcaatgacgagccactgaagatgcttcaatgtaaagccttttgtatagcgaatatggtccacgaggcgaccgggtgtacagatgagtatatcaacattgggctcacccctgtggatatagcctggtaatgtctcacccaagtccgtcgtattcgagatatagtcttgtagactgaagtcagcccactcttcccctgttaactccgcttttcgtcgtgactcgacgctctctgggctgtaaacatgttcaatacgcataagggatcgctgttcatccttgatggcaacatttcccactgcagatccgacgcgtagacctgttcctgccgtgcaaaactcacaggcttctcgggcttgtttaccagctctctagttggtaccacgatgagtccccgtagccgtggagctgggatttgctccagctcagtgacgagaggaagaacgtaagaaagtgtctttccagaaccagtagcagcagagacgcatatatctccagtgtggttgttcggccccttcagaagaagtggtataacagcggcctgaacagcaaaggcttctttgtacccattaacttcaagaactcgaagaagtttgggctcgattcccaagtcggagaatttggccctggtttcagctgatgctcttactggattagccagccaaggtggaagagaggaatatgtaggcttctcagcttcttcgacaacgggttttggttggggaataggctccaatccttgtgctatgactggttgagcaacgttctcgtcttgaactggcgtctcatcctctcgatgtaatttctcagtggccttcttaacttttgcagacctctcaaactttgataatatacccgcaaacttgttcttcgttcgcttcgattcgtcatccctctctgcatgctccgcagctttcggccgcttcggcttttttgtctctacggagtctttgttggtggccaccccggagacatccggcggtacagtctgttctgctaaatccgtagacttctcatccgactcactattgtccttgggcgtttttcgtttctttttgagtttgatatcggcacgaacgtctggcgatttcgtcggctcgccgatcggcgaaacagcacctttcttcttggtcgattccttcggagctctttcaacggaggccgagcctgaaatcctttctcgcttcttgctttctttaggcgaagctggcgtagagggtacggttcgatccttctttgatttcttcgtcggagtggccgaagcgacggtggagccatcgaggtctctttttcttttatgaggtttctttccgctcgttggggtagtctggtaatctaatgagatcgcatggctgaccatacgatcaccagccatgatcaagatggttcctgcgtccaaggttcttcgttataccaactggtcgcagcttctgcaatcgcgagaaaagcttctctccaataatttttagcggggaatacgactggcagaagctgcaccgcccagctcaccgctagggtctggactctggagtcgcagatcgtccaaagtatcaagcgtgtctccttttgcgacaaaacattcttcccgtctgtcatcgctgcgtgcaaaatggacaggatctggtcactgggcgcaatactatatggctgacatgttagatttgctcccttgttaagatcttggcatctcaaaccgtcaatatgccttacaacattgcgtaagtcctcgaagcttggccgagatgcgctactaactatatcgccctgcagcatggtcagtgactttttcttcccccaaccaggtcggtcacatccacccaaaaccctggtagcacgctaaactttacaggcggggttgaaagtcacatttaccaactgtccaccgtaagaattctttaaaaagccttggatcgatcagtcaatactcatattatactagaaactcattgaccggggacataaagtcatcatcattacccatgcctataagggtcgcacgggtgtccgttacctgaccaacggcctcaaagtttatcatgttccatttttagtcatataccgagagacgacgatgcccactgttttctcctttttccccatctttcggaacatcgttatccgggagcagattcaaattgtccatgggcatcagagtttgagtagcttctgccacgaggctatactgcacgcccggacaatgggcctacggactgcatttactgatcattcgttgtttggcttcgccgacgccgggtccattctgaccaacaaattgctgaagtttacccttagtgatgttgaccatgttatatgtgtcagccatacttggtgagtctgctgtgcaagcttctcagttcagtcatcttaatgttgcctgcagcaaggagaataccgttctccgggcctcgttggacccattaatggtctccgttatccccaacgctgttgtcgcggaaaatttccggccactgcatgctacggcccgggcgaatgagcggcagtctggcgggggatcacagatacagcctcctcccaggcctattggaccgaacgacatcattaccattgttgtgatatcgcgtctcttctacaataagggcactgatctcctaatagctgccattccaagaattcttgcatcccatccgaacgtacggttcatcattgcgggctcaggtcccaaggccatcgacctggagcagatgctggaacggaatgttctccaagacaaagtagaaatgcttggggctatacgacatgaagaagttcgggatgtcatggtcagaggtcacatttatctgcatcctagtttgactgaggcctttggaacggtcattgtagaagccgctagctgtgggctatacgtggtgtgcactcgtgtcggtggcattcccgaggtgcttccccagcacatgacaacctttgcaaaaccggaagaggacgacattgtgctagctaccagcaaagcaatcagtgcattgcgatccaacaaggtccggacggaacgattccatgatcaggtaaaggtcatgtattcatggacggatgtagcgcgtcgaacagagcgggtatacaagggcatatctggggacatcagcccacaagagttctatgggtactacccgggagagatccaggaagccggcgatagagttcgcaattttgccttgattgaccgattgaagcggtattatggctgtggagtctgggccggaaagctgttctgcctctgcgtcgtgattgactttctactctacacgttccttgaaatgtggtttccacgagcaaatattgacatcgcgcgaagctggccaaagaagctgaacggaattgacggggatactgcgaagcccgaaaaagagcgctccggttgaattcttgttttcccattttacatttgttttcctacagtccggtcacgatgatacccattataattgtttcacgttattgtacattctggtgctaataccacaaaattacatgcaaaaacttctgattcattcttttaaggacgagaaccctccgcatgacttccctctgcagcggtaggcttcttcgagaggtactgatccgtcctagttccaaagtcatcgcgcactcccttcatagccccctcaagtccccgaccagggttcttattcgtatgctgcccatcatggcgcagctcagcgctactctgtccagaaccagggtgtcccgcaccctggtgtacgtctttcgaagtcgcgcccattagagtcgactctgcagaagtcctcacttcctccttgccgtgactccgcaggacattgggattcatggcctgctcaccgctatggtcgattgggttgggttggtaggaactactggccggcgcagtaccaggcgggtgagtttcggcatggaactcgggaacgttgtttgctggaaaggcttttacgcccggagcgtgctgcgggaatgtatgttaaattatgaggctcttatagataaaggaatcatgaagtgatggcaaaccagactcaccttgtcatttggccaaggtccgttgggctgctggtagttaccagatggcgcaggaccgggctggaactcgccctgtttctggttgggaacgttgctgaagtgactcattatggatgtttatgtataatttctctctaattgtgttaaaaaggtgactgtcttgagaacttgggacttctaaagatattcgatagattaagctaactctgcatatatatgcggaattgccctaatcctcttgtctaggcgtgacgtcaaccaaccactgctgacttcataatcagatcatacagcctgagcaacaaaaggaagctgtctgaatcaagtgctgatgagttatgatatgctatgacttcacctggcgcttgggataaccaatggtggtaggttgtagcctttaaacacgaggcacaagcccggacaatccacggacggatctgttctgtgtaggccatgatactgtgtagcttaagccggattattgttatttaggggtattaacgagaattattagcatgtcctccctatatttgagaagatcgaaagtatcaaacaaactactaaggtatcttcgcacggcaagataggaaaaaaagaagccaaccccagcgccaaacaaggtattatagaaagagatctccataatgaaaggcaaatgatatagatcacctcataacgggcggcctcccctccttgttccacttcacccggctctgcacccattcgacagcctcccgtactcctgaacccataagagcactgatgggtaaaacacgactatcgcgaacgacgccgcctgtttctccctcaaacacctttcgcacgaacccctccttgatccggacaacctctactgagtcttcccggtcttgtttattagcaagcacgagaataggcacaccggcaacatcagcattgcgaagcacggattcaagcacctgacgacactcgtctaatcggccgaagtcactatcgggagcgttgatgctggccagttgctcggcgaaagtgtttacgctatcattcccaccatcgccgtcaccgtcagcatcgacttcgcgctctgctgatgattccgccgctcctgatcctggcctgggtgtcgacggtttccgagagctactagcccttgcggatagagaaggaaggcgcgtaatgtcaggattctgtccgacgtctgtactgtccaccacaaagatgatcgcatgacagctggaatagtagctctgccagaggttccgcatggaaatctgtccaccgacatcccagatcttcaagacatgtccggcaatgatattgtgctgacattttgccctacggttggtacggtcctgccggggttgggcgcaggcgtgccatcaggtcgatgctggtagagggctttgatctgggaaaggagcgtagtcttgcctgcattatctaaaccgagaagaaggacggagtattctatatgaccgcacgggcgttagtaggcatatatagggggcccagcatgctacgcaccctctttgctggtagcgtacatgtacaaagacttggccagatggtacatcttgtgctgcagcgggcagtccgccccgatctccgacggcgcagcctcagtctagggattattgaggtataagcacgaatagagcggagaaatcatgacagtttgagagccattctctgctaacgcatcgcaattgtgtcgcttgatctgaagattgagagcgacctgaggccaacgcgtcagccttgtttaggaaggtgacccttaagatgactaatcctagcccttagccctaccttcctgaaacagacgtaactaccccgcactgcatgattattaattataaaaatgacttcattattaccggggcgggtcaaatttccagtgatgcttgctgaaaagaaacagatcctttcggagtatccgcagcattgtctatcagagtttagcttgaaaaagcaagtctacaattgctcgtcttaatttggaggctgatggcgtgttcgcctttcaataataatttcagaagcaccggcggctcgccgcaagcctcccacactgcggccgtggttcgggcttccacctgagtacgagacccatgttctagcctcaacggcctgtcgagatatcgagcatcttgactttgggtaacggcccggttcaaaggctcctctccgctgaaaaaaagtccctgttttgtcagcagtctccgcccccgtttgcggaatcggtcactttctcccactctcttcgaatctccaacatcagccttcccctcatggcacgtcagaccattgtccattccttcttctaatgtaacgacgtctctcatggctgttcagttaccttcccgtcgctcgagggtagtactggtcttcgggttttggctttaactttattgttcttcgcgcattcttttagctgtagctcatgcccccgcctgaccgtgttgctgggggtgtatataagccttccatggatactgacaccattattatcggtatgtcgccatactagttgcctgcagttctccagctgcccacagaatatgtccccttctcgccaatggctatgcttattgacccggtgactctccaggcaacgggccgtctgccatgatcctctcctatattcttcacggccattttccttattattcgtctcagaatccacatcccgatccgctactgcacgcaaagctgaaggatgcaccggcgctgctgggggccgacgtagatgcgttaactgagcacttctcagcctcgcgtttgtcatactccactcaggctctccccgtaaatgtgctgttggatacccttgtccggccaagtgtcgacgttgaagaactgcaaagtatcaccaatgtggaatggcgatatgagcctgaaaaagtcgtgcctcacatagtgctaggaaatgcgccacgacccggtggtcaatggactgagaatccgatgccagcgagctgggagattcagacactgagctatgcctcaatgctttcattacctggatattctttcgccgaccattaccgcaaaactacagggaaagacctccccgcgtacacccgacccagcagacagcagacggcggactattttcggatgtatcccgaagccgtcgggattgatgacgccttctactctaacgaaaacgtatggggtgtcacacgaatccaggatggattttttattcagtcgcataatatccgctgcaaacatctagtcttggcgagcgggtatcattttctgaagttcttcagccacgcccgcttataagacctcttacatcgtttcagccgattgcagaaacgccattgcttgtcaaaggatcccccttctccgcagctgatgtgatcattgagggccg

SEQ ID NO: 5596 - DNA, 4251 bp, Emericella nidulans
aacaaggacgtatcggagtgatgctgtgcctgtaccttgcagtcgctctgaatcccgtcggatgccgaccgtctcgcccagccaatcaatggagtacaagtgtgcacggacctgttctattcttattatccaatcctgcccagtgccataatgccagcgttttcaagtaccaaggttgaatccaggtacccgcatccccttgaccggtcgctaggctggatacggagtagcagatattagccgggacagccagcgccagatgcggtgctctgatcctatcatcctgaaagccttggattcaactcatcggtaaggaatccgcctgccaccgactcgatactttctactctgtatgccttaccgcgtggctggtggtcaggcatcctctgtacagatccgtacggcaagctttggagcaggtaattttgacctaccctagacggttagactgcaaaccccatccgccgataccgactccagtcgcgagacttgcgaccatcctggcatccgatttccgtgggcgactgtggacggtggaactgtgcgtcccaaccgctaacccacaacaggactctctgtagttactccgtacagttcaaccatgcttgctcgtgcgtggagtcgccgactgtggacagaaccaaactgtcgcccttggcccctggcgtcccagacttcggcctcgcatgccccttcccactactgaagactgaagcagtttggatgcgcgcgtaccatctgaaacatcttggaacaggtctatgtcaggacgatgccaggacgatgccagacctatatccggcttttgtttcttttctgactgctcatgcgatgtagatagttttccggtagtgggtggattattattgactccattactgaatcaggaaactggacgctcagagaacacgacactagacgccacttgggggttggacgctagattttgcagcatggctcgagtgggatgtccgcatcaagacgaatcccgtcaaggctgaccgttggaggtctggaggttggagatgcgcgctcgtcgtgcacagaggttgggttagcctcctaactggaagagcaagagtcatcggggtcggggagcatacggtactgagtaaggagatgcagctgatgcagctgatgcaggggccacgtcggcgccattggctgactaaatcgagtgttatccagcaaaagatgtgttggaactgcgggtgattgtctgaggatgagagtctcgcgagagacgatcagatggcatgatcttgaagatctgaagagcaacaaggtcgacaatagagccagagcgtctcggtatacagatgctgcgaccgagactagcgagtgctcgtagcctcactccgtattccgtagtccatcgtgtgggtttacgattacactgcgcttaccgtaccaatgatccccggactataccccttcgggcggcgcagcccatccctgctgacaactacgactggtcactgaggattcccccgacccagtcaacaccacgagcgctgagttctggccgactcgcccacttcctctcctttctccccttccctctccaacccgtcttctcacatcgttgtgtttttcttcatcgtcgctcttttgacctttacattctttttttttatcttgggttttccagttccactcttttactggacgattccagcccactcttttcgcgtaccttaggacgggtgatttcgctagtctatccaccagacagacattcgtcgtatagcaatctgatgctccttggacccccagtctcgaatcactccttctagtcgcgaagagctatattctctttgtcagtagagctgcctaggccagctacgtcttctttcgacactttctaccacttcaacgcttctgtgacggcgctcaccggtcagctttgcgtctcggtagtgaatcccagccaaagcgcttccattcctttgattagacacgaaccctctggcgcttgaccactggagatatttcagaccatccacgactgtcggccggatcgtcatcttcaccctttccctcgtcagccagtaccgatcctggccatatctcctttactccactttcactcttcactcgatccctgcaaacatgtcttcgatagacactcccgccccgtcgaccgtgtcgattccgcgactgcgcattcccacccaaccacgtcgccctcatcggccacctcgaccccttccccgtccacttcgagtgccaccactgctccctcgacatcagctcgacgtccgcagcggaagagcacccttacgcagcagcagaagaataataagcgtcaacgggcgacacaagaccagctagtacttctggagatggaattcaacaagaatcccaccccgacggctgccacgcgagaaagaatcgcccaggaaatcaacatgactgagcgctcagttcagatctggtttcaaaacaggcgcgtaattagttgccttgccttttgttctatactaacagaggttacaggcgcgcaaagatcaagatgcttgcgaagaagagcatcgagaccggcgagggctgtgattcaattcccgagtcaatgcgccagtacttagccatgcagttcgatcccagcaaacccggtgctcgagacccctttggccgaactggcggatacggagcacaaggcggagctcttactctgtagaacaggatggagccagctaccaatcacaggaattgatgagcaagaagagacctcggccagcctggctcatcatggtgaagtcgggttagttccggtgcttcggacctcgaatagccctatttcatgtgcctctccacacggaagcagcgcagcaactgttggcttataagtagcgacaccccaccctaaagattaagaatacaatcatggatcttcactccaagctgcaagccgcctggtatcggctcatcaacacatacaggcctggtaccatcgagctgacggggtcgatcgctactcagaccgttggcttcattctcccagcaacgctttacctgctgatcgacactctgtttccggagttctccaagcggcacaagatccagagtgcgggccgacaaccgactcgtccacagatcttgcactgtgtgaaagtgacattgttcaaccatgtgtgggtggtggcaatccacgctatgctggtctactgggctggcctggaccatgccatcatgaacctggatccgatcgtgccgccgtggagagagtttattgtggactttgtctttgcgctcttggcccgagaaatattattttactacatccatcgtacgctgcatcacccgcgaatctatgcctatatccataaaatgcaccacaaatatactacgcccgtggcgttcgcgggggagtatgcccatcctgtcgaacatgtcattgcaaacatcctaccgattacgctaccgttatatctcaaaggcgcccactacctgtccatcatcgcatttgtcagctttgagctctgggaggctgccgctgaccacagcgggtacgactttctgaaactgccgccggccgaactgcacgacttgcaccatgagaaattccgcgtgcattatggtactattggactgatggactggatccatgggacagacgttgtgggctgggacagaccagagacggacaaaagagatgaacaataaatgtaaatgcgagagattcggctcgcgatatacatcacctgtctagggccgtctgacaataggctgagatgttgcggattgggtgtgattttcaagcacagtacaataaccattatctgctctctcttctgtctacaaataaaggatatccagtaataactaataagccctgtaatccatttcaattaggaatacgcagcctgaacgcagtctattgtactgccaattatatgtccattccctggctgttctgtttcctataggtttcgcaaataacaggctatccgcatcattcacggcctcgcccagcgaaagtccttatccatagtccagctgtgactatatcgtataaatagccagttaagtcatattctgataggctagcctccatatttaccaagtcaactagccgaggatgaagatatacgcatgagaatcgtctactgcactagtacagcctaggggaccctgcagcatatatgcgcacagttacaaagttgacgctcatttgccagggtacaggtctatacgggccatcgaggagttagggtgttggtcctggtgcatactgttaagacggtccac

SEQ ID NO: 5597 - DNA, 4635 bp, Emericella nidulans
  unsure (1)..(4635): unsure at all n locations
caatctcacccgcatcattctcgtaacaagcgttgtcaaccgcagactagctctgtggctttggtccagtgagcatggtaggctatcaaagcacgatcccacctcctaagtcataacagcttcagtcaagactgctctatcatgtatcagatatatcgacagactgagttccagccggggaactctcggaacattcaagaaatcaggtctgccaagaaagtcggtcagggaccgttgcgcttctcggcttatgtctcttctaatcttcaacgtagatcattgtttacccccagataactgccccagctctgatggagctacattctctcccttttcgttgccacttttggggttcccaagatctccattaactgccgattgaaacgtcggcgtgatctcttgctgggagtctgttgagtctgggctagggtattcatcatcatcatcagcttcagcttccccgttcaaggaagtgaggcccccttcaatgtcgcggactaaacgaacaaactcctcgggaaccaaaccactctctccagttcgcggatcttccgcgacaagccacccttggccatgacgatacgagacaaatatcacctgcccctcagtcagtggaagctcattctcgtgctcccttgtgaagtcgaaaagcgctaccgcttttccgtgcatctcctcgtccggacatccaactgaaaactgaaattcgcgcgaataacggtgcgtcccagcatagtcttcctccgaatcaaacccctcctgtcgcccgtaaccgtgattatcagtataagagccaaggtaagtaaatcgactctcgtccggcgggtatgtgacaaggtcacccccaggcccatcatcagcgtcgtcatcatcgttcacataataggtctcactgccgtccgcattcatactgactagccttccacggtcgtattccccggcaatactcatatgacgagtataatggttactgccagaaatcttgcctcctcccccgttcaggtcgctccctgtagatttgtttctgcgatgacgtggtgcagaaaacacagggctgtgcagatcttcatcttcactatacggcggcccatcaccaaatgacattgctggaagttgctggtgtccatgaccagtatcagtgccccaaggctgtgttgaccactgaccccgcgagctgtcccaggatgctggagggtcggataaccgtcgattttcgcttacagggcttgagagcccagacgcggaaggtggaagcggaccgtaatggaaaggatggatagtgggataagcaaaatcccgcaccagagcatagggcaagctggaatgaaatatagggaagacatgtgatccaggccgcgaccggctttgaggtgatagtagcagattggtatatggtcatccgccggcaattcaaggatcgcgacgacgcttccaagaatagccctgaattgccggtcctcgactatccaactgtgcagatacgcatcctgcctcttctcgccacggcattcgcactgcactacacgggtttggcaatgcagaatgtgtactctcgtactcggaggcagattgaatcgggagattttagttctcttgcatacatgcatagtatgtcttctgggctcaaaagcctatgcacaactcttgcagcagacggtatcgagacctgtcgacgggcactcgggggtcatggatacggcggtgggagcgggcttgtgcagttgaatgcagactacttatccaaggttacagtcgagggggacaactggatgattacgcagcagacagcggcctatctgataaaaaagatgggctctgttgtttctgcatcagtggcaaaggtggaaaaagacgaaattgatgtacagtttacgacgtatttccccaaaatacagggaggagagaccgacagaggtgaccggcaatgtgattatgatatcctgcggaatgatggcgacctggtccaggctttccagcatagggctaccgctctcgtgagtatcactatgcatgccgagtacagcatgccgagctacagtaacacgagacttaggcctacgatgtctaccgagagcgcgtggtgagaaaaagaggatggacatccatcatgacacaattacacagactgagcaaaggtactgaatctctcctcgttgagcaggaactaacatcctcagcacaatcacaatccatccttgtaacgcagttttacaacgccctcagctcagacacggagctgtctgcggcggttaaagatgtcctctgggatctctaccgcctcttttctctctccacattagagactgaaaaatatgagtgtacgttccgctatatgctgcaaaaaatgcagctcattgcgtaaactaacgttagatagtcttttcacacaacgccgcatcgaaacacgacctcgacgcagtcttggaacgcatcaatgagttaacgtcccgtatacgcccacatgctgtccgattagtggacgcatggcagatcccagactatctgctagacaggtgaattgccatccagagctctattttactcagagttaaaacggctgactgcggttttagtgctcttggccgctacgatggccgggtctacgaagacttgttccaccgcgctcatcgtgttaatcccctgaacaagaccacagtcaacccaaattactgggaggatgaaattgtgaaaaatcaagggccaggaggagaggatatgtggagtatacttgcgaaactctagcagttctagataactcaggaatgcgaggattacgcaaggacactttgcccacaggtcacaccaagcttaaagcaacatttaagaagaaaatgcatgccggaatagacgagaaaagacgaaggaccgactctgcctgccaacccaataacagtaaacttcctttattctagtggttgctgatttaaggaccctttgtgccacgcaaacaaacttcttatacagccctggtgctaatgagctccaataggtaggaataagctcagcaactagaccacgaacacctgcttgctgaccctatgattgaaacgcgtgggaagaatgcgatgtaaaactgtggcagagagactgatccatccctaagctttgggctcgagacactaagtgtagatcgccttaaggaaaatgatcagccgaggttaaataatatgcaggatacgcgtctccgagcgtgaaccaactactggcggaaaatagcgccatggcaggaaggctgattaggatttgtgcagtgggggagttgggaaccgtaatgatagcgttctaccgagtaggtatcactaatatcgatatccttttaccagacggacaaggggagtcggctgagcttcggacgtaaggctgactctgattggggggccgtccaggcgctgccttttatacctgagtaggtaggtgagcccgctctctcagagactctgcttaacgccttgctgggccctttggtggggagccggccgagactccttggacgtttctccagtgtgtctcattagtacagtacgtacattgacaactgcagatctcgcaacctgatcaacaacgctatagcacaactaccccttcttcagatttcagcacaggattacagacgacactcacaatggcagtctcggcagatgaccgcttagaatggaagcttacccagcctggactctgggagcgggatatcgatgaggtggaggagttttatgcatcgctggcaaaggcctatgaaagaacaggcagggtcttctttgctatgaccgggtttatctctttctcagtcccggtccagccaggcactgcgttgcagaaagttgagaaaagggccgaggaagcgctgaagagtgcctggatccgtcttcgatacaaccatcctaccattgcttccagggtgctgtatgacccggcccagcgaaggtacaagaaggtctacgagaccattatagacgatgcatcgcaacaccagtgggtagatgagacctttcaggttgtgtcagagaggatgtccgggctggattggtgcaacgccgaccccccggtgcccgcgctgccaacgctgtttctcatcagggctccagccacagacgaccgggtcttccgcgctgatctggtcctccgcgcgcatcacgacgtgattgatggggtagggactttgctgctcttccacaacctctttactctggccgccgaggcgtacgggcaggtcagctacgagttgccgcaatttggggacgagtggttgaacctcagcccgccgctgcgtagggccgccgagataccggatgtcctctcgcccgagcatgaagaagtcttgcgcgagattctcgagtacaattctggggtcaagggagaggttgaaatagcaagcccgccattccagcggcacattgccctccccgggaagcatcaacgtgttgcaatcacattatctgaaagcaatacagcgagactgttgaccaagtgtcgcacgcttgggctgagcattacgcacgcctaccatgcttncattgcgctgacgggtggtgccctgactgttggtgcccctcaagaacgcaaagagacagagcgtaccgctgcgggatatcagttactggctgatcaccgagcggcattacttgaaggacccttcag

SEQ ID NO: 5598 - DNA, 3054 bp, Emericella nidulans
aacatctaggcggcaagtatacaccatggcctccgaagtcgaaaaaggggataccccctcgcacgttgaaatgatgtcagacatcaagtccgggtcaacaacgcagattgacctcgcgatggatccaatcctcgaacgcagagtcatccgcaaatgcgaccttcacgtcgtcccaattctaacacttttattcttattcgccttcctcgacagaatcaatatcgggaatgcgcgattgctcggcctggaagaagaactcggtatggaaggtcgccagtataacgttgctttgtttgtcttcttcattctgtatattcttcttgaggtgccgagtaatatggttctgaaaaagatcaagccaagctggtggctcagtggaatcatggcgggctggggtattgtcacaatttgccagggggtgacgcaaagctttggagggctcgtggcttgtcgagtgattattgggggccttgaggccgggtttatgcctggtttgtctctgccacctttctataccccatccgctttaggcaatagtgctgacttctggataggaagcgtatacctaatcaacatgtattatcgccgccacgagcttcagcggcggctgaacttcttcttcagtgctagtatcttcgctggcgctgttagcggcgtatgactcttctcctcccctttcctttacttcagcatcaagcaaagaaacactaataccgacgagcagttcctcgcctatgcaatcgccaacatggacggcaacggcggctacaaaggctggcgctggatcttcattctggaaggcctagcaactgtcgtcatagccataatcgcaaaattcatcatcgtcgactggccagagtcggcaacattcctgaacgaggaagaacgcgcttgccttctccgccgtctagcagaggaccagggcgaggcgcaaatgaaccggttcgacaagaaggccatgaagaggacgttttccgatccgaagatctaccttgggtacagactcccttaaacgtttctcctgtttcatgttttggacaggacacagtgattaatatgcgtgtagacccatcatgtatttcggcatcgttaacaccggctatgcggtctcgttcttcacacccacaatcctgcaacagctcggctggacctctattcgtgcccaagtaatgtccatccccatatacgtcgtcgcgatggtaatcacgctttcaactgcctggctcagcgaccgcctggcccatcgttatgccttcacactcgcgggagtgctcatcgccacaatgggctatgtcatgctcttgtgtcaaacctccatcccagttggggcacgctacttcgcgctcttcgccatcactggcggcggatatctaactcagccaatactgatgggctggttgagcaataacatggctggccattacaagcaatccattgcgtcggcgatgcaaattgggttcgggaactgtggcgggttagtggcgagtaacgttttctttgatagtgagaagcctgggttcagaacggggttcggggtgagcctgggaatgacatgggtctgtggcgtttcttgcgctgtatttctggcatgtcttgttagagagaatagggtgagaagtcaggggaagagggattggaggtttggtctggaggaggaagagaagaggaacttgggggatgattatcctacgttccggttcacttattagtttagggcaggtaccgcgatattcaattagtcctatggatatgagcgagctcctgccagttaggacagatcgtcaacctgacaggtgccgactcagccctgacattgaataagatggttacgcaggaagactgtagacatcatatcctacggtatagcaaacccggtaacgatggaatttctctacgacagcgcctccgcaccttgaccttgccttatcctctcatcttcccccctcatagccctctcccaaaccttttgtatctaggcaagataccattagcatatcctcctcctctaccttcttacccatccggatccacgggttcacatacatcataggtataaacccatccaaatcctgcttgcttccccaccttctctctaactgtatgctctaccgcctcacctagccccaagttcagctcctccatctcaatttcagacttcttgaacctatcaaggaccctgtacaaggatctgtagtgcggcgagcggacacggttgtacagattgagggcgcaagagagattgtggttccggctgtttgcctataatccgcgcgagagagggtgtagctgtcttcgatggcgaaggcagcacctgcacctgttgcatagataagttatggttaatccgtgtaaatatgtttcgaggagggatttaggaaaaagcggcgatggactgggtatgagggtcaccaagggcgccggttagtactgactgagaagcaaagggggacatatatcaccgatatggcgatgaagagctgggggctggctggacataagatgggaagcatccccaatcagggcaataagccccttaggtacaatggattctattcgtgccctttcgtagagcggaaccgctgggtgtccgttgcatagctgagggtttcctggacaaggggcccaaaatcctgattcgtgttagccaactgccttcagaaagacgtttatgatatgctatgccggatgagacgcagtgtgtaccctccacggcctcataaactcctccctgtccgccactctctcaccccaagtgttgtgctctggttccggcgccccagctttacaggtaagctcagacagcccaggcctcacactacatgtataaacccagacctttgatccataacgtcagcgtcagggaacccataaatagtgagcaaaatctcagcgggaataaagccacgtaggctgttttctctgtatagagcagcttgtgctccggcaatgcgaattggcggacactggagtggatccatccgcgccgatgagcaagtcgactgtgccggtgtggttgtttgagaagtgaaggttaaaggtagagagccggtgggc

SEQ ID NO: 5599 - DNA, 3525 bp, Emericella nidulans
  unsure (1)..(3525): unsure at all n locations
ccgagccggggatgttccgacgccttccagactcttttacttaggcacgccgcaagcgtccgtagactcctcaagaaccaggatctcctagtatttcaagtttaaatcccatgggctcgcaccaagatgtccgaagattcctatcttgtggcgcctccaccgtccatgaagcgcatccctgtaagccgcctctacccctcgttcgtcgtcgatcaacccactaacagcacagcagaaagcatgcagcgcgtgccgccagtccaaggttagcccgttctggctgtgacgttagcaatatgcagctgtctaaggtaatctgcaggtgaaatgcgacggcaagcgcccgtgtacgcgatgcgagaagatcaagaagcagtgtgttttctttgagatcccaaaggaccctataagcgagtgagtttgatcctccttcctcccttcttttctctgccaggtggcaatggatgatgttgacaaagtaggcggctcgagtctgtcgagtccgaagtccgtcagctgcaggggcagctcgatgagatgaagcaaatgcttcgttattcgcaagttcaaaataggacgcagggtcaggccgggccaataactggcgctgagcagccaggcgatgccgaccagcagaggtgtcgagagagtttctcgacaatcgctccgccggtcatcactgagagtgctaccattctgggacaggacagtatgcccttgcagcctccggttcaggctccacagggagagacgcatcggccggcaaagagaaggcgctctgggtttgaagtcagggaagagccgatttccgatttcatcagcaagggtctcattacggtggactacgcggtggactgttttacagcgtgcgttcctagacctgattgagtgcttgaaactaatgctcaatagattcttccaaggctgtgtatgtgctacgctggggatatcccatataaactaatggctggcaggataggtatataccaatcttcgatccgaaatacgacaggttcgagtcagtgcggtaccggagcagcatgttgctgaatgccatctgcacaatcgggagccgcgtggagtcaagtacgtgagtcgccaaagcccaagtcacacgcgctgattgtgtaggatccggctcccagctgtctgagctgctccagacagagctcaagaaatggatcaacgtggtgatccaaaacgaagcgttgaattgtttggagtctgttcaagcgttgctggtgatcgcttgctactccgccgaacgctccctgatcctatcatttgcgacccgcatggcgctcgatttgggcctcgacgaagcattcgaggagctaacacatcgattgactatgaaggatgtggagggaaatccggaaaacgccggcttagttcaacaggaaaatgaactgatgcgcaagtctcgaacgtggttcgggctgctggtcctggagcatatgtaggtggactctcaaccgaagaaatccaccgtctaattattctcagattcagtctggatggtggtaaacccccgggaatccgtatgacggggaatgcacggcgatgccgcaagttgctccatcagccttcttccaccgtcttggatctcagattattctcacaagtcgaggtacgtcgccgctccgtggagtgaagtatggactaaccctcccagctgaacgtggttagaggtctgctgcccggtccacgaacggaggaatcataactaataagggccagtacaaatcaacgaaaacttaggcggcaaaacgcccatgacccgtgctgatatcgcagcattcgtgcaggatgctaagcttgatttggatctttggtttgagtacgttaattcttggaacgcgcatgagccatctctaacaggcgcagtgactggcagcgaataataggtacgacctgtcacagtactacctaaattcgggactgacaaggcagagaacggtcttggcccagatgatgaagaacgagggccgctcttggctgctcttcgcgtccaaggttgctggtctgagatgatgctgcattgcaaggcgttgcggtcgatgggagtagagaacgttgcgttcgtcttccagttgcctatactttctgcacagtactgattgctcagggccatgtctcccgtcgagcgaaagatcctattaatggcaaaagccagtgcccgcaaacacctcagcctcatcacgatcgagcctgactcctacctcgccaagctcaaatacgcaatggattttgtctgggccaagtgcgccttctgtttcctcctgctactcaagttgtcccgtcttcttccagaggggaaggaggagcaccaggaactcctgacgcacgggaaccgacttctagacgacctgacaaagagcgtgtcgaacagtaatgcgatcagtaacggcaatgtttacctacagatccttcgattgagtattgaaaagtacggtcgcacgcttcaagagaagggtctaggcctcgagggagaagccgcagatgcggctcccgtctgggagctttttgatgctcaaacggagtttacgtctttcgtgccggaacagttcgtccgcgagtggattttcccggcctgaacctgttctatttcccgacgacatggcaggacttttgcgcagatttttcgttggctgtctgatcgtccgcgcagcagactcatcgccggaaaatagcagaagccctatattcttaatcccgagtcatcttaaagcgcaaaacctagcagggccacgcgtagccctctaggctgtggactacgacggaggatgagtgagctgctcagtagttcacttcacaaaagccaatggaaacacgccgtccgatgtgccagtgtcggaatgccaaggccagtcatttagcagctctgccggcaattggaactgagcgattgggtcgtccatcccggtcattggagcatgcataggcgtaatattggattgctggtagactccggacactaggtcgtcttggactggtggattgagaatcgaggtcggccgcggttgtggtgcaaaggcagtagacgatagcttggtcatcatatattcgtcgatgcgattgacttgtgctttaaggcgctcgcttgtgccagtggatcggcgcaggcccgactccaatcgatgcagaaggtcggccatctccaacaggagggtgcggacacgttggtaagacacttctgacagactgccttccatcactgagccaaggatatatcctatcccaccgaggtggtgtaagagtggagagctgatagctttgagatactcaacaggcaccttggagaagacactcaagacctgaccagcgacatcgcatttctcatctactccttgctcctcattcgaggagaggaccatccgcagcagctggagagtcgcttgcatattggcagactggaagccgaaaatgtcgtgggctaggtcttccgtaaccggttgcgtttttcggactgnngaggtagcgacgagtacatggcaagacgtggtccatgagccacgagcctgc

SEQ ID NO: 5600 - DNA, 5552 bp, Emericella nidulans
tgtatgccaactgcgtgccttttcagcccttccttttccgaggacttgagcgccttggagaatttctcctccaagcggtcgtttgcgccaaaggcctggacaacggtgaagtttgaaagcgcttctgaagctatcgaagcggcggtagcggcatattccgacatcagacctgagtatttctcgatatagtggcttccgacaaacgacatcaggaaataggccggaatcaacgaaacaagcattcctgcaagtttggtgtccttaataaatgcaacgatataggccgtaacgaagaacgagaaactcgcgagacaaattcccactttctcggacgtgccggaacgaatcgtctggatgtcgccattgagtcgagaggctacctctcccggaggaaggttgtcaaaaaacgagggttcctgtcgaaggaggttttgcaggtaggattctcgcagtcgctgcgccagccgagcgccatttagagtccaaaacgaaagatggatgtagataaggacgaactgagcgattgccaaatatacgataatcaggatcttgtcgttgatgctcccttgctcgccgtcgccagaggagtcgcctgatttacatgtcgccgcgttgaaatcgtcgaggagctgaccgaacaggataccgatcaatggaaagggtacgccggacgctatcgcactcaggatggccaccaggagcatgccaaggtcgatttttgaagggttgccggccagcagcaggcgaggaaagcccgccagattctgaacaagcttcataccgacttgaatactgcagcatgagcttggcacagttaaagctgccagtcacggacgtcgccaagtgctcggctctgagagggaatcgctcaatttattactgaaaacgacggcgatctcgtcgacatgacactaaggtatagtcacctttagaaggtccaccaagcagtctgggaaatccccccaccgtctcctgatgaaacttaccggtgctgaatccaagccacatcgaatcatccgcagccgtggcataaccatgcgggaaggggagggtgtctttacgtaaatgcgtcatggacctcatggctatcgtcgatgccgatccagcgagtggattggggggttcctgattcctgaatcctgatccgagatgggctgagttcatgttctgccgacatcgctctggtctggctgtcgacgggaatcttgggacgaagctcggttagtggttgggcggttggacaatcagataaaataaattacccgcatgtggattcctgtatttattatattacgctagtaacttatgtaatgtaaggtatacataccatacgaaccatcaaatgctctactcaattttctccccatctccgcacgcctctccatcattcatttgtgctcgttatccgacgttatccgatgtctctttgctgtcgccttcgtcgcaacaccacagactcaagaatccttgcagaatacgcgctgatctcctgagaattgtgaggattcaaccaatgtcgcaatgttggcgttgcagaggtcccggtcttcaagtactgaagccacccccctactaggggacagtccaagtccaaggatagaacacaatgtctctacagaggatccggaggcagctcaggatggggtgaaacaggctgaggctatcaccatggtctggtcgaagaaatccttggtggcggcatatatcctgtgcgtctttccccccgccaaatgcgcttggaaattcatgcgcttaagacacaatcactgatatggccgctgcaataggatgtttctcttatacttcgtgaatgcattccaatcgtctatcaccagcaatctctcggccttcgtgaccagcggcttcgaatcgcactccctcatccctgtcatctacatcgtgtccagtgtcatgtcgtcggcgacctatatgcctctcgcaaagatactgaatgtctgggatcgatcaattgggtttttgattatggtagcattcgcgaccctagggctggtcttgtctgcgacatgcacagatatcatgacgtactccatatcgcaggtagggttaccatgcgcgcaaggcgggaaggaagctgacacctctaggtattctacactatcggttttgctggtatgatctttagcatcgatgtgattacggctgatacgtcgtcgctgcgcgatcgcggccttgcgtatgcgtttacttcgtcgccttatatcatcactgcattcgcaggctcagccgcgtcagagcgcttctatgcttataattggcgatgggcatatggcagctttgctattatcctccccattgttgccttgccaatgtttggcatactacagtataatcggtacaaggcgaagcagaaaggtctcttgcccaagaaggaacaccacgatagaacaattgcgcagagcattgtcttttacgctatagagctggaccgtaagctataccttacgatatactcaagtgtataacctaacctcacttttcagtcctaggagtgttcctcttagcaacaggtttagtgctcttcctcctcccattcactattgccggttcgactgtggacgagtggaaatccagctatatcatcaccatgcttatcactggtatcggctgtctggtcaccttcatcctcacagagcgtttcgtcgcgccagttcctttcctcccctgggaattactagcatcccgcacagtcctcggggcctgcctacttgggacgtcgtaccagatcgccttttactgctggaacgagtactatacctcatacctgcaagttgtctacggaacctcgatctcaaccgccggctacatcagcagcatcttcaacgtcatttccggcatttggctcctagctgtggggttcctcatcaaaaagacctcccgattccgatggctgttgttctgggctgtaccgctatacatgctcggcgtcactctgatgatctacttccgcaaacccggctggtccgtgggttacttgatcttgtgccaagttctgatcgcgttcggcggcagtacaatgatcagctgtcagcaggttgctgtttccgcagcgtccgaccacaacaacatcgcatctgccctggcattcctaggtgtgtttgggtctatgggtggggccgtggggagtagtatctccggtgctatctggaccaacaccctacctggcgccttgaagaggctgctccctgagtctgcaaaggcagactggagggtcatctatgaatcgcttgagatccaactgagctatcctgtcggctcgccagttagacttgcaattgcttctgcttatgctgagacacagacaaaaatgctgattgcaggcaccgggatcatggcgttgtcgctgatatggatgttcctgataaaagatatccggcttagcaaggatgcacagagtaagggagttgtgctttaggggttcttctgagaaagaggttgtctattatttacggccatgttcatgttgacgacgcttttacgatttacgagttatttgggatgcggcattgtctttcatacctagttagaccatacacattgatagactccgaggctgatagacaaaagcaagtctattttcaatttctgagtctataggcttcaagcctccacccccttcaaatatctcatcaccctctcaacgagatttcttctgggctccgcctgatcatcattgctcaacgcatgcgaagcccccggtataagtccactgtcctcatgccagatttcctcctccccgtccttcctctcgccatcaataaaccctctccacctccttaacaacgcctccttatcaatccaccccggcatcgcctggtcagctcccgagatcagaaccatcagcttggacgccagcaatccacgctctcggatcatcccaaacgtcttctttagcgattcgtcgctcagatctgagctgaacaggtcatcctcccccggagaaccattgggtgttccgggagaaacaaggctcaggaagcggcgcgcagataagggtacgttgccaggatacccaattacaccagtcatgtgaagcgggaggagagcgtcaaattgcggatccggattgcgcgcgacttcgtcctgcgccaacttctcaagttctttgtagatcgctgttacttgggacgaggtgcggcccatccagccggtggaaaggacgtattgaatcgcttcgcggtcagagacgggcgcttgcatgattgcgccgtcgaggcgcgtgcggaggatatgctggagatcagagtcgaaggcttttgtggaggtatggggattaggtttggagaaggagtggatgacgcattggctgcctgttgagtggcccatcagcacaacttggctattgctgtgccctttgaacccgctattgttggtgctgcgaatttcccgctcttgtaatctctgatatagttgaggcactgtgcgatctcgtccgtatctcggtctaggtggcctaggccccaggcggagtaggaggatgtgaggttcagtgtgaagagggaccagtctgttgaatggagggctttggctagatcagccatgtacgatgttgttgcgaggccatcgccgagcccgccgacgaagaggagggagtgcggtttgggggttgcggaagtggtgaattcgaacgtcacgagagtttcagtctgccaaccggtcaggtccattgaagtcaactaaacaaataggttaaacgtacaaaatggtggaggataccgggaaggcctcctgcaggccagaatttggagtacatgtcgatatggaaatatgaggggtattggatttgtttggaggggcagatgtagaggtggaagttcaagctcaggtttggtgttatcagcacagcactgcttgcaatttcatcatgtggctaggtgatcccactgctcagcgggtaccgatgggtccgctttgtgcacaaccgattcctctttcagctttttagtcaagagtgggaattcgcatctctttgaatgtgcaattgatttggttcctgtatcggcgtaatctaaaccatttgaaaaatacactagtaacgccgctaagggaaaagatccaggatcagataagataaatttcgagtctcggagaacactcgctccggcaagaatccggagagaggtatgaaacttagtgaagcccaaaagtgggtattggatacatcaaccttgggaggaaatgctagggcttcgtcatattatagctgccgagaaataacaagaggtcagaccactccagcgtacgtattcgaggttaagccggttccccgacagtcaagtaggccgagtagatactgagtacactgggattatggacaaatcggcctcttggagcttgaaggttggctgtaatgggtagactgggttgcgcagtaggcccgggagagttctagggtgtaagttagtatagtaaacaagccaattcattgcagcaagcatattgctttccgaagtatatatattcaaccaacatcagtatcttccacagtagccccgggagccagatttctcaattctaacatataagagctgctt

SEQ ID NO: 5601 - DNA, 8645 bp, Emericella nidulans
cgatggcctagaaaccgaaggcaagggcggttggttgagaaagccagaatgacaggagactaacacgaatgaacgtgggacgggaaatcgtgaggggatcgtaacatcgacgacactacatcacagccttggcggcttcaatcgattctagaccgcttttggtgctatctttgactcagatattcaatatttatctggataactaaataaccactcaaatctagctaataatggctgagcgattgccatttgctatcatttcggagcctccatccaggccgggtgcacatagggaagcttccccggcgcctggtccggccaatttgcttcgatcgccccaacaacctcgttgtatacgatccgataaccgtctgccgtgagatgcaagcctgattaagagattagtaccccgactgccttatgaggaggataacacgcaccgtccgtgaataaactcgcaaacttttcatcattcggcccctctctagacccgataagagggtccccctccttccaaccaacggccgtcataaaggctgtccagagatcgaccactggaatattcaaagactcggcaacctcgcgcgcagcctgcgcatactcccgagcacggctatttttccgcgtgggatggacattgcccttatcctcgtcgaagctttgcagctggtactcgttgaccggagtcggagtaatgatgatgatgcgcggctgctgggcaactgttgcgtggtgatgtcctaatgacgccagattcttcttgtatacatccaatggtacgtgctgcttgttgtcggattcgaggagggaggcgtcgttggccccgaaccagattgtctgcaatagacgtcaaccaaccggagttctcgttggtaggtgttctagacataccaaaaaccgaactgtggctgtctcaggggttgggaagaacttcggaaacaccttgactgcatgcgcagtagtatacccgctgcagagacggtcagtacacaagcaaccatgtacctcatcgagggaatagttacgcacccaaatccgcggttaatcacatcaagggctctcgagtacgctatgacgctgtcagggctgttcgcaaatcatatggaataaagagcactgaccatcttgtagcgcgggctggaatccgaatccctggtcctggttagaggacatctgggtgatcgagtctccgaagagaacgaactgatcgtagggcttgtacaatgagtcttcaacggcagacatggcgtcgggtgtctttgtgagccagaatctcacaagcgtcaagaaaggctcacggttcaagaagtgtcgtttcctttatcttggaaagacgtttctttgtagtccggcttataggtggataaactccagacctgccccgcaatcatttaagcttcggtgatcgcaccaccgaattcggaacatttgtgcctaccgaacacttgaatgaaatatgttgatataatgcacgagacattcaattaccggcatctagaatttagcagttgaagtgagaacacaaatggtgcctcgaacaaccatacaggtagtggggcgaaactcagaatatgtaccctatgtacccctcgaagtttatctcctaacgccatttggccccgaaaacatgaaccggaataataaacagaaagctgaaaacgaacattagaccaccagcaacacctgagctcgcggcaataccaacattactgaacatgccggggaacctggatggaacgatttagcactatgttgcaggactaaaagaaaaaaggatagacaaaccagaatggcccaataaatccccatatctgtcttacgaacgtaacgaagaccccaacactaccggaatcttgggggtaagaatccacagcatacgtgactaacacagtggtgacaacctgattcccgaaggctgctatcgccgtgccaataatgggtgaaacctcccaatgaccctcagctgcttgttgcgtgcagactaagaacacgaccacgccgataatcgtcaaaagaacacctggataactaagccacagacggaattccggctctggtctggcttggagtttgcgtgtgcggcggttcatccaaatatcagacagggagccgccaatttgctcgccgagaacagtgccgattatgaccccaataaactggagcccgagttgttctgcgttgaggccaaatttctcttgcaacaattggggtacttctacagtgattaggacgctgccgaataggaagaccattgcgtatgcaaaggctgggataaagactgttgggagggttactagggtgagtgggtgataaaactcgctgagctttaacggagtcgggtctatgcgtcggaaagggaggcacaggctgtgggaaatgaatgatgactggtcctgattgctgctgatataacgagtttcggcgccgaagaagaggtatagagcgaactgcactccgttaattatggcaaggacccagaagacccagcggtatccagcacgatttgtgacaaatccgaagatcagcggtcctgggataacgagtgtcagcatggagggtcagacctcatatcagcaacgagacttaccaactgggacacctagggtaaccatcaacgtccagattcccatatatcgaccacgctcttttcgaaagaatgtttctgttacaaccgcactcccgatagctgccgcgggtgagatgaagaatgcagttagggctctgcatgcggccatcgaggcgtaatttgggctctttgcgcagccaatattgcagaccaaactcaatatggttgacaaaaggaatataggtcgacgaccatatcgattggataacggcttccagaacaatggcgctccacccaagacggcaatctggagtgaagtcaggtaactggccctttgcatagacactccaaggtcaatggaaatgtcctcgtatgcgggaattatggaggccgtgaatgttgacatgcaagcgtggaatgcgacgaggacgaggtttatcactttctaccagcatatgcattcgtcagcgatgaaccaaaccctttcctgcatcaatcgtaccttccagagcggccaattgtatgggtcttcgttggatgcacttgggagcggatcaaatcaagagttccgtgacgcaggagcaggtactcgcgatgggcttctgataaatgggaggccgctatttcggaagcgagagggatgcatttctcgtttgcttcttcgacgaactcgctggcgtccttctccttagtaggatcattgttactgctgaaagggagattagatgggacctcagccacttcggataccatcttgccggactaagtgacaaaaggagaggaaaaactataggaagacgaagcggatcggaaagtgatgatctggggtaatggcaggcccacccccagatgaaggggggggacccctagatatagcatcccagattttgtggcgaacctgagctgacaaacgtagagagtttgtgcaatgcctcctgccttgataatgatgctgagggaaaccgttgggcgagtgtgggaatagggggggatgagaaacagaagtgtagagatcgtggggagtcgtggggatagcctctagtccccacaagatgatgggttcccccgacaaggagctgtctaataatatgcggtagaaaatctaactgatgtggaatctccgaggggtataatacttagtgctgatccgaagcagttggcgtcgtgagaaaggactaatgtgcggagcaaagatgatgggaggatggcaatgctaagctttacttggaaatcgctgccacaaagcttgcaacgaactcgggattactagccttgtctaaactcggatttacactgtgggaacctgacctgccccctataaaacagagtcctaagcatttcgctggcgacaaacatattcctcgatgtcaccccattgggtgccctgccaacaccccttcaggttcttatatagagcttgcccagacattatttgaaaccaaacaccagccccatcgaagtagatgctcagtattgatattgagcaagataatagtaaccggctaccttacaatagcggctgaaacactgaccctgggagctccaggattaacgtaatatggaccagaccactgatgccggctgagaggaggttgaaaatggcgcagtgatgtagcttaagccttaaggaatactaggaacagtaggatggataaattccttgtatccgatcttgataattcaatgccttgttttctttgagaagtcacgcatgggggaagggttggtctactgggtccggccggcttctaagtgaatcttctattgtgaccaggattatcttaaatcctgtaatcgtacctcgtatcccagggctgtggcagctcactactcgagctgggaagtcacgtctttaataggggcttaggggcttgaatgtatttcgtgggctcgtgtggtgttatggggctaggatcgataacctgtggtcggacaaatgaagtctggagacaggatgcttagtaagagaacaaatgatcgtttcagcagggtaattctagacatactggcacagtaagcatgtcttaatcgggagttttttttttttttttttctagactggcgctctcatgttcctggttcgttatatcctgctcggcagatgtttcggcggcattcaaggttagaactcgctgagcattcctttgataattcaaaagactcttcatacaaatcgcttataacagagtgtccgatcctgtttcttaattcccgacctcaagctggccctattcgtatagtgtggacttatggcgaagacagtccactacttgtgctaactatgccagttgggctcacataagtgagacactaaactagtcactatcttccaatgttcgatactgcaaggactcggaaggaaaagacccttgtctcccacgggacgagcaatggcttggtgccgacgttacggtaacaagccttactgtccagaagtacctcagtggttgcgacgactcgagcacgcaagggaaacctattcctacgactggcaagagatagtactagcttgaaagttttaatactccctagactcatatcacacattgagatgtggcagtgacattgcccgctgcctctttgcacgtattgtgcatccctgccgcgaggcagcaacccgaatcttatcagaagggccccctttaagcgagtctcacagtgaccagtatggagacagggagcaaggccgcactgacattgcggcattacagctccgtcgccattcaatattagactagtagtcgataatgcggctaaatgggatctcctacgctgatcatatgttcctcattcttttcaaagcaaggcgccaggacatggggtaatctttgctggcaatgctgcagacaggtgtcagtgtgggctctttaagcaaggttcgaccccgagcgttgacataaaccctaactggaacgtacctttgttcccggtgaatcgggctcgaacccgactcgactgttgggcgctggtgggtagaatgaatggttctttccatcttcaatttgggcagaaaggattgagctttccgaaaggtccccatctgaaaatccttggcaatgatgcaactcaaaccttgaatctcagcaggagaaatcttcccaatgttatgattggtcgacatgcgacaatgccccagttcaactgcccgccgtgtcacgggtctgacccaacttgcctgtgccgcccagtctatgagcaggctgctgctagtgcagcttaggtaaccttctggagcacctaggactattaggagccatcttgtgcttagtggcttttctttctctaggataattcagatactccaatttcgttgtcacaacagcctacttttatccaacacctacggaatcatgcccagatagcctagcgcttcccctcaccccctacaccaaggcgcaagatatgtcgtctcggccctttgagaggccactcctgccggtgccttctgctgtcgcttcgccagtgggaaataccattcgacctcgcatcaagaaggcttcgttggcttgcaccgagtgccggaaacgcaaatcaaaggcaatgctttcggttctttcactttcccgtctcgtctcattgactctttcatagtgcgttggtcttccacccccctgcgagcgctgccgtcgccagaaaatagagtgtatcctcgacgaagaaagtgatcgtcgccgccgtggcgtccttgagcgtcggctggatgtcttggagcaagatcgcacgctcctagtgaggttggtggacattattcgcgatggaagtcaggaagaggctagtagagttctgaactatatccggagcgacgcttcactagacgacattcggcgatttctggcccaaagcccgtcacccagcgaggccgagcatgttccacggcaggtaagaacgctactcacttaccgggctaggcattctacaaactatgacccagtgcttagttttagtagagattcagtcctctctaccatgtaccggcctggccatggacctcagtgacagacgatagcaactatatctcccatctcatctctatctacttttcttggaactcccccgtgctaaagtggattgaacgcgacttgtttatcagagacatgcagagcgggaacatagactcccccttttgttctcccttccttgtcaatgctatcctagcagttgcatgtgtacgtaatatatcctgctgaaccgattcctacagtgcgagaactattcaataattctgcgattctagtgctactgcgacgtacctgaaacaaattccgcatccgacgttgtcccacccgggagactggatttttttgacgaagcaaaacggctgttgggccaggaggaaggcaaattctctctgacaagcttccagggtcgctgtgagctatatctgaggtgatgaccttgaccatttggttctgtaaggcatgctaaatcagctgctagtacatggattatgggcaagcacatgcttagttggcagtacttggtcgaaatcgccgactgtgcccgacagctccaggctcgaaggaatgccattgcggtaagcgctgacgagaaagcccaggagctacttttggcccttgatactgcaatcaccggttcttttagtgcgctctcgtaagtccacttaatacataatctcacagcatctgaccggtctcagtagtattttccctagtttgcacaaggcttccatcatgccgaaacccactctctatgatttgcggcctcgacaccataccccaaaggacgtgtggtggccatacggtgtcgaagatgggtcaccagcgatgcctgttccaataccagcacactcaaattgcgttagcaccgagttgctcaaactacaactggtgttgtgggagatatcaaacaaccctttccagagtataggacaactttgctgcaccaaggaggagatggcggagatttttcaccaacgcctgaaacaatgggttaccgaacttcccgaatgtctgacgcatgcgagcttactagacagcgcatcaaccccggcggttcttgatatgcagtatgttgatattggctccttattacttccacacctttagctgctaacactgctgcccttccagtttaagctatcacagtgccgtgatcaacgtatttgaagacataaagaccgccaatgacccgtattcccctctaaatgaagtgcaagccattcgtctatcgtctgctcgtatcatatgctctctcctggagatatttggttctcgctggtctgtgcattacatgcccttcatctatatacgctacgcaaatattgcgctgtccatactgcttgtggacctagacaacgcggaaaatagagggcatttcataaactcctatacctctctacatgcgctgtcaattcgacttcccatagcaaaggaggtgttgcagctcatcgtagaacaggctagacaaaagcaaacggaactccccaaagaggttctatgcctgtcttaactgagagcgcggagcttgatggtttggtacaaggctattggaccctgatgccaagttttattgcatttctagcatattgtggaatgggcgtatgtggcgttctttgtggttcttgtctttatgctcgggtttaagagacactttatatgcgtactgaaaccagacaagtccagagaataagtaggcctccgccagcaacccgaatttaagcattaaccagggaacagcctcatactgcttggttttttagggtctgaatgaatggagtccactggttatacttcacggagaagtaatcctgctccagttattggttgtattaaatcaagctcattcctagcttggtgggtatcactgataatgacgcccttcgttgagacgactgtggcccttgaatttcctctcgaggttgtttcatccatcgcctaaagccaccataaaagtacttctgaagatacaatggtcaatactgctagctgtaggctggtatgctatgcggacttacgtaaactgcatagagcttctgtataggatcaccgccttcccaaagcgtccagcccctctcccttgttgtctcatacgaccgacacccatttatgacgataggagt

SEQ ID NO: 5602 - DNA, 3783 bp, Emericella nidulans
  unsure (1)..(3783): unsure at all n locations
cacggattggaatggagcccagattctcaccggagtccacatatgaccgcagtaggccgcagccagcaagagaaagagaggctccccgccgaacgcggtaattgaagaatgattccaatgctccctacgagcaccaggtgtctgtctgataccgatgcctgcgcttcctaaacaggaggtgctgcgggcttaatgaattttacgccatgagattttttccctctgtcgctcataccctggagccttttatggatctcttttttatgcctacaggaattatcatgccggaaaaaagtgtgcttgaatcattgtttcgggccagattgcagccttggggaagcgaaccttagaataccggaccttgctctatttaccaggacgttgtgggcgtcatgtgattgtttttgccgagtgtctccgttggcgtcggctggttccgctggatgtgttcctttctcgctttcatggaagaccacattggcgttttaataaaatatccaccaaatatttgtgatgctatgaaaggtggctgcttggctagttcatcttgatgttcacggccgcttatgttttttatatcttgtcttctcggcaattgctctgctctgctttggtttcctcatggtgtactcccagcggtgctttgcccggttcttctggtacctcctaatttgtctcgagaggcgttttgttgtcacgatgtgtttggcctgagaggttggaataaaccctggcagtgtgggcgttgatataaagtgatgtagatacgagcatatatggcgttttgtcagtcagaccttcgagaacagtgtttcagttgattgaaaactctgcctacgggcttcagacttgtgtctcgagttcctgcttaggctctccttgtgatctcaagaaccctctgctcatactttcagctcttcgtcctttacctcaactcttcgccctttatccaaatccttgaagttgttgcatcctatgatgaaacacagcacgagcccagaatttctggcccttgcaaatctgctcatgttcttacactgtttagcccatccgcttgtatgtaattcactcaagaggtggatcaggtgtctaatttcaatgatctcaacacagcacctctgttcctcctatatttattcactcatagtttgcttctctgcgtgtctccactgttatttttcaatctgctcgacggttcattagcactatctctgctgatgtcttggagttgcattctcactctttacaacctccccttttccaagcgaaacattatcgccaggggatatgtccaacactcctcattatggctccaggaacctttccccagtccactgacggtgatgtcaagatagctgtgctgccggacatctaccagcttcaatcttccgtacttggcaggaattcacagatattaaggcgccttattgaaagtgaccaatcttttgttgcatcaccaaggcaaagcaacgcttcttcacgctgtgtcaacatgaatttagttggttcgtctgctcataaatatggaatgctggagattcaggtgagtaactgcgcctaaacactaatgaatgaaagattcgatcttaaccgaacgtttctgtagagctattacgattcccagtgcgcgattgacgagacaagcatttgttcctttcccgtatggccagagaagacccgccatatctggtcaaatgtgtttaaaatcttctacgatctgcccccgattttagacaacgatggctacaattcaatactagaaaactgtcaggcactggccgagctggcggaagaattgcaatccgctgaggttgtctgtcccgctatcaacaaaaccctcctcggctttgaccagcagctgtatcgggttatcgcgcaaaatcccattgactgggtcacgctggcggtacgtatccagtccgcacctatctttcaggagtccatggttcatttagtaggtaaatggagtctcattaaggaaagtgaccgcgaattactacctcagaacatccgcacattatgcaatcagaagatccatgatctaaacgccatcaagaagaccatcgagttacggatcgtgaacagcttgcctcgtccacgctcggacagccctcaataccgagaaacaagcaactactttgggtggatggcgctgactttctaccagcaatggctttgtgagtcctttgcagaaggccgcaaccaccatgcgccagatggaggagcggcattctaccgcgcaatcgcggcggggggcgacttttatttaaacaagcttgatcaggacatttcccagttctccgcgtctttcggagccaatgctggcagcaacaagggtttaagagaactggagaaagatctcaacgagttgaagaaaggcatgaaaggcctagtcagtgacttgcttgtcagtcacgctaaatatgattccgccattctgggagagcttccatacctgacttgctgtaatgtcagcgaggaagaaatgccaccggctaaagcgaccttcggagttgagataggatcacaagttcaagagttcaggaatactctggcgtttcttcctagcaatagcgatactcacaccttcttcccttctgcgccggtacctaacatgggcgtggcaagcgccggcgccatggtaggtttcaataacaacctcgccaataactacccgctgaatcccggattgcaaaacgataaccctaatatgttcactttcaacgcgttcaaccaacaatctacggataccactctgatgtgggacaacacagtgggcttctcatcaccgtcccttaacaacggggggcccctaccatcaatatctgaaattactgacaccaacagcatttaccaggcgcaaacacagtcgcagacgcagtttgacgatggcaccgacttaggaggcagtctgaatatgttcgatgttcctctactgactgatggcggaggatacgcgcagcatggtaacgacggaagtatggcatttctctgagcacctgcgaggtattaatgagcgcaacgaacctatgtctcggttttagcaactatgtatgagctctcatgatgttcttataggcattctttttctcgtgcttttcatccacggtggcgttatctagaggtatcgggcgtcgattatgtgtgaaggcaatacatgttatgtttctttgtagttttctcgcgaccagcgtaacatatcagaccatgccgatagtggacgttaccattgctttcagcctcttcagagagcgaactagacaccgtgatgcgatgtcaatctgtcaaagcagacaggaagtggaagaccctgatatttttctaccagatctatagctctttttttcatgtacaatacattgtaaatctcagccagagagccgagacgtcgctaaaaaggcctaaacacgatgtccgtacttgccgataattttaagaagaggactagctctagttcgcggccagccgtgcctcaacacatcctagctacctctcaactatctcctttaaacggcccgagtgtgcgtgtgatgggtatgcggtggttcttaaaacaaccaatatcaatttcccagctaaggaacagcaaatatagtgatatcaaccataaaccgacaaacaaccttcatcttcatccgttacccacggtgttcgcaagtttattcgtcgtcgtatccctgcggaataactcggggtccttgaggaactattgcaaggagaaaatcaaaccgtcagtatagatatattcaagaaangtatcnactgaagtatccaggaacacga

SEQ ID NO: 5603 - DNA, 5462 bp, Emericella nidulans
ccgttatatctccagcaccggtcactgatatggcgtgcgcaaaagtgtagttaagattttttatgcaagcgtgacagacttcaaactttgggaaaagggggtccgcctaatcgctttctgaattaggacctagaatcccgaaaatccccacggatcaactttatgacgtgatgatcaccacatatttctcgttgtctttcactttgaagtgtgataggcggaacagcttgcggccatagacacagtcaatctggggttaatgatgtctccatgaccggaacatacttcgaaccaatttcagccagccagaatacgtaggagttacaatagaaggttggcggaaccagattcgaattactggaagccaggggcaacccacaatgtcggaacccactactgctcagtcactccagagccatgaacgtttctggggtctggagtctggtcggggaccggggatcactcggggttccctctgaaatcattgtctgtgacagtggggcagttgattaacgtccggtagaagttaaagaaggtccaaggatcttgcaagtgcattttcgatatgatcaacaagatatgcgatcaatttggtatggttggccgacccggcatctgcggccccatagtcaccgtagaattgggaggccaagatcccgcggctgggatttctcggtcaggactcggaattttcttggaaaatgagcagacccagtacgggggggaagcatggctgtaacgccaatacacagcatacttctcccagggtgccaaaacgtagaattattgtcaatattatggtagacaatatggcacgattttggtggcgcatggaatgttctgtgacagagcatactacatacgtatccctgactccaacgcagctggatctggcccacagctcaaaccaagagatcccccgcgctttactccagctgtacggagtactccagaatctaggcacgaacagccggggaagaccagtggcaagttcaacgttcacaacatctgcgactgttatactttagagtaaatttgcgatgcagcgaccagcactgcgccttgataatataatctcatgtcatgcggctccgattaacgccgattccgggggaaaggaaactagctaaaaacgggattttgttggaagaatgcccgacctcacttcagtagaacacactatttcaacctggcggcttggtatatctgctaacttggtcgaaatgtagtggaatcgtgcaatggagttgccaaaaagattgtaacgacaaccatgacgattttatcgccgtcgcctcatgcggagcttttattctccttcgccacgttcaaaatagaagtaaagggttaggagaagcagggagggcacagtcgcgctagccttcgatcctcattacccagccttagaattagcactagggcagtctcggaaagttagacagcggtctaaacgtccgattgcccaacgggttagtgactgtaaaaaggagatcatgacagcatgtttttacggcttctccgtaatccatacaactatattacgctttgttctgatcaaggaaaatatggcaatactccgctatcggcatttacagcctgaatatcagccgcgacccgggatctggacatcccttatagctctcgacccgtggtactaagacaagctaacacgagcaccttgccaccatcaggcttcgcagggtgatggaccttactcttatttgccctgcgatgggtgtcaacttcgttaagtgagctcatacagacccaatatccggcatttcccataacagagaatatagaaataaactagtatcgaacaatccaagttgatattgcgctagtaattaataatgcggtaatggaaggaccgtcgcctgagcatacgaatgccctgtaaaggaagcaatttcactggctttcgaagttgatcctaacccacatggcaactcccccgtcgtcacccgcatccgcaccgtccgtattacttattacatgatacgcggccgatccctcccgctattcaaggctgcgatccggcctgtctgtgaccctcaccttcacacttcgctctaatcttggattctcccgttgttctttctgcatcatcccttctacaactctccactccccccccttcgcgatcaaaaacaactctcctctctgcgtcgtcaccttcaaacttatacatgggtatctcgattcactgcccctgaatatatactccattcttcgactccagtggtatctcgacagacgattttcttattacgatccagtgccataattagcccgggtcggcgctaggcgcgccctacacacattcaagatgccaggaattctccccatgaaagtgatcaaggtcggcaataacacgcagagtcgtattgcccaagcctgtgaccggtgtcgaagcaaaaagatccgctgcgacggtattcgcccatgctgcacacaatgtgccaacgtcggcttcgagtgcaaaaccagcgataaactcagtcgacgagcgtttccccgtggatacacagagtctctggaagaacgagtacggacactagaagctgaggtcagggaacttaagagtctcctggatgagaaggatgagaagattgatgtgctctctcggatacactctttctcctcaccttcacagcagaagactcctgctgctgtgcactctccgactcagcctcccccggctgctccaacgagtgtgcctacccccagtgagggagccgttcatgttccggatccggttgctttgagcagcacagaggagtccggggtttcgaacacccgtggctttgctggtatggcgccttaccttcatgtactgggatcttttgattcgttgctgacaagagtcaagctgtcttcaccaacatgcttgcagaccaaggccggctagctccagaaacttccactaaagctttgtctgcttctcctactcctattactccttctcgtctcgaccagcctctgaaaacaacgcctcggcttgtatcggatcagcttatcaacattttctttcaagaatgggcacctctttacccggttgtccaccgacctaccatcctcaaggcatacgagcaatacctttccaattccgaacacattcaaggcaacaaacatgagatggcccagctgaatctgatctttgctgttgctgcactcggcgctattgtaagtttgacctggattactgctgcaaagttcaatactgatttctcgctgtagtcgagaaccaaccaggaccctaccctctttgaggagaattggtcttctattcttgagtcgttacatgccgacatttctatcccaaccttgcagtgttacgtgttggcacaaatgtattgcttgaccaagggtgactacacaaatgttctgcgctatcgtggtgtagctgttggcgtctgccaccaattgaaactgcagaagagtcagaaggctttctcatcgaacgctcttcttgctgagaccaggaagaaagttttttggtgccaatatgttctggatcggttcgtatccattctcgatgcgtaaattgaaatcattcctaattggttctagtctttgcgcttctttgactggtcttcctgttcttcttcgcgaagagcacatccagactgagtatcccgaagatatcgatgatgagaacgtgacggaaaccggtttcttgcccaccttgcccggcgagtccacacgtatctccagcgccctcgccctgttttccgcatctagagttctgaacagcacgttggagaatatctacccgtctgacggtgcatacgaaatcccattgtcaaaaatgcgtttcgttacggaacagctcgataaatgggtcaagagcctacccgctcatcttcacttggagttcacacaggataagccgagcaccaacgtcattagcagtcggtctccacttttggtaagtgcatgacctgttctgttgcaattccactactaacatgcttaaagtctgtgatgtattatttcattcgttctctcatccaccgtcctgccgtctgctttggtgacgatcacgttcgttcaccttcagtccttgcgattgcggattccggcaagcatatcatccaaattctccaactgcttgacgagaggcgcctatgtctctctcttagcatcaaccgaagagagctcatcagctccgcagggcttgggcttctctggcaaaatgtcggcctgaagcgtgatagcaaacttgtcaaagaaagtcaaaaggtgcttacaggcgttattgatcagcttgagtctgaatcatccgtggctgcgaccgagttcagtgctctagccggtgccctcgtttcattagataccaaacgaccaacgaccaccaaccctcaacaaatgagcccacccgcccaaaaacccttgaagtctccgaggagacagctggaggcatggaaggcgcgcttgatcggcagcactagcccgggtcaatctcagccaaaaccggagcctctgtcacgcagaaacaccttttctggttcgagccctggtttagcggagcgccaattacgttctcctagttgggctagcctacctcccaacgacttcccgcaccatgccccgatgagcaagaacgtttacaaccaccctatggggtatgaaggcaatccgtccatgtcctgctcggtaccgacggaccatccagctccaccatcaggaaatctaacggtctcggactgggagttcgtggtgagcgatatggatcaaggctactcgaatatattcacaggaatctatggtggcaaagaatgcggcgaagatcacggcccttttgcgtctttgactgctgagtacatgcacaaacaaggacccggcctgccgccttctttaacttcaagcgatgaattgcaaggcctgtctccggaggcttggtctgccactagcagtagcgatatggctcaacctccagaacttgcagcacagagtgtctattcggacgggagtctgggaagcagagaccacagcttgtcacttccaagtactatgccttttccgatggaggataggccgggtagcctcttggatccacttcaaggcgttattatccctgctggagacgacgatattgaagaatttgggctggtcaacggttgggatcgacggctggccgtctagattttccgttttcaagcgctcttttatcggtgtactggagtttcttccgggtaccatgctggttggttttttgttcagcgaacgatcagttttttagttttggtttatggtttgctcttgcattatgatacctggttggataggagtctgtctgtctgtcttctccaggtttttaaacacacctacgtattcccgtgttatgtttattgatgtataacgatatggggtctactatatataatcaaaattaagagtgtcctatatcgacctaccaaaaacacggaagccgtgcgccatatagtacacaagttctc

SEQ ID NO: 5604 - DNA, 8490 bp, Emericella nidulans
cgctctgggagctttgtggcggccgacgatgctgcgcccagcgaatgacataataggaagggtgttcactgaattggagcacgccgacgttgccttcgatctgtcgaccaccgcgtctgctcaatcccaaaccgccctgctcccctcggtccgctccacacaaccagagtaagtatgcgtccgccgtcggtgattctgcgccccatacatcacgcgtgtttgcttgtcggatttgttttccaaactcccggagctgtcactttcaatcatggatttcgctgttccacccttgttggcgctcccgctctatctagaggaccctgtttttttgttgccccttccaaggcctcttttctcttcgaacattggcttttcggtatctaaagtcttactctctctaggacgcatatcctctgcactcaaaaccgttgggccatctgtgatattaccatcaacaatagggaccttctcgtcataccgccgatttccctccaatttcgaactttctcctgcttctcctgctgtttccctaacgtcgtagcgccaacagaagagcctctccaaacaggctctctttcccccgcgacaccggcttctatcgtggcgaatttctacgagcagcgactcgactgtcagcgtatgagctaaccaaccgcgcggacgacggtggcggacctcaaatgcgttcacgaagtactccctttgaaatcaccggcgtcgcgcccttaagttctctgggtctcttgctgccggagtaactttcctgactcagacatctttctggcagcgtgggcccttgtcgacacacccgtacctgaactgccgaaatggcctccaacagcaaagataaacagctcccctcaattgcccccggtcccggtccgctgcgtgagattcggcctttgacgaaaaacaagaagagttctagtgcgtgcctgccctgcaagcaagcgaagagaaaggtagtgcttgggagcatagaatgccatccgaactttccccaaatttgcattcgctgtgcttagctaacggttcttgctttcgatcatagtgcaccggacgaccggctccatgtaaagcatgcgaggccactaatggcaattgcgtcttcaatgaacaccttgatttgagacggaagattgctgcacaaaaagcccaaggcgacttggaacgctacaggcaattgttgtgggatcttataaagtatctgcgcactgccgacgatgaaaggatttatcgaatcttggagataatacgcgctggtggcgacgacgggaatgtagagaagaatattgccctaatcattcaaacagcttccgctgagggatcccctatcgaggatacagcaatggacaccaacgaagtccgcagagactccaggataagcgttgagaagctctgtgatagtcccttgttccaggtaccgtgcaaaccttggacgaaggtcacaagtgacgaccaccttatctctggcttgatatctttatacttcacatgggatcatccccttatgcaggttgttgaccaggagttgttcctgcgtgatatgagtgcgggtgacacgagttcagagttctgcagccctgttctggtgaatagtattctagcggtggctagcgtaagtttcctcaagagcttcaatccaaggttgagccttctaacttaccacaagacatattcgccctaccctgaagtatacgccgtgcctggcgatgtggcttctcgaggccagcacttctttgaggaagcggagatgcgctggaaagctgaggaaggtcggccttcactggcaagcattcaagccctggcaataatgagccataagtgagttgtctgcgaaggtcttgcaatgctataaatgagtgtgtgtgcgcgcaaaaggctgatggctaacaaattgtagtctgaaactccaagggaaagacgatgctagctggctttatatcagacaagccgtgcagcttgggcaggatattggcttattcaacatacccaagtcagggcacggcaattgggatcaattgcctgatcgtgtccggcattctagtgcacggactgcttggagtctcttcatcctgaattcgtattgacaccaatgcttgatagtatgacatctgctgatgttttgtgcaggcagttttgcatggattctcgaaagtcgggaaatctagcagttcccagactatcatttgaccgaatatctctcaccgaaaaggacacggtttggataccgtaccactctcgctcgagcgacacagaactcgttaggaagccagcccttcttcgtgaggtgatggccggactggtcgacctcgcggaaacgatcattgacatgcaggatcttttctttgacaaagcacttgaccttaacctgagcatcaaggagttgttgaaagaggcagagaggttgcattcacgtctccaagctttcctggacggcatgacagtcatcgagacgccacctgttccgcaaatcctttttctgcagtaagggccgtaggacattagttgtcgcgacgttaatctgacttaactttccagtgtcaaaggcaatcaaatcattattacgctgttcgagttcctgctagagcagcaagacttcgagagatcaataggaccattgaaaatcgaacaagtgaaatcggcccggtttcatgctgcaatgcagatcgctcattatcttcagatatatcgtgagcattatgatttacagcagactccaaatttgatgtttgggcccgcgaagagcagtgccctagcactcctcccattcctgaatgacgaatcggcttataatgctttcaatcagctttatgatttccttgaatctttcagtcggaggttttcggcggctaagcaaacgaaatgtgagatcgacgccttctttcgtgactcgaaccttgcatcgcccttagagatgtcgggacagctgaccgtcggggctcggaatactcgtaagggctttcaggaacgtgtttcagttgctcgcaaatgagtgtatagagtgacaaccggaaatctggacacgaacgtggatatcctagcgacgtttgaaatgcctgctatgatgagggacccgttgggccggaaagcgttgaccgtgatagttcaggggtttcgaaaaaaaagtcgattcgacgagactgctcacatcagagggcatcctagaatcgcacctggtggcagcagaatcggcaaaaagtcagctgttacgacgggaacgtgtacgttgacgatgccacaaaaggcgtcgcgcggaataacagccgaacttcgagtgactggcagtgttttctcgccaaaagttcataccagtcattaccatggacggtatgagtgttatcaacgaacgcgcgtgacttcttttgaggaggcaggcggctaacagaggagtacatgaacaggtaggataaagaaaagttatgtccgcctgaacgtgacgttgacagcttgttgaatgggagtcctgatggcgattttgagatccctatggggcgatattcggttgcggatataagatccgtagcatgcaacaggccagccagagatgtcatggctcgggactccacccttactctgggctttcttctaagggtactgcagataactctatatcttgtagacatgtttatagacagatcaagaaagatgaatacaacgcctagctgagatccatacggactccgcggcctatttgatgacgctgcaatatcgccactcgactgaaatccaatgtctgtgccccaaattatgagtaatgacgttcttctataacaccgagactctataatgcaacagaactggacattccatgaaaacgttaaccgatgatgacattggtattgctatattacaatgcgcgcagtggcaataaatattgctagctgaagtacctcaaggccaactcgagggcgcggacgtactactgctggagttcttaatgcaacgaacaatacacgaaagacacgcgagattccgtcatatcaaggacaccacaaccctgcactgttcccttaatcattgtttttactagtcacagccctatagctcctggtttagaagtgcttgcgtttgaagcgtaattgtcatggatatagatcttcgactacaagttaatactttcgcttaactactctgtataggctgacatggttgtacgcaactcggggctaaagcgaacggtgtctcatttttggggatcagtgagcttcatcgtcttgctttaggcactggccgctaaggggataggatttttctacagaaagaaagaactgtataggaagacggagtatatatggggcaggctttctggtactagttcaaagagagatttgcttgttgtctctgcccgagcgccaaatttgtgcaggtttcatttgacagacgaatgcacatatagatgactcagcaacaacttatccgtagataagataagcacaaatcgtccaagcgaaaaccctcaaaattcgataccgcccaaaggttgaaaacccacacctcgaaacgccgagtctccgccagtcaacctccgtgctcgcttctccctctcccgtcgccaattatctggacgagttcgtagtcgttgtctatcgactttctgatccaacatgtcctacgacgagcgcgccaatgcgcaccccaatttgaacgatgagtctgatgtcgaggaggaagcgcttgttaatgactaccgcgaacaggtcaacttcgacgatggcatgagcgagctggaccggactacatcactcggcgcagcctcgcagacgcaggaccttcaggcacagctggctgctgccgcgactccccttgagtaccaggccacgctggaaaccaagtttgcgagttacgacaactactgcagtcttttccactacattctgaactcagatgggccggtggaacttgaggttccttctgtatgtggccattctccatgtattatccacttttattgctggatttgttcctgctgctcattgaaagcttaagctctttgtgtgggccaggctaatgttttccatgagatgatatgatgtactaattttccgttctaatagtactactgggcctgggatgttatcgatgagttcatctaccagttcgagtcgttctgccgttaccgcaaccgcgttgcccgcagcggctccaacgaggaggaagcccagctcctccgcgagaacccgaatacctggggctgctactcagtgctcaacgtgctctactccctcatccagaagtctcagatcaacgaacaactcgctgctatgaagcgtggtgaggaccctgccgcgtttgctggagaatacggatcccgcccactctacaagatgctgggatacttctccatcattggtctgcttcgcgttcactgcttgctcggtgacttcactcttgccctcaagactcttgacgacatcgagatgaacaagaaggccatgttcgcccgtgtcatggccgcccacttcaccacctactactatgtcggtttctcctacatgatgacccgccgctacggcgacgccatccgcatgttcagccacattctcgtctatgtctcccggaccaagaacttccagaagggcggaaatagctacgatgctatcgccaaaaagaatgaccagatgtacgctctgattgctatctgtgtcgccctccaccccactcgcctcgacgacaccatccactccgctctccgcgagaagtacggcgagcaacttcaccgcctccagcagggcggccccgaagccctccctctcttcgaggaactattccgctccgcttgccccaagttcattagccccacccctcctgacttcgacaaccccgcccttaatgtcgaccctgtcgaccaccacaccgccatctttatggacgaggtcaagaacaccctctacaatcctacaattcggtcatacctcaagctctacacaacaatggacctgcagaagctcgctggcttcctcgacgtcgagcccgagaagctccgctcctggctcctcgtcaataagcagcgtagccgccaggtccgctgggttgagggaggactactagaaggtgaaaccgtcagcgccaacgaccttgactatgctctcgagaaggatcttatccatgtcagcgagaccaaggctggccgtcgccttgtcgactggtatctcaggaaccttgcccgcgtttactaaactagccagcccacctggattgtggaagtgtgtcctaatgagttcgagtggatggctacttgccggtacatgaattggacggtatgccatttgcgtggatacccccagggggaccttcgcattacgaaacaacaaggagaagacatgacatgacatgaactaagggcgcacatggcgcaaggagagtaattgtctcttgccgacatcaagacccttttctcccattttcagttttaaattattgcatgattgttcacgcgtcttctaacccttactacttaataagggtctagggctggttggagtgacaaaaggatctacgagggcttttctaagcctttcttcagtagggctcttctatttgcacaagttgattttacgtttttgttttggttgttcgatatgtgatatgtcctgctgtgcatccttttctgcgcagcgcataaaaagaggtttctttttcttcttcttaagagacctgtatgtagagaaacagtgaacacgatcaaaataaagtataaatgattatttccgtgtatgtaaataatatagtatagtacagcattatataccaataataccctatctagcttgctttatcgaacataatacctacaagagtggagattagacgtctgccctatcatcaacacatgattcctcgatgcacatgcgcaaacgatagactgagctctaatcaacaacatcaaagctggtcccacacccacaactgctcgtcgcgcgtgggttatccactatcttgaactggctcccgatcagctcagtcgtatagtcaactgtactcccagacaaaagttccaacgagggctcatccatgacgatcttcgcagtgccattgcccgccacatccgaaccctgctccggcggctctgcttcaaatatcgtgtcctcttcaggatcgattttggatgccggctcgagtgacatcaggtactggaagccgtgacaaccgccgctggtgacggtgatgcgaaggtgatggtaggggttttcatcctttgtggcggagggcgacgaagatgggtctgttatttgacggaggcgctgaagggcatggattagcaaacacgctcgtaactgcttttgatcaagaaagtaatgaaaaaaggcacattgcaaaggtgcaggttgacgattagcaaaaaaaacatacaacagttgggattcgcatgtggtcacccaccatactactaaccaaccggcgtgtggcttaagtacggctgagcggacgggaagccctgttttccacaccctgtggtcgtatgtacttattgcatacagagcacggtttatgtaatgcagtagattccccggctctttcataccatatcgggcggacaagaatatgcaggtttcttcccgaagcatcacagccatgctcttgccacgccgttgtcgcaatatgcgccaactcacccaacaacactaaacaaaagctgcatggaaatcatttcacgtacatttgcagctcgctctgagatttccaccattaatgtgtttccatcgtcatcggtccttggattctgcgtaacttgagccgcggatgtggcagtcgttgaggagaacgctgagcgaggttgtgttcggctcaggaattgcttcgatatcctaggtcgaatattccgcgctggccgaggagatgtcgaaatggccaatgttcggtatgaagcatgacaaaacgatgcgaagttcaatgttggactcgagcatgagacatgaggggtggcagggacggcgcgacgagtccagagcatctggcgagcggcggatgacactgctggacgtgacatattgaggtgtaatatgcaagattttggattgagtgacctttggacgctttataatcatacagttcgcatggcgagcaagagcaatccagaagatgcgattgggcgaatctagtcgggagattgcggcagaataaaattcccgctgaacacagacatatgtcatattactacgctgcgcattaatctttgtgcattatatctttggcactgactgcagtcgagcgagtttggacgccgctcgatgaatcctgagacaactaaacgctttctatatagaggttctgagcccgtaacatgtgatagtgacagtcgtaggatgtgaatatagttctgtcgtgccttgaggcggagtatgtagcaggaaatataccgcggggctctcacatcctgtatgcatacttcccatactaatagcagtcacgtccggcttgaagtatagttacgtgcaatcaaagtgatctggctaataattgatccatatctccgacatgggttccagg

SEQ ID NO: 5605 - DNA, 4455 bp, Emericella nidulans
acaaggaggcatccctgttcagaccgtcttcttttcaaattttaccagggttgaaagtcgagacttacagaagctgagctcgccctacaccgagaatgcagctggtggctgaaggaggctaaaagctagtctgaactaatccactgggtggcttgtttagctccttggacctgcgaacctggttgacgggtccgcgaaagtacctacacaaatctccgccggcatccaggatcggccatgatcaaccgagaaatgaaagagaaatgtgagacgacgccgagcgtgcgccgtaattatgtcaagacccgggggcgtctgaccggaactagggatctgaaagcacccgccctgtagagctccgtatgagcccagaccgcgtaggcgacgtgtgcagtgtttgcaaattatcatctcgaatgccagaacggaatcgtgggcagccgttgccgcagttcggtttgagagcattatggcccaggccctgctgcagacgtgaggacttggggcatccctgcttctgtcggtggactatatccactttttagggaacattgttcctatgagcttggcctgtaggaagtttcggaccgcgtcagttgggaacgacgatggaagcggtcgacccgcaggacgatgcgaggaggattgcaatctagtacttgcaaatcataataatgacggtgaagactggtgaccacatgaccgaggcagcgaggaggtatgagtatggcgattgacaaatgaatattgaagaatgatcgtgggggcggggtgttgctggtcgagtggatttatggagaggaacgagggagacgtagacgaggtgtacctgggtgttactcttttggtaccgctggactaggaaatgacaaggtcctggctccgcttcgactcttcgacaattcgactctccacttctgatattacagtactctttcttctgatcctgattctcgggttgagacttgaaccgtacttttcgcctgccgatagacgagcttccgcttgatgcagacgcacccttatttcgcacacagacccatgatctgcacgccaaaggagatccaaaaccacagcgctgggagcgctcagcgcaccacagtaccgggtttctagatcggccgacgagtacagtaggatcagcatcaaccgatcctttgacgatccggcgagatcatgcctagttttgggaattggcaagtaccagtgcatctgtctctctctgcctcgggcgtcaaccttgtgctaacagcctaacggggaagcgcctttcagaattagacaacggactattgtatgccttcctccatccaaagcctctacccactagcctgacccactgcagatatatcatttgcgtatagtttctgggagtctcgaactttcctccggatggtcctattattaaactgcttaaccttcggactcccgagtcaactcccaccacaaacaaaatttcgtatacaactctcgcaatcgggcaagtcaagtccaacctgacagtttattggtccggtgactttcgaatcatatttgaattttctctacggttgctccacctactcaatagcccgaggatgggtcgggtacatgcactgcaaattcctatccgatcaacatatacgatgcagcaagcctactcctggtctgtactcgcatagctgacgggatacgttgtagaacagatgatttaaactgaacgcactctatgtgttcttgaagccttcgtttgtctgtcgcatataaagacgtactatttatacctactatggagcccaggttcaaagctctcttcttccatcataaattttcttgcttgttcagcttccttggatcagtctcttgtactggcaacaattgagaacactcatattccttgcctttgtctttttcggaatcatcccgcaagaccaaacctcatctactgtgtttcacgcccccttgctcacggttctagaagcctttgtcgagtgcttttcccaacgtctcggattagaactgatccttctatacttacttaccctacactaccaacgcctttggctaacgttcctctgactcggtatctacgaaggtatttggtcatcgaaaatcctcaacggtgattggaggctagatgctaatcataccaggtacttggacaagggtagcatcaagaatggctaaccagtgctcgggccatgtctttgccattgtgcaggccaccaacggcaatatccttacctggcggtgctctgactgcaactccgggccttttgttgctatctggcgctgcaagatctgtggccattgccgctgcaattcttgccacaccgctaaagcataagtaacagttacattccggctgttacccggcttaacgttcttatgacatggtatgagaaacaatatgcttcgtcatgattcctttttaggtttgcgcctttgtgcactttacaaaccatagagctgactttctattacaaggacccgaaggcttccacggaacgtttcagctgcagtgccttagtgcccataggctcagctcgccgtgagctgtgggtttgctttcgttacttctttcgttcaaatatcagtcccaagatgtttccttgattcttacctcatattactggcgtttcgacaaatcagcttacgcagacgctgtcatccatggtcaacctccaatcggatcaacttttcgcaacccatttgagatccaggtctttgtccgttcacattcgccctgaccaatataacgacgaagccgatggatacttttggctaagcaaacaccaaaattgcggccatgggagagaacagttctctcacatggatcagttttgctagcttcaaaggcgtccgattgtcttcaactctctctttcctccctcgttcgcatactaaacccttttaatggagcactaacggccgaacttgcgctatgccctcgaaatccatttttctgttgaaaacaacgcattgccacggtgttcaagggcggaaccaaaagcaaagtttatctgtttcctcattcaatgtcattttcttattcgatctgccggcgagtatccttgtctcctacctttctgccggcggcttgcttgcatgtctgactggcggactcgactgctctctttactgcatcgcattgtggagcgtggactgtgaaactcatccatagattgtgatccttttttggtccttgatagaaattctaatatactgcggcgacgcaactgagataaaagacaccttctgttttgatattcaccctaaattcatgtttcacagctcacaaaacacagttataataaccttccaagaggctgtccacgttgatcaggccattagcccagcttcgaattatctctaggtatggtatgaccgcgcacctgaccctgaccaattcaactgtacgactctaccagcaagctgtgctgctgtactatcgctgccttaaagaaataagacaaaccttaccaagtggataaagctcaccataccacaatttaactccttgaaactctataacatctacttctaagtgattgggaagctgaatgaccactctgaaacctagcggtgacatatgtcttatctctttctgtttctggcatctcaccccaacccaatcataatgggctacatataacagtccagatcggagactcagagattctagaaggcgctagaaaaccttgtgttgtggcatgtccgtgctcgtgcttcagacgttggtggtgttttccctctcctcatggtacctatggatagtttactcatagtacctagtatggtagcacagcacaaggagcgtgtgctacccgggccaccacactacactacgctacgtacgtacctaaccttgaacgcagaccaggtggctttttgccttcttttttctggccaatgcggttgttcattcggaaggtcgattggtgttaccagcgctcggactcaggctcgggcgggtcggaatacttggctgtacctgcctaaggtagctacgacagtattatagtatgtagtagttgtggtcgtaatcctggatccttgtcgaggtcttgggcgtggatgcttaagttgggtttgcacggtaggtaggtatgtgggttgtttgtttgtttgtttgcttgactgattgattgattagatggttgggtcacttgggtactaaaggtacacctgagagtttacgtgaaataacgtcctaagcgagggttgagtggttgggtatgtggtgttggtgatctaaatatataccagtttgttggcaatcatagaagtgagggacgaaaggtgaattgagttaggtagcagctctggaatccataatatgtttgggaacactagaactcattgcggcgggtattacgggttgattaaaccaactagcggaggacaagaaactgtataattagattatgagcgaagaagcatttgatgttcccgatggtatggagacggaaaaag

SEQ ID NO: 5606 - DNA, 9831 bp, Emericella nidulans
atctagcgcttaaccgagtatctttctattttttaactttaatggaagaatggatattgcagtttgttcttgttaacaagccaaaaaaaaaattacaactagccaacttatacccctctatgggttcacccagcgcttgtctggaaaaagagtacttttgagatattaggatttcgatgaggaaaagtccaaacctgggctaccacattttcgtaaatctgaaagcctgcataatccgagaaaaatatatactggactgttagacgacaggcagagacattctttcaaccttactaacctgcccacgcggcttccagcgaggttgatctggaattatgagcacagcttactagagctcgcctaacagtctcgtagtcagggtgcttgctcctaggccaggacagaattacaggtctttcgtgtcgcatacgccccattatattaatgcaagatctcactaattctgaatcgaaaactttgtaatctctcttcactcggcacagcactaagcgctcacggtcgccgagtactccttactgaatggatagtccacatagcccaccgccgagcggatttcatagaacgtctcacgctggtacttggtcaattctaccccttccttgaaccgatacacaagatccggattcgagatgaaatgccgtccaaacagaacaacaatatccttcttcgggtactgctcatcaactagcctccgcgccttttcgagctcatatccacccgcaacaagaaccggtccatgccaacgctcgtacacgaagtccaatgtttctttatccccatctagactcccctcataatcacgagcaccaaagactcgggcctcgatgagcgacaggtacgcgagattaaggtcgcttgccttgtcgatgatatctgcaaactgcggaatcggatcgtccattcgcattccctggaaccgcgaccagggactaaggcgcagtccgaccttgtcggcaccgatagcctttgcgactttctgcaggacttgatggaggagtcgtgaccgattcgccacgctgcccccgtactcgtcgtcgcgctggttactcgtgtcttggaggaactgatcaaggagatacccattcgcaccatggatctccaccccatcgaaaccagcagtcagtgcgtcctttgacgccttcacgaaatccacaatcgtctgctgaatctcggcaacgctcattgcccgcggaataggcgcatcaggtttctcatcatacgggatgggaatcgcgctaggtgccacgacctctattccctcgctctctgccaactttttctccgcagcgcgacccatactaaacagctgcacatagatgaagctgcctcttttgtggactgcatcagtgatctctttccacgcggcgacttggtcggcgcgccagatgccaggggcgcctgggaaagctcctgcagaggctgttgagatcagcgtgccctccgtgattatcagggttccggggactgaggctcgttgagtgtagtactccttcatcagcgatgttggggtacggtcgggatttgcgcgcaggcgggttaagggtgccattccgatgcggtgctggacctggacggtgccaattttgatcggcttaaagaggcgtgtttctgtcattgtggtcggtaggccagggggcataatggtgatcacatctgtttacaatgaggaacgttcacggtggacgcaagccgccttgtatatgtagttcctttttcgggagtttgcggtaaaatcatcgtggctgacaaatttatagcagagataatgttcctaatggaattcagaggttctttctctctaggagatgccgatatatcgctagactatggagctgtttgggttgatcacgttaactagttagggcaaacagattgttcctaaaagggaaatgaaattcttcctaatcagccctagcttcttctcgccagtttgcatttctaagcaaaatctccgagggttcttccatagcgtactaaacttcgtatacgtgccactctcactcgtcgcgaaaaatatccacacagaatattgtactgagcccctgtaacgtttcttttctcaaaggcaagattgagaatggtcgaggattttcggttcatttcgatacaagttaatgaccacgcaaaggacaaggcgtcacagcgtcaagcgcgctctcacgcggtcaagagagcgctggaaaggaaacgtaaacagcagcaactttccagggccaattttatcataaaaacatttaaagaccgcgatctcgataaatccggcaggacagagacaccatgtacagtcactagctccagtctagctccagttgtgtcccacctctcaggggctctggatccgttccagacccttgcagtgaattcatcaaggctgcaggcgttacttggtgattgtaagtgtgcaggacttcgaacttccctactattcttctcattccgtctcttctgctgactgccccagacagggccaggcaggcaccggagccggtctttagcgtagcccaggaacttgcttttcagagttttcgctcggtcttccgaaccggtttcgatgatcccgctcttatcaatgctgtaatgctagccctcgcgtatgcagtcaccggcgggaaccttgatcgggagtgcctgcggtaccagggtcaggcgattacatatatccgtgagcggatggcttctgaggacgacgcggcttcggaggcgactattggggctatattgctgatcgctggagtggcggtatgtaaattgcaacaaggatattactctgtctttatactctcaagtgtttgattgctgatgcacactgattccggattaggctcgcctcggattgacatatcaggtggaactgcatatgggcgcagtgcagcagctcctcaagatctgccagagaaagagtgtcaatctgactgctggaatcaagcgagccattttctggtcagcttacctagtgtgccgccgcttctctctactgcactctagctgaccatatcatctctgcgcaggcaagacctgaactcgacccttctcgcaggctccaggcgcatagtcgaccacaccacattcgctgttcttctctggacacggaatgcattcgcttcaagcgactatcgtcttcctccgggattccagtcccggtcacatatgttcggtaagaagtttactgctgtgctcgaagatctccacgctctgcaatgcatgcggaatgtccctcaacaacagaaagccgatgcaatggtcatgctccatattaacaatcacaccgcatctgtccaatcccgtcttattgcgctatcagacctatcccggttgcaagattgttgtcgcctagcggcgtgcttatgttccgtgacgctgtgctgtaaggtttggtgtgagctggtgattccggtaggtacaattcctctgcacgtatagaccgaacttcaccccgaagaatactcagtatatactgattgcatctttgcggtagtcccacatttcatcccagctccttatccaaattcgggaggcgcgatatgccgaccccgtgatatggaacggtgataccaactctgatttactcgtctggctactctatattggcggctcatttgctccaaaaggggtagttcgctcgggctatctggaactgcttgccccttattcctacttttcgtggccggaactacatgaccatatgagacagttcttctggtccgatcacgctttcttggcgccagttagagcgctgtggcgcgagatgtcgcagattcacttccggtgatcgatgtaagactaaaggtcccgtcaaggcaaagtcagtagccatcaagaattaccactgcatccctccaactgtgttctggcttcgttatcaccacgtgctttgaagagactcccatttatgcaccgaaatacgaacgtttagacgaagcgcatctaatctaacctttccttgcatatacagtttccttcctgacagcatgatgctggcccctacagtgaaacaggaattacaatactataaccttacttcgactggatataatcagatgtcccgctcaatccagcactccactccagcttcacgatccgcgttctatgcgcggacttaagtataggctgtcaccaaatagtgacggaatcaatactgatatacaggatgccccttctcaaggccttagtgcaacgctttgtcttgtgtccgcatagtttaagcaaggacccatactgcagtgccttagcttcattaggtgctaacaatgttaatggatatacctatctcgtgggcagcaaatttaacaatgaacaccaatagttaccctgctgaaacaattggagtgtctcaaatgttcccaaaatgcatctggctgagcagcggatgtattgcgcgtcctaggccatcgttcagcacgtgactttccagttagaagtaagaagtctttaggggcgacgagggtgaggattagttctcctgttaagttttgatgtctccgggactgtctactctatacagtgtgagcgggaggtcatccgcaccgacggagagaacgccaatgcccgggaggagcgatgacccgaggcactgtcaccgggcggcgagcgaatcttggctggacgccctgtcagcggcccgctccgttaagtccgtcccgctgctctataaattacggtagcccgtgaagtcatgtgttatacttcccatccgctgcaactgtatcctgcgcaacctacagcttcaccatgtcgtcaaaagtctggttcatcaccggttgctcgtctgggttcggccgcgagctcgccattgccgctgctcagaacaacgacaccgtggtggcgacctcgcgcgacgtctctaagctcgccgatctcgttccactcggtgtcatccccaaaacacttgatattcgagcgagcgatgcggaaatcaaggctgttgttgacgatgttgaagctagtattggacccattgacattcttgtcaataacgccgggtatatcctcgaaggagcggtagaggagtgcaggtatgtcacgccatatcataccaattgattccattatccctggttatgaagaatcccctgttctaacgcggaaatgagcagtaacgatgaaattctcgcccaatttgacgtgaatgtcttctcccagatccggcttctccgcgccgttctcccctccatgcgtgcccgcagagccggggtcatcgccaatctcggctctattgctgggtgggatggtactcccgctgcgggattctattgtgcctcgaaagctgcaattgccatctacactgaatcccttcggcacgaggttgctccgctcggaatcgacgtgacatgcattgagccaggctatttccgcaccaacttcctcaccaccagcggcgggcacaaggtcactgcgcggaaacggatcaatgacttacatgctggcactcagcaggctcgtgatgcgttggctgcttataatctccaccagcctggtgacccggtcaagggggcaagggttattgttgaggctcttacgaaggcgggccgttgtgaagggcgaagcttacctggaaggctggcgttgggactggatgctatagcgacgattggcgaaagtatgaagcgtgaacaggagatgatggacacttggagggatatcattagttctacggattgcgctgatgtttaggttaggaggcgtgtgttggggggatggtgtcatggtgcaatctggttgttttctgcaatacccctatatatcttcaataacggctaagttaaggctcatggaatatacaaagttttgcaattaccactctcgagggcgttcataatggcgtcgatcccatgagtacgttactgtaggacaaatagtgaataagcctcctacgcaaaatcaacgtaacggccttgcgaggctcaatattaactatcaacgaatagccgtgcagatgacagtactgatggtttgtacttgcctgagagcatgctaaatttatttccagaagcaatctagatatccaagatactgattccaaaaaatcgccgctgtcattattgggcttattatttaatccaaagcctaacaacagcaagcaactttggagcaaattcttccctttctaaagaagcatcttgtacattagctttagccgatggccaattcaggagagcatatccaggtctagcagctagacatcagaacacacaaagtacgctgaaaatgtactccgaaagtgtcgactcttctcacctgacggcagactaacagcttctggattaggagacggcacagttaggatttggaagtcacccgaatacaatcaaattgagcatacgtacgccgtgaagaggtacaactttcaccagatgagagacgtcgcatcatgctcgacggcacaatccggccttgggaagtggatacgcggcttttgcaaaatatactctcgcataacactatagggaacaaacctttaacatattccccagatacgcactggtactgtataaataggctttctaaaggcctacaagccggaatgttactaccggcgctttgaaacattctggtctcgccggcgactctttcgacactctacggggcacaataaccccctcacccagacaccgcagtattggcctatcacttgggtgacgcttttggcttcaggaatagagatactcagtgaagtcagcgaggatctctactggcgcgcaaagcttattttcttaccttctagcacgttggtcgcatatattcagcatttccctacagtcctcaatgtaacaaccggacgcatccaaggcgtagcatgtggccacgcacatctaatcagaaatgccaaattcccgctgatgagcgtttcgtcgagtagattgatgacatctgcctttagccaattggcattttcaatataatcgaagaaaagcttaaagtcgagaatttctacgtctcataacagcgagaagaataccatgagaactaaaggtgaataaaatgcagttagctacaaggagaagtccagccctagcctcctggctcctgcggccatcgtttgccaaaaatcatgccggaatggccttggcaacgacggcaaaatggttgggatatcgaagttttatgcctagtgatcaggccatcataagagcgtgctgcaaagcactggggcaatattccgacccaggagatagcgaagttcccagctatctctggaattagggctgcaacgcctgaccactggttaccacttgccctgccctttcattttcactttcgctactaggcgcatttactatcttattacctttattggtcaatactgtctgatgaggatgccccatttgtctgcgagaaacttgtatatccttggcgtcatccatgtcagttacatcgcaagaaattcttatccataaacggaccggcgcatattactgattctcaggaaagtgcggacatgtttccgtgcgaaaaggaacatactctgcgtcggcttaatataattctgcatgtctagtcagcttaatatctagtcttacatcagcccagctttgttaccaagacattgttcttgtgtcctgcacttccgggagataattagatagacacaaaccagtaaaacaagtcactaatttgaacagcttcgtttcatccaagctattctgttcgtgacctcaatggtctcagacgccttgtagattttctcggcatggccatgatgagagcgtgagtgtccagcttcctcctcagggcgtatgacaatcttgtcataaacgacgctagcgcttcccatgctttgctagtccgcctgggtctccaactttcgatattgccctgcatactagcgtaggaatggtcaagcatgcgttgagcgtagaagaatcgcatctagcgaaatattgacgacgtgctcgaataaacagaacaccagccagtttggacgaagtatataagagacctggattcccccgttgttggagtattctcagacgacatccgtcgctgctcagttaatcgatcaaaaacaccaccgaccctgttacccaaacttcaaggtttatttcctcgattatcgcccacatcactatgcgcttcttctccactatcctgcccattgccctcattgcaggggcaagtgccctgacgtgtaagtggtctacattccttaagatcatggtttgttccaacccgcgggaaattagaaccctgggcttaactagtcacataaactaacgcttgctctctataaccagccgaggatatcagagacacagaagacggctatatggtgatcacagctcaatgcagtgatgactattggacctgcctcaccagctgcccactgaccgcgcccgcctcattttgcattacttggccactcacctgcactatcatttactgttaagtcagtagaacttggcagagaaagctctagttctaaagcttgcatataacccgaggtattattcagaaatgtagtatcctttaccactctgattgttgcttatattatctatctccaggcgtcgattatcttcggacttgagtttcgtatattgatttgttgctctttcagtcacttctagcctgtcggggcctgtttgtttcgaacccttgcttacctcagtctcatatacgttctttttgcccgtgatattgtttcatattctatacattgtctctaccaggaagagctctggatgtcacagctcaccatacccaagcaatgaaataatatgcaatcaaacttgcctaccaccgagtcatgcagtaaaacaagtcaaacactggttgtgtaccggtcgccgtggcgccggcacggatgtcgcttcgtcaggggctattcagcacccagctagatagctttcttgctcggtgggccattcaagaaaacagactctcttcatggcatagttctcacgtgtcatatctgctaccactagttgcgtcacttactttctgactctcctgatagaccgcctcatagcagtcactcagagtctttgcacgctagccagttgaatatctttctgcgagactcctccgatgataagtgcacgcacgcacctttatggttgaagataggcttgtgggtagtagaattgttaagctcaacaactaagtaccaaggagctcttcccatgtagcaaactgtgaacaacgcggacgagacatgaaaactagcaaagccactagcggagagttcctacagagtggtgatcgtgggtgaagggcggacctggtaatggatatcaatttattgaaatggatgtactctgataattgatgctagtgccgttccctgattatatctgctgctctctcggctactgcgtagacagtgctctgtgtatgggcagacggaatgacagggaatatagaggcgtctacgactcggatgcgccccatggagccatataacctcagctcgttatcaacgcatcctccgtcttctagcttcagcattgcgcacgtaccactagcgtggttgaaggtgggagcggcggacgaccgaattacagcttcaagctccgtgttggacaagcctggggtcgggaaatgtacaacagttcccagctcctggtatgcatccgtcgtgggaagaacgtctgtgttgaatcggataccttgggtaaagattgccaggtccagtggattagtgaacgcacggtaatcaacaagtggcatgttgtacgggtcagttgaggccgcgcggacagatccccggctgagtggcttctggaggcttacgattcccccgatcaaattctccgttagggttattctgccctcaatcatggactttagcgtggcggacttaactttctcgta

SEQ ID NO: 5607 - DNA, 2805 bp, Emericella nidulans
tgtcggcgcggcgatgtgtgcggtcgacattgaaaaccgacgaccccttctgagcggacagccggaaagggaagtactctatcatgacaataatgataccctagcatgatctcccgatcgctccgcacggtctgctttttttatcagtctttcctataccactgtacgatcccgcatgattgagttggaatcttgacttcattcctcatctgcgcctcggctgtgctcagtaaatttgtacgcgaaagtcaattcgacactagacaaagcgtgaaacgtgctggacctcctacctcatttcgagatcctgctggggccttttgggccccggtaggcgctgggaatgcaatgagccagcggtattatttcccaaatggtaaacggaaacgacaggccagagacgacccttttaccttttactaggcagatcccctctccgccccggcgcctcatccgacagcatcccataattatacctcaggtgattcgcttgtacaggatagtcatcctcatgtgtgcatcggtatgaaattgtgccatgtgctggaaaaggaaatatccagcgttggaggaatcccagtccatgctgatcaccgtctcgcacctgaagaacgggcaataatgccagccccattgctaggcagccgcgctcgcattgccacaagccaacaggggcaaccccacaccattccctgtttagtgttaactcaggacccttgggcatcatcatcagtttcacatactatacgtagtctagtctcgccgttctcgcgtctcgcctcatgcggccaaggcctaaaacgcaaccctggaattcgcgcataggtttgttatgtctgttatgtcggtgtcggcattcacggttggagctcaacacactatccacaatggtgctaaagaacgagttcaagaaaatgatgcgcgatacccgtgccgagaacatgaagatactcaaggtaagccgttctgccctccagtatacctcaatgagacctcgctaacgcaaaaacaggctgagcaagaagaacgcaggaaactcgaggccatattacggaatctcaaaagggagcaagcgaatctcagcggcaaatcaaacatcagccggactgtaacggcgtcatgatgtctgcaatttccttctgtttcttcctctctacttctagctttcacgtttcgtcgaggtttcgttggccgctaccacgcagcttgtcagcaccaggcttgttttgaacaaattgaccaagctcgatgtctggcagggccttgattttattgctggtccacggtttttatcctaccattctccgtatatattcatatttttttcttctacctaatcatctcatcactcaagtatggggggtttttttttatctcggtttctacttgtccgagcctgcacatatcacgcttgacaaatatgtatcatagatttcgatcagttacggctgattatcgacgttgaatcgtacacttcctctattttcatattctgatactttggctcaatggagaaggcgcgatggacagtctcatgtaccaccaaatgccttcagagaataatgccgaccacccgagatcgctccccctctgactttgtttccaaacgaatattgctttaccccgtggacgccatcgcgcccatcaacaatctttatttattcaatggctgcccctggcaacccagaaacaactgaagaagaccagcgatacccccttgccgaactgtttcccccgaagtatgattcgccgtgcgcacgttcagtctcgactatcttagagtcgagcactgcaggctcgatatacgatgcactaagggcaaccaccgacaacgacagcgagacggcaaccggggaccaaagtgatggtagcccacttgagcgcgtggacaccaaaatggcagcgagtgttgctacctttcactctgtctcgcgggcaaaaggccgccagtttggaggctcggcgcctgatcctccagtatgcagtacagacgaaatcagcagacctccccgtgctcatctggtggccgataaactgcgaacagcgggtgaggaagtgaaaggatggtcattaccagaccatctctcggatttccacgaaaacagcgaatccaaccctacgaatggccctagcgtggctcctcattcagtgggcacagcgtcgtccccaaaatggccgggaaatatcgaatcacctgtgagccctacacttccggaatatccaccacccgttcgagcacccacgcccccaggccttccaacttttggcagcgaggaagctagaacgtatgactttcgaataggggctcagcatccagttccaaatcgtagcgagtcgttgctacgcagactgttccaacgagttcctcccactcccgcaccttccctggtcgatcgacaaccacgtactcgagttttcgcagaagacggcactgctattctaggaagctttccgcaacggcaaagtggtcatggtacgaatatactgaagggaacagatagccacccattccatcagggaaacctgcctctcgctcagtgcgacggagcaagcacaggacaaaacgacgcggtatctgaagggccagcccctcctgatgcttctccgtcagacgactacagcacagaagacgaagctaatttgcgctggttggagaatatgacccgattacaagctcccgaatcttcagctccacctggtggtatgctgaattcctcattactaaatcaaggttcccctcctaagagggtcgagtcttatcagacctgcgtttctcgaagtccagaatccacatggcgattcatc

SEQ ID NO: 5608 - DNA, 7746 bp, Emericella nidulans
caatcaattttttctgtcttcttaggctgtctaattccgccaataacctaactaattcctttgcgttataccccgatttataggctctatgcgctgataatcatgctgtgaaagccgtttgttgagttctgatagctttcgattcttgaggcattagcattgatttatatattctgtcgtattcttggcgttttttgggatcagaaagatgttcatgtgcttcgttgagctcaccacacttgcatcaatgctaaacttcgaaaagatatggtagcagcgcttactagttggaattcggctgtcgcattgggctcatgttttcgatctgggtgcttgaccaaagccagtttcctgtatgcttacttgatggcttctgaacctgcagtctgcctaatcctgaggatatcataataatcatggctgactgtagtgagcgacatatcatgacctagttcagatagagacggatatcaaaggttaacaaacgctagggggctgatccaagaacaaggtggaattctcaacgccaacttgtgatttaggcggagaagagaattccagatcgacctaatgagctgtggctgtcaagattccttacgagttgcccagccaggtttcgggtcagccaatcatttccagatccaatggattgttgttgattgttcgaaggtccaacgaaaccccgtcttggcgggctgggctaggttttgcggggagggtttaacaaatctactctcagaaatgaacactaggctgcatacacttcacacagatagctgtctgatattccgtgctgatagctgcatgtgcacgccggtctagataccgagggaaggacggccactctagggaaacagtgcctgtgcagtagcagaaagatccgcggcagatctcatactatatagagagtactacaaaggggcggggtaagaggatacaagacacgaacaaactgctggaaaatcagctcgacaggagtgcaggacagagatagcacactggctcggccggacagtggccaggcctctgttcaggctaaatgcccatggctataagttcgcggccaagacttgcaatactgattattgacgccgcccagtctccctaaactcaaactatagcgttatctggcgattttccggcgggattgtaggccaaattccgcaccagaagcgcaaataagaagctacttaaattgctcttcttctcgtcccccgtacccacaggctgaactgtcacttggaaatccccatggggttgttaagttgttagtgcagtgtgcgaccctagttttgggtgtgagtatagcctaaatgctccccgcgctgtgtatataggttgttcaatacgaacggtatttcgagtgaattgcagcctgttaaccttcagctcttctttatcacaatactcacttgaagaaatacattcatcaagaacccagagacgcgccgccatggggttctctctgcgccccccagagcagactcgcaaaattgtgccaaagaaacctgcgaaggggcacttcttttttgcgcatcgggagtttgcccgcgtcccgtggtggaaaaggaagaatatgcggaagctttatatctacattatcatcctgattctgaccaacaccgcaaatggattcgatgggtccatgatgaacgggctccaaacgctctcctactggcaggagtactttaaccatccccgcggtgctatcctaggcctcttcaatgcgtccatgagtctggggtctctcattgggctttttttcgtgccttacctgatcgactggcgtggccgcaaaattggtcttgtcgttggctgtcttatcatgctgctagcagtggggttacagtcgggagcaaggaattttggcatgttcgtcgccgcccgcatcctgatcggctttggggactgcattgtgcttggtagtgcgccccttctgatcgcagagattgctcatcctcaagaccgagcggtcttggtcactctgagcggtgcctcgtatcactcgggcgctttcatagccagctgggttacgcttgggacgctcgaaattccggtaaactatgatatcacactggggctttgaagttgtgactgacggggcttagagtgactggtcctggaggcttcccagcttgttgcaggcgatctgcaccattgtcattgtcatcggagtgtggtggatgccggaaagcccccgttggctgatctatagggacagacaccccgaggcactcgacattctcgtaaaatttcacgcggaaggcgatgagaacgatgagtttgtccagctggagtacgccgaaatcaaggccgcgattgcattggacaagcagattggccataccggctgggtggacttttttaggtcccgaggcaatcgcaagaggatttaccttatcactgctcttggtctcttcagtcagtggagtggcaatggactgatctcgtactacctcaaatatgtcatggacggcgtcgggatcacaaatccccagacacagcttggtatcaatgcaggaatgaagactgagggcttagttaccaactttgtctttgctttcttcattgagaagctaggaagacggccgatgtacctggtctccacgatcggcacctgtgtcgtgttcaatatctggacaattgtttccgcgcggtacgaaattgcaccaaataaggggctgggatatgcctttgtcttcttcaccttcctctacggccttttctacgatatcaagtaagttccgctacatttccctgttgatctgcgccgtcagaatgctaatctgggaacggataggtcgggtctcatggcaacgtacactactgagattctcccgtatggtctccgtgcaaagggctttacgtggctgaacttttgcgtcactggagcactttttttcaaccagtatataaatgccattgcgctggaggcgttggcctggaagtattatatcgtgtactgcgtgttcctgggatttgaagtctttgtgatctactccttccttattgagactcgctacacaccgatggaggaaatcgctaagtattttgacggagatagcgccgtggatgttggcgaggtcgcgactgcagatatgaaagagaggggatttgagatgaaggcgtccaacgacccgactgctgtccacgtggagagcagagactagggttgggtaatcttgtgcagatcctgggatcctggttcatattgaggaacttcgtattgcatctagcagcgggaggtttcttggttaactcgataacagaattgatgaacaatactccaagaccaatacataaagccactgtcttgctgagctcacttacatactatcgagaattgttctgtattcttcgacgttcactagttccgacactgatctaggtcctcgttagtacttgtctgggtacgtcgagagtggaagataattccaggccagttagtttcaatactcaacctttgtgctagtccccttgcttctaggagctcatggtgctgttgtgctcacttaataacgcattaactaatgacgcattcagtcttcgcaagggactgggagtcgcaagggccgttaaatggatggatacctgcgtctgggtattggtgatcctctttcccttgccgtacttctgccaaacaacagccgctacatcgtttgaccatttgtccatcagaactcgtcatgtcatagcgggatgattaagtctgattattgctgcgatgaacagaaggatggcgatggtttcaaaactcgctgtcggccggtgctgtggctatcaacgggatcggcaggtagatcgacagggcccgcagccctaaacgacggatcgaggagcctcatatcaatttcgccaacgccttgcacaactcctcagcagacttgaaatgtgatgcttgaggctaggcatgctaagtagcagaagggcagcgatccatattaaccaaaaactcgacccattcagcagcgccggacatcaccgtgctaactcgtgatgagcgtggcccagagttgtgggggttttagtgccagctcccgttgtgtactatcgaacttccttgttgtgcctacttgtgaaccgctcctgccccgacacattcgttctggccttcgtcattagtttcttggggaaggtattggccccattgagaatgccatcctgcttgccgcatcgcgtatgtcattatcagactatgcatcagctcaatctagttgggtaaaaggagactgccccgccaatttcttcgccaggaaatggccagcagtgctgggtgtgttgtcctctgtatgcgttagccgtctctacgtacagcataccaagccccctcatgctttcctttggataaagtgacttacactaagcggccattctctttcatagcataatgtagcaggcctatgtacctcgtgcgttcggtaattttctctagctacttaataagcacagatgccgcagaactctggactgattggattccttcattagcgaaatattacagtgaatattccttcagatataggacaagacatgtcgagtcgagcacaagccacacttggctactgacgactttatacaccaaaggatacattgagctatcgtgtcagacactcaaggcaagattgacaagcatcagctgctgccttaccaagaccagccaggaatgtcaggcatttcgtgagctctgtaatgaccaacccgtaccctcgatttcgtttacccggtgactatcactcatctcaaccgcctcaaaatcccctggtagctctgccattcgtgtcggtttttgttccgagcctgcaaccgcaacccattcatttttcataggacgctcgtcaggctgtagggtatctttttgtacttcgatcaaagtagggacaacacccgaacctgccgggccattcgatgtgatagcggaaccagcagtagtgacaggtttattgtttcgtcgtcttacaccgacgaatactagagcccccatgagagctacaccagccactgcaccgacgacagcccctgcaatcgcaccccctgagaggggcgtgtcccctgatgcagtggaactggtggacgatgctgttgcggattgtgtttttcttctgtccacaatctggaatgagccaaggaagttactcgcaggcttcgagtgatagtgctccgcccagccagtgggatctccagagcagttggtattttgatacacatagaaagtcgtaaaatccccgtctgcgtcgtactcaaagaccatgcccggcgggttagcaatctcggtgcagggaaagtcagaggagccgctggggacgtgcgtgttgttctgcgcatcacgccagacgaatgtccatgcatgggatcttattgggagcaatgaaaaccagtacggagcgagaagtttgctgagccaccgcatattgatgaatttcgttcaatcaggaggaatgtttgtgttagttcagaattgaccatatgggataccacttctaaattgacggctggggaagttccggctttgatttacgttgaggttcattccagggcccagtgaaaaaaatagtttgtgacctgctattgttcaagcgcccagggccaatggtggggtatagtcttttcagctgagaccacgtaatggatcgacaggcttccagctccaatggtatcattccttttgccagacctgatatccctgcctgtcttaggtgctgctgtgccgatcagtgcaggcgagtcattcacttccgtaatatcagaaaaatgactgaaaatccgttcacttaaagcatacagacgtcgattcacctaacccaaaacacagcagtcgcaataaaccagaatactgtaagttgtaccatactgtagggagtttatccatgatctcacaggtgtgctgcacaaagtcgcttgcgcgaggaggtctttctcatggctacttggtaggcggctgttttttcggggcacaatcgatgtatgtgctaagaggccaatttcaggttcagccagcggcagcctctgatcagcaagaatacgaggatgcttagccatgcttaactccatttggaaacgcgtccgtctctacaggaaaggaacgtactctaagtaatgaccttgttgaggaggatgatccccatggtcacgatcggcaccagctggagctgccaagtctgatgtgcacttcactatactcttattcgcatatcggctcgtatatgactctggagtgtggtggtatctggaagtttaacgagacgtctggaaatgccgagccctttcactcccttggcatttcgccaggggggaaacataaactgcagtccatataccttaacctacataatacagcaaacttgttacatttgcctaagaaaagtacaaggatataagctacgctgtgtttggatagttggactttctttgaaattatcagttagatgttgtactatgttctttatggcctcagtcctcagtaatcttggagtgctgattgggaaggcaaacttgcagacgtcgatctatcacgaataacattgaaaggttacattcagagtccttgcggtccaggagatctaaacacattacatcatacgaagctctcccctcttggtcacgattccttgtgattggtatatacgagttgattaggtagttcatatgacgtctctatgtatgttgctagttcgtcatctcgagtcaaggaatagtacggaaaacacctgtgtgtggcgtttggtgtgccttgtacgaaggatgagccgaaccctaaccgagcgtacctaatgagacgggggttccagtatcactatcgtcagttactcgagtcggtaatagctccgaaacttataggcggccaggccttggtcagagacgaggctcaagtaatgagactggccatgcatgcaacatgacgccctcagctccatttccctccatctatagacgaagcatcgccaccccgagatgctcaggtagatgatcttcactttggcgtcgtgtccgagcatggctactcaatgggatcttaccatctattttcagctcgtataaatcatcgtgtaagtggggtatggtctgaacccttgtaggttgtgcgaggctagatgcggattgtataacctcgtttccggaagttcacatcatccttcagtaagcgatagtggcaatgcgtacactaattgacctaactgacaggacttttcatttgattggaaatacgtcttcgaaatacgagccttgtcctgaggcaaacaacttcaacgaaagggagaattaatataaatactgggtttcgaactcgttgccatctctcacttcgactttctccccagcccaacttcaaatcactcgccgcggaggcataacgcaagaagataatcaaccttttccagacaagatgcagattctgagcaccacactcactgtcatgtctctcatgtcggcagtgactgccaacacaatcgtgagatggcacggatgtaatgggtgatacccagaaactcaaacaactggcgaattgtgcaccaacgtggggtggcttcaataaccgggaatcctctttttctcttgaagatatttttcaccctttggattactttctggtgcggagatatattctctctccggcaggatgttttggctccaattcctcccctctaggaagactcatccggtcacttcatttgtcacgttaggcgctccgtaaccaatgactcatggcctttccttgtcacatgctatacgcctgtggtcatttttcgc

SEQ ID NO: 5609 - DNA, 5627 bp, Emericella nidulans
caataggaatcagtaacctgccagacaaagaattgatggactgttaaaggacctaagataatatattattatccagatatcaagaatacaaatgcaaagtactgtaaactacaacaataggctgcaaggggtctatataaagtatctaacagcctataagttgtagatagccagtttttattatacatctatctaactattaatatcctccaccacatcctcttctttatctacggctaaaatcctgcctgcagtgctggttgctgagtggtaccaggctgccaaatatctaaactatctgctgcccaggcagccctgcttgccatgctggctgtccgcgagcctcagatttggcaaaagtacattagggatggcaaatctttagttatgtctataacagcaactctaaggcccttctggggcagatggttggttcttatgcgcccaagccatgtactcactgccacattaaggaaagtagactatttgaaggttgtatagtggtagctgggcgattccagggggcttgtgctaactgccacttggcagtgagggcaagcagtgtgactttcacagtaaatggtctattatccagactgaaagagtaactgctgacaggtaatattagtcgaaaatcttgtaactactaccctcaagcatgcctgcaagtgtgctgccgcccttgctgcgcttgttgctggagaggaagaagaggaggaggaggaggaggaggaggaggaggaggaggaggatgaagaggaggaagagaatgcccgccgccgcaaaggcaaagccccggccacctctgcccgtaagggggttcattttgccagtcatgacacccgtgaacatgcagatagagtcccgcgccgcgcccagcgcttacacacatgctggccgtggcagcccgacaggtatctgccgccgctgctgcccaggaagctctcgcccagacgctgctcctggtagaatacatcatgggtgtatattgcattctgcgaattaagtggataacacgtgactgcggtggagtcagagggtaaagttcgtatagtaatgttaatttcatatcgccaggtatatgtcctcgtggttcgatcagatccaggagctctggtttgctgatgatacattgtgatctatctatcttcaagggggaggggtagtggtgatgtcacagcctgacaacgcggccctgaggatctggcattatcccggtcgcatgaggccttggactgaagatacccctggaatgactggctgctcgtcgatcgactcaagccattgtcaaatcagcaacttggcacagacggcatacaattggttccggcagccctgaagcaaccagagagatcactgtttggtcaacgtgcattagggccatcgaggggcccatgcacacttacgccatcatgcagaggtcctggcagacgaagtgctggggtcgattccaaggtcgctactgtctctgtttctcctgttggccattgcacctggaatctgactaggcctggatcctggttgtcgcaacatcgttcgacagaatatatacgtgactgaaacgcacgacccctccgtaagtggctcccggcctgagacgcgatcgaagcactgacaaaggggcaaggcactgcactccagactgcgtaatgatatgcgggggtatgcacgatacgggtttatccgtcacggttagactgcaagtgcctgcctccccaggggacttggcgggtagagctcgcagggacccatcggccaaggttggagtcgctgtggatagtcggtcgcggggcactactacccaaccgtggcctaggtggaccaggaatcctcaagaagagtggcaggtgggagagaaatgcgaaaagactcgacacttcactctttctcttctttcgtatctaagtcgaagacgtcatcacggcaataccgggttacaggtgcaataccttatcagtgtcttgcaggattgacgccaggatgtcggcgaaatcggcacattgaggcaaatcataaaatgcctcaaatggcattgatatgcaaaagagtgtcctagcttagatgctaaagtcgtctaactcgatactaactcgatagaagcccaaagggttttagtgtagtagtgctgtgtagtatgatcattcgaggaaaccgccccgctcgatacctacccgacgtacggaaaaggagtccaggacgcgccggttgggccagagtcagaccacagtcgtggttgaagcttccagccttggaagctgacaccagcccgggaaggtagcccaccaatcaagtaaacacgtgaagaagatctaccccgttagtccgttgaaccgcctgcgctgcggtactgccagagaacgtggtctgccgcagtaccggcgagataccagttatcctgaattagagagcacgagttgggaaggcacgaggcgggatggacatcttcgaaacgcctaaggtggagctgtcaagtttcactgccgagtgctgacgactataggcttccaccaattgcccgatcacccggatacagctgtcagttgattctttatggttttgagtctgaggtgagacgggcaacggttgttgtccgacacagccacagccgaaggactacgttttacgtgccctgccgtcccgacgggctatatttaccggggacgagcagaccgtggtgaaaaaaaaaaaaaaacctcagctgagggtcgagaatcgagttcatggtatccttggtcatcgatgcgatggatcttgaactatgcgggaagatgatccggttgacagttcgacttgggaagcccatggatacatgactccgccgctggatttatgatccgtgacgagtttgccgtacggagcgtttctgtacctgtagggcgaatctgggcgatcgcttaacagtcagtcatgacgacacgacagaatgatgagcgacgacccaaccatacggtcgacagtgctgattccatctgcacgatctcttgcacaagctatctgatgacgagtctcaagcataagtatggtgacatacagtctagaaaggtgaattagaccatcccaacactgtatcaacaatgcagtacaaacagcaggcaggaagcaccctcaactagtacccgctatgcgaccatggatgaagtccgccagattccttggttgacatagtgatattctatcgggaaccactatttttctgacagactagagattgagagtctagagcgactatggagcagtgaatatcgcaagagcgctatctatagagtatctggtgagcctagaatctagcatttgaaggagtcggtatcagaaggaaaagccagatttaaggaaaaagaatttgttttatttaataaagaaagaaaaaaaaaaagaaaagaaaaatcccgaaaaggggaactggggaggaaacagggacctgagcgaggaaaacggaagcctgagaggtgggtcgattgaaactctaaggctgccccggcctggcccatactaaatacttatacgcctccctccgcttctacaatcttccactttcttcaactcttctgcttttagcgaccgaccaaaactaccaaataatccatacactctgccgcctctgctgcgtctgctttccgagcctcacacctaccgccatgagctcctcctctgtccaggtcacccgccctccctccagcgccggcaccggaaaggacgtcgccaacaccagtgccccaggaaccatgagcttcgatgtacgaaccactttgcgttttattctgcatttctgggaccatttattaatagagcattttccacagattataagatgttccaggtgtcagaagagcctaagtattgagagtgactctacgcctggggtggttcgattcggcatgaacagctactactgtagtagatgtgcttcgatggttggctttatccgctgaatgaatgggcttctgaaatacggctacgacgcgatactctattctgcctcgcaacgatgtcggacaccagtttatcggaaccatacactactacaagtcgaactcgaactcgcaccggaaccctcctctcgtcatttatagactgggaaaccatagcacctgaatctcggcatcgataatcgtcggcctcgccggatgggtcatacaataaatgaatggcattcgccctggactacctggacacctcgatacttcagacatgtttcgaacgtcttcactgtgctggcgcagaatggcctaacgaggccaaatagcattggcaggtccagtcactgtttatcagcaagtccgcagccgcgtcgctacctccgacagtgtttccacataccagtcgcgattaaacgcagtccgaatgagcttcactcgcttatcggcccggtcgcacgcgatgcacattggaacctgcgataccacgaattctaccacgatttgacaaaacgtttggggattcattcggaaatagacgaccgggaaccaccgcatctcatcttcctaatagaatagattacattcgggctgctattggtcgcgcttttttcgccaggagaaaagtaatatgatgtggaatcggctcggatggcaacactccgtgtatctaactagctagctacgaacgcaagcattcttgacaaacaaattccccctctgttctccagtttcagtaagggccacttggatgaaactactgaaactactgaaactactgaaacggcccaattatgatgctaaactagaacccagatcagtaatttgacgcgcctatcgcaatgttaatctgcggtaaaccccagagatcttcgccacgctcgcggtgaactcgtagatcactcggccgggaggaagcgcctgcatacgacggcttatactgagtagttttttgacacccagaatgtcggtactcgatccagctgatagccgacccccccagctttacagccagatgagagactgagtttcgacatcgacaccacaaccacgcgacactgagaaaccccgtacgtccgtaaatacgagcttatgtctcaccccctttccagaagagaacattgcatactagcacttttgcagcctggagatttcacgcaccccgcagtggatcaattgaagaattttggctccacgacccatgtgactgccaaaatctgagattctgagattccaatctgaatctggagaaagattgaatttgacgggggatacaggccccagagactagcaggtcgctaactacatcaagctattagactggagaatcgaggggctattcatgcccccatgcggtttgctgcaagcacgcaactccgcggccaccatgtgcctccctgctccttcctcgcgggttaaagatgttcaactgcgatccgcatctcaggtcaatccgatcgggaaatactcgggaaccagggtttgactgtgggggaatgtagatgacggtgaaactgaagagttttaggtgctcctcagcagtagtggtcgtgcgctactattatcccgtatttctggatccttggactggagtcctccggagcccactattcgcctttctttctatcgcgcctgcgacgctaatggcctgctacagcatctatctcagcgccgaagtcggctttgagtgcatcagagaaacctatactgata

SEQ ID NO: 5610 - DNA, 7518 bp, Emericella nidulans
tctctcaggtcccatacctggcctttgccttacctacaacaacaccagcatcatcgctcagaaccctaaccacaatcctacttcatcagccccatgcgcattagatgggaacgactcaagtcaaagccaagttcaaggccgtgtagcagcggcttcacaactgcaatggccttcatggagccgacgatgcaggacttcctagcacagacagacttagacttgggattactaaatccagttgagacatttatggaccatgtggagggtttatactctggacatgagttttcttgactctaaatatctggtgtgccttggatcgaattccatttctggggctgttatagttcggcgcaggctgccgaacctctgtcgtcaatcctcggccctgaccacggcataccgaacggaaaagaatccgttatctgactgcccaacagacatatgaatgcaagactgccttgtttattattcataaacctctatcagataaagttgggccttgaggtgacaatggaggaccccgaaaaagttgccagctccagctccagcccaggaacaagatcagcatcaccatcacccagcacagtccgaaaacctccaaatactcacacctcaggcttccttctcccaaaatggcacaaactcataattctcttcgtcgtctcctggatgacgctcgccgtcacattctccagcacctacctgctaccggcaacgcccgaaatcgcgctcgaattcaacacaacgactgaaatactcaacataacaaatgcaggtgtgctcctcgcaatggggctctcgacgcttttctggggcccactcaccatcttaatcggtcgccggctaagctacaatattgcagtggctgtcctggtcctctgtagtgggctcacggcagggagtcggagtatgggcatgttcacggcttgcaggattactggcgggttcacggggaccagctttatggtttcggggcagacagtgctggcggatatcttcgagcccgtatgttgatcgcttttctttctctattgtcttggtttgaatttgaggggttgacgtggtgtacgtactataggaaatacgagggactgcagtaggattcttcatgctgggcactgtgactgggcctgcgattggtatgcctcctcttatcatacttcgtccacgctgtgtttatactaatgggccatgcaggcccctgcattggcggcataatcgtcacctttgccagctggcgaaatatctactggctgcaaaccgccatggccggactcgggctcgtcttgtcgttgatattcgtaccggaagtgcagcaggatatctccagctctgacacacagaagcaaaaggaaaaggagaagatcactctccgatacgcattgaaagtcttcaacccagtccgtgtgtttaggctttggctgtatccgaatctgcttttctcggtatgtccgttgcacagcaaatacctcgtaacagaataatatgaaagtgcacgtactgacaggagtagtttctgacctgcggcctcctagcaacatatctctacgcccttctttcctccgcccgcacaatattcaacccgcgcttcaatctaacttccgctctagtgtccggacttttctatctagccccgggttccgggtttctggtcggtagcgttctcggcggccggctctcggacttgacagtgcgaaaatacatcgcacgacggggattcagactcccccaagaccgtctgaacagcggactcatcatgctcagccttgtccttcccggcgcgactctggtttacgcgtggacgcttgatcaggaagttggtggaatggcgatgccgattattgctgggtttgttgggggtgtaggcctaatggggagctttaacgggttaaatacttatgcggctggtacgtgttttctttcttttcttattccagaccttgctctcggtggatgaacgctaatatatgtgtttggtatgtagaagccctcccttctcaccgggcggaggtcattgcgggcaagtatatcattcagtatattttctctgcaggggcgagcgcgcttgttgttccgttggttgacaagatcggggtgggttggacgttcacaatttgtatgtttccccccttgcggtggatgcagaatttaaatggttgtttgggactaagctgactgtgtgccagctgcgtttttcaccctcactggggcagtgctggttttgcttattgcgcggtgggggattgatatgcagcggtgggtggagaggagggttcttcttccagagaaatcgtgagcgggtttacaatggttggctggttttcatgtgttgatattcgctgcatagtagccatcatatacacaggtagtagatagacattagacaaatagaccatgacgttcataaagttgacgaagcaacgatatattgaagttatgtactaaaagatcatacacgaaaacaaagttatatcaatcaaatcttacactacagcagaagcataccaagaccagcaacaacactggtcatgatgtaggcgccgagctgccagttgccaacgtagacagccataggacggggtccaagtccggcagcaccatcagaggtctcactggacgaagagccagagcccgaagcatcaccgccaacaccgccgtcgggtgtattaacgttgccggtaccgtctgtgccagcttcgtcaagcaaggtcttgcagctgtcgcttgagtccttggcgtcaacggtctcaccgcggccgtcaaagtcacaagcatcatcgctgttctgcgccttgtagtattggctcatgacgaaggaaagctgctgcttagtggtgcagacgctgtaggctccgtatgtgccattgacggcatcagccttctgaccggcgcagtacttgccaccctcaaggccgcaaatgtagccgaagatttcgccgtattcttcctcgtcgacgttgtccttcaccttgcaagtgagagtgtcctccatgcaagagcagaggttcgcgttaggggaaggaggaaggtcagagctggcttcccaggccttgccgacggaggggcatgtgggaatggcagtgttgctggcggtgaaggtcttgctgttgacaccagtagcggtgaccttttgcatctgggaggaaaggtaggagaagtcgtcccgggtcttgacatctccgtcatcgatgctgaccaggccgtagtcgttggcttcctggaaatacatgtagacaataccaccgctccacacatcgttcatctggtcaccgtacaggacagggacatcagtgaacttgcgaggacgagggtcaatgcagccatattcggagaagaaggctgggacggggtagtccttgaattcctcagtgcgggccttgtatccagaagcagcaaagctcgattcaccgcaccattcgtaaatgttgtaaccaaacatgtcaatacggctgtcctcgtcaccgcagaccaggtaatccttcaagtccgcacggagttcggcgtcatcatcagtagcgtatccgacaagcagagtatcacggtggttcttcttgatgtaggccttcatgtcacgcacggcagccttgacgaaagcaattaagttggtgttggtgttgttgttagcaacctcgttaccagcaaaaaagccgataacattggtgtagttggcaaaagcatcgatgacactggtgtagcggttgtacagatcgacgttccaggcgggatcggcacggttgatagacacaaagggcgaggacaaatcggtgatcagatagatgccggcgtctgccagcagacccatgcagcggtcgtggttcttgtctgggttgacggcataggttcgaatcacgttggtgcgcagctgcttcaggtagggaatgtcgcgctcacagtcggagtcgtcggctagggggtcagtgtagtccgcgttgtccgaggccgtgccgttggaggagtactcctgctggtaggcaacaccacggatgaagaattcagtgccgttgttggaatagaacagtttgttgccctacgattgaccgtgtcagcgcctggtaaggcgatttcggtgcccgtgcaaccgggctggcttaccttggaggcaatcacgggcaggtcggccgccagggcgctgcccgcgagggcggcgccggcaagggcgagagagaatctcattgtacaagagcaacagaaaaactggagaacgagtgtcaagaaccggacgatcagttagtcagtggttgatcacgaagatcaatctttcgagctggtagctcttcgcaaagagggcacgaagagatcgatggagtataaataagtcaacagaacgaatgactgacgacaaacacacgtgtgccggtcgactgatggagaatggatagaaatgaagaggcaggaagacttgagggaaagaagaaaggttgggatgggataggatggaaggaaaggagtcgaagtaaaggcactggagtgggacggcggcgctgagacgggaacgtaatacgctgcttgtacactctaggcagtccccgctagtccacagtattgtaacttgtccctgaaggcagtcccttaagtccctgtagtcgccagggtctggaaagggacgagcagcccgacgtacctaatgtaaataatgatattgtttctgcaccatttcatagtcctatgagctacagcatcatgcatgcttgggctaacttgatatgtcattcttactgcataacagctgcgagaccggcataaatcgcctttgtctgggagcgctaagaatatctgaaactagaccgaggaccagaccctgaacaaacccttattggccagtgtccaagtcattcttactggattactgtaacatacggttaatacatatgtaatgcccaggcttggtattggtcttatatggtcttatccctcagccaataatgcttgtctttcaagcagcttcattaccatcggtcgctctatttattctcgggataaagaatgaaaaatgaatatctggcccacagtgagaagagcgccagccgtttaactgacaacagaagatttgggcattgggtggtcggttcctggatcccgaccgtgctgttccaatggtagcgacatgggaacgtggataaagaaatgcgacgcatttacttaccagagattaactcccagtcaaaggtcgctttgatctcgtgcccgtgctttgtcctctatcgtcccgacctcattatggcgttccctctttcgaggattcggtgtggttggctgcaaggcctgtaatatcatgctaacaaggaaactgcataaccacactttctaagccaatcagacgctctatctcgtctacatgaaatggcaggggtttcaggtccaattagcacaagagtttgcagcaagggcgaagtgaagaagaatgaatccttgaattctggacgcgccgttatccagcgtgtctgccaacctgccaagagtaggaaagcttcgccatgaagtcttagcggcgatccgatagctcgatgtctatcaatatcctggcatcctgcagattctgtcgtattgatatcagggccagtgacgcatttattctcactcaacctttccgtttttgtcgttctttacatttctgtttcctcactctcgttcaggcaattttaccatatttatttgttgtgggatctctcggacgatcactccgtcaccggcgtttctcgatcccccttttttgacctccagactccaaccagcctcatcttccactccaggcagcaacttatccaaggctagggtctctatgagccacagtcccattatctaacgcctcattgaatcggagtaagtgttgtacacagcccatcattcgtcgtgtctttttctgcccaaatgctggcgcagaagcctcgtggctacgtggcgcggcaagcccacgtactgatgtggctgagtcactgtgtatacaaaagaatgaagacagtctaatggttttgtagtctgatccaatagtcaagaatttcactgcgctagacatgcgtgagcatattccaactcctcttgatttccagtctgactcgtctagatatttacaaaagtcaagccaggcacctggcctggtatgatcaagatggcgaacccacgatccataaccccttcaagaaatttcgaagaagcccgcgacggacgaattcgatccagctcgaaagcaggttgacacaattctcctctgctggcgccgtgcgccctgaggaggaaatccggcgcaatagagaaataagagaaggtctgggcgggcccgctcattcggactctttcccacccggcactgggacgacggtggattcagtagcacggcccgaaagtatggaaaaggcagagccggagccttcgatgagcagtggcgaccccatcaatgtttcaactcgtgcaagcccggctggggagtcagagggcatacctcggaagcggacgcggtttctaaggctaagcgagccttcgaacgaagaaggtaaagaaatttccgaagatgaactgcgggacaagcagaagtttacgccagtgggacaattcaaggccactgtcctaaattcatggatcaatattcttatccttgccgcgccggttggaattgcgttgaactatgttgacgtcgaccccgtggcagtttttgtggtcaatttcattgctattattcccttggcggctatgctgagttttgcaacggaagagattgccctaaggacaggcgagacgattggaggtctcctcaatgccagttttggaaacgctgtcgagttaatcgttgccatcattgccttggtccacaacgaggtgctcattgtgcagacatccctcatcggtagcatgttgtccaacctccttttagttctggggatgtgctttctcttcggtggcatcaaccgcttggagcagcacttcaatcctgtcgtcgcgcagacagcagccagtcttctttctctatcggtcggggctttgatcatccctacagctttcaacgcctggtccgacggtacgtcaaatttctattaccgcattgaagaatactaacaatcgtagcggacaaatccaagactgccccgctatccagaggtaaggattgttcctcattaccaagaactactctcaccagtattaggaactagcgtgatccttttggtcgtttacggttgctacctctacttccagctcagtacacacgttgagatgtacaacgcgcccagccagaaatccgaaaagatacgccagaaggtgtccgaaggcgacgccagtcgcggcattgctcagatcggccatatgtcggctgcactggcaggagcgaacaatgagcctgtacaggaccctgacgacgagccggaagagccgcagcttcacatctatgttgcgattgcgacgctgtgcatctccactgcactcgtcggcgtgtgtgcggaattcatggtacgtctatttcgttaagattgccaagaataaggcgctaacccgagcaggttgactctattgacgcgctgacagacc

SEQ ID NO: 5611 - DNA, 5849 bp, Emericella nidulans
acaatcaaggaatcatcgggcccggtttattggttggatcagggaaagccttcagcgaaggcggtccagcgggcgtgctcatcagcttctcgctcgttgggattatcgtttatttcgtcatgtagggcacttgatgagcaagaagaaaggggagtcgctaaatgccataggcaagcactcggtgaaatggcgaccgcgatcccagtcaccggctcctttacagagtacgcgcagcgcttcgtggatgactcgctcgcgttcgggctcgggtgggcgtactggtatctctgggtgacggtcctcgcgaacgagtacaacgccgtctcgctggtcataatgtactggaccgatgcggtcccgcaatgggcctggatcctcatcttctggattctgtttttagggctggcgaattttggggtgcgcgcgtatggcgaaatggagttttggctgtcattgtacgtctctccctgtgtgcgtctcgtcaaaagggcactggctgatccgcgcagaatcaaagtcctcgcgctcattgttttcttcatcttggccatctgcatcagcactggcggcattggtggcgacgtcatcgggttcaagtactggcataatcccggagcgtttgcggactcgatcaacggcgttgccagaacgtttgtcgttgcggggacattgtatgcggggactgaaatgtacgtcgccaccttcgagactttctttggagatactgatgttagctatcagggtcggcatcacggccggagaatccagcaatccccaaaaggccgtccccatcgcaatccgccaggtcttctggcgcatactcgtcttctacatcggtaggttctccccatctctgatattcatacgagactaattaaggctacaggaacaatgttcttcatcggcatcttgatgccctacaccgaaccccaacttctcaactcctcctcctacggcgcaaactctcccctgacgatcgccctctcctccgccggaatcctccccgccgcacatctcatcaacgccctcatcgtagtgagtgtcatctcggccgggatcggctcgctgtacgtcgcgtcacgcacaatcctattcatggcgcggaatggcaaagcacccaagatcctgggccgcacaaacgcagccggcgtgccctgggttgcgatcatcttctcaaatatcttcacctgcatcgtctttctgacgctcggcgaaagcgcggggaaggtttataatgcgctgatcacgctatcgggagtagccaccttcctcgtctggacgtccatctgcatagcgcatattcgctttcgggctgccctaacagcgcagggtcaatcgccgtcaacgctccccttccgggcggcgctgtatccctacgggacttattttgctctggttctcaatatctttatgatttttttccaggggtacacggcgttcctgaacccgttcagttcggacgactttgtgataaactatatcctcttgccggtgtttgtgctgtttgttgttggttggaaagtttggcataaaacgaagattgtcagactcgaagatatggatatctggacgggcaggagggagagggcgcctgaggtggaagagagcagcaggtggaaagggaaggggtggagggagaaggtctggaggggggttgttgggtgatactccttgtcacgacttgatggttaaatcatgggaatggttatagagccaacttgtttagtggtagtgatgtccattgcgagtacctacatttaccatacatgctcggtcaaacgagtttcttatcccagatggccagaattctcagccgtccctttcatcaaagatctagcagccgtcgaccgttttcggccggagggatatatatatgcaagatagaacggaataccctaaacgggcagggcttggctccgccaacagtacagcatatcgcctctccctgggaacactatcaagctgattgtatggcgctcctgtctggatgaatctggcatcctggcctattattaagaaagcatagcatggtacatcggcattcaatgagcccagaacgtaatagtattgtagctgtcagcttcaggaatacatacacttagatcatctcagcttctcggtcgtctacttgcagcaacgagccttccatcagcggtttactttgtatcatgtgagaattagcgtgcaggaacctattctcaggttggctacgatgtatatgcgaatccgtatttgtgcgcagtgctgtgctcaatcctcagcgattacgggcttgccacttctggcaccattgctgttttctagaccgctgtgccggttcattactctcactccattggtgctgaccttatcccaacctcaagtctcatgtccagtgttctgcccaacacccagcagtcttccaatgtatgcagtcgctccagtaatgggtatctcgcgtcatgtgggagaccatctgcctctgaaccaagcaacagtaagataacctgctcgcgtatatcagcccactgccagcactgcactcactctcccactgaacatcaggaccaactggtattggatcacaagcgtcctactgataacttcccatatatccgtaagtatccaagacacgctgctccatcgccacgaatctgatcgtgaagttatgctctaacagcgtttttggcttatgccagtcggcgaccaatgccatgaccctgggctgatgataaccagggcgggaccatgaagactggtgcacttactgcgtgaaaacaagcactacttggcgtactatgagtcgctcggtggcaatagacttgactccaggacgtcctcccggctgcacccagtgtacaatccaccaattcgacgtaccattaaactttctcttcactctcttcgctcccttcactctccctacgcctggtaccaggtgatcgaacagaacccaacctgaccagagctgggaagaaggtgagacgatgtcccgagtcttgttcgagccgcgcgcaggatatgtatcgagtctatttaggtatgttgagaaggattcaggtgtgtattgggagtttcgaaaagcgcatagaacggtaatggcacgttgtaatggcacgttacgtcgtgaagttctgtcaaggcagacctaagaagtacccaatagggaaggaacagcactccatagggaaggtgcaaataggatcgcccgccgacactggactgtcaatgacggcgcataccagacggtcagctcagctgtgctgttttggtctcagctgagctgaatgtgagctatgtgagctatgtgagctggatgctgggctggatgctgggctggatgtctaccgggtggatggtaggagttcgcgaaggggagagaggcatactgtgcagtccacgaggaagcagtcagccggctatgcgctgtgtagcgtcaggaacagcccgatggcgacaccgtggccatcgcttggttttcaattgctctagagtgacggttggcagcaggcagctgaaaacaaaacggtcatgggctgaggctggggcggaacggtgcattgtgtgacgcatggggttgggaacacaataatttaaatggaatgaggctattttgaggaggctggctggcagtcgtgagtcagcggacacacagtgagcttggacatacctaaagtacagtaggactcgtagtctattacaatactacactactgcacaccacaactacgcactgcgcactgcgcactatactactcactacactacacaccacgcacttcacactgcactacactacactactacactactagtggttactagactagtagtgtggcacgatggctgccgctagtaaacgcgagagcgacgccacctgggccctggaggaaccgtgcaggttcaagactcgaggacgatgacatacctcgggcctaggaccctaggtacgtcctttgtgcgacattcactccgtggctgggagttgactgcgtggacacatcgcctttgtccttggccagtttgttcgagatctcctctatacggatatgcacataatgcgcataattttgattccggcgcggcgcaattccgtctccggctatctaggctctaagccccgagtctagattcacggtcgagcggccatcaatgccgacctaggtcctgctaggcagactggcgaggacttgcgcaggggtagaccaggatccaagacgctggacgctttctcagagaacgagggccggctggtggacgggcagaggatctgagctccagagctgggttagcatcggtcgagtccccggagcgccttagatccgtaaccaggccatgtgatggatctgtggatgcggccttgaataatgccctccaatttcgcgacgtattcccaaataggcctggctttgaagagcgggagtaagacataaccagggcatgactgcatggggccgcgtaaggcgcaagggtctcgaagtttcgagatgatgccataagtgagctttgacagctagctcgctcagcacagggaatagattcagttgcgctgtccatgtgaacgatgataatgatgatgacaatgattgtgatggtgatggtgagacgatattgagtctcgtatcatcatatgctgatcctcttacacgctgagtatgccaattgtttcacagcgttttcacagcgtcttcgcagcgctttcacagcgttccagcatttctggtgtttctagtgtttctagtgttttcagtgttttcagtgtttccaatgattccggtgtttttactgcgatagacaaccgctagccggtacgtcgttggccgtggagcactgctttgaccacgacgctgcaagtgcgtaacgagcctctatctaatctccaaccgactgggcctgacaaaacgtggggagtgcttgattgtctacagagtaagctgacgggcccgactcaggggaccggcagggctgcactgcagtgcgctcaggagtgtcttgtagtgtatccgtagtgtatccgtgtgtgctcatagtgtactggtagcgtattgtagtgtaccgtagtgtacgtagcgtaccgggtccacgagtctattgagcgaaacaatagaaagtcgccaccaaattttggcagaatgagcaagattggcaaaaatggcggaattggcctggcggccagtcttggcattttcctctttcttcttgctcatcgcaccaccgccaatccgccgttgaatccgacaatcactttcctgtcaggtacgatcggcccagccctgctaggtcgatactcggttgtgctagacggtcgaaattcgatctcgagtctcgatcttgagtctcgggtctggccgcccgtcgcgagtctggcggcacgcaaagacgtctctcttctgaccctcgacggccacggatgaatgtttccgtaagagagattgcgtttcggcgtccctgcccaaatcggccaagcctggtcgccgccgaccccgggcgccctcgttgaacaaactccaacattggaggccctggaggccgaccagagacgctttgagcatgccaactgccgtgagagaacctaaggctgccagcatgtctcacatgcagacacaccaatgttaaagatcgcattattaggttcttaacttaataagctccgaacatatgaaaataagaaggccatcatttttacagtacgtgttccaatctataactgtttatgaactcccattcactatttttaaactgaaatattgcttatctacaaatctcgacatctttgaaatctaataaaagatcaatccttcattcattactattacttctatcctaaatactacctcttaatgatctcatattatcctacccttatatct

SEQ ID NO: 5612 - DNA, 4339 bp, Emericella nidulans
gactgaccactacagaggtatcacagcagcaaactatatcctctgggctcgagctatgacgtacttctaacaaagttgcctactaagttgcacatcagccctaaccaccggtcatccataagcgacgtacgacgttctgaatgtgactggctatagtagccatatgagccttttgtcatcaggagtccctctgcgcatcctcagagcaatctttgtagaactagtataaatggttttgaggtgttttggatagcgtgggtgactatctagcttctatatgagaaggttggaatggctttcctctggtctcaaccaacgaaaaaatgtctgcggattactcctaactcgtgttaagcacattcgccagttctctgatgacgaaatattatagcacttggtaacctgctcaaagtctcatggggcttctgtgtgcctgcttcttgtgcagagaagtaggcgtcctgatgagagtctatgtagtacttgtcgcaacagcctataaaaaaataatcccctactcctaatgaaactgccgcgcaagttctgagacttaacaagtccactttaatagacctagtcctgtaaaccgagtctgaccacccttccaaactcagcagcccaccacccccgtattccaaaataatttacgatttcgtctattcgggcccaggcaacctatagtccgtacgtcgtatagcctagtggggtaaggtgtcctggtctcgaaagggacgtggaaaagttcaaggggacagggaagaaaagggctgctgcgagagcgcagtgcgcgcttccagaaacagagcgagctgcacgatcaaccaggatgagattccctgccgatcctataccgcgtagaaataactgtacattagtgcttcggggggaagcacgaggtacatctccgggtgcatcctaaagaactgccttaggaactgacgtgcagactggatggagcatccaaatccatctagcccatcctgttaagcgcctaagccgctgccactacgccctgtacctgaggctttgacgtcattgtgtcaaaatttgggcaatatcggtgttctagacaaggttgtctgccggttgactctacatcgctgtgcttatcccgtaggtgagttcacaggaccagagccttatagtagcttttcattatcgtcttgcgccctgccttgaaatctgatgcagatatcatctaccatgactcaagccggttgagaggtgggatcttgattactgcgtagactccggaaggacatggcgccgattgcccaggtactacttagtactggtgggcaaatggtacctgcattttggctcctaggagtactgcacatcaagaggcaccgtttacggactgcatctcggttgccaaaacggcccgaggcaagctcgatgacaggcttccactcaaggcaaaagaggggggttgttggagcgccgcagttgataggctgaccccagcattaatatggcacggaatttagagcggccgagttggattggcgcatcacaaggccctaaattaataatcgtctaagttataagcctaagagagcaacgactcatgggtcaaggacttctctgggggcccggacttgaagcgcaacaaaagagcgaaaacaagagcgaatgaatggttcgcttttattgcacggttattaggtgcattagcgccgcagtagcgtctgtcactagccgccatcatgatggagtatcaaatcaagtcggcatcctggctggagctctgcaggctgtctaggccagccgtttcgcaatgataagccatggttgaactgtgccagtgtagatcactccttgacgaacaaggaggtcctccgttaacttctcatcccgcggcaaagctagcgcaacacggctcagtggtcaatgtcatataatttctttatgatgaataaaaatcatgattcgaccagatagcagtggctcctgaaagacagcttccgcaatcggccattcccgtcaaaggctccaccggtcggtatggagtctagtggcgggactgttcggcgtatatactccaccagtagaggataatacacctgtgttgtgaggacagctcgctcaagctagctcgtttggatttcctcatgtgtactttgcagttgtgcttcattgcgctggtgatctagagacaacgagtctctctcttcgtctttgacgcgcgctgttagtggtgtaaattttgatagggttgacaaaggacgagagaagtgctcagagtcagtactggctaaaagggtcggggtagcatctactaaccgctcgcgaacttggagacttatctgggattggcacagtaatataatagattaacggtggaaggtaaatagactgaccctagcatgtgaaggccgcgcctttttcaacttccctcgatccttttactgggttcgtggacatgcgcacgcaattctcctaggaagatcggaaacggcacttcgagcaagtgacggcgaccaaggtcagtgcagtacagtagctagtagttagccggagaaaacgttctggggcaacaagggcggcagtggagcgccggggctaggatagcagtagcgtggtattaaggaacattgaatatttcaaatcccgcgtctttccatactcaagtgtattggaaaaaacaaaaaaagaggcaggtgcacataaactctcgcgacaacgaatataataggttttttgaaaaaccgccatgctcgacgacagaggggaatgtagcagtgccaatattcgaccagcgcgctctctcgcaacgttgcgacgctacagctgactatcgcaaaaggttcgctgggtcgttccacctgagggtcaagtggactgtggagtccagtcagcgtctggtccgtgcagtcgagatacgcgtctgtttcactcccggatgtgtttgagcaaataaactcgacattctccagcaaaatgatgctgtggtcgctatttctggtgaaaacgacgcagacgggcggtatacggcgttatcttgtggctgtcatctgcgtggtgtcagcgtttttggatcttccccttcggttcaggttccgaggcaaaacaggtgacctatgagatgcatctcgcccgatgtgatgcgacattgtacttccgctctgggcatctacgtcaacgattctggtcatgatctacttatggggagctaggtaccattatacgcagtcgactagagaagaaaaggctggacttgtacttctcgagtactttccgaaccgccctcgagccaggtgcaagacgaccgaaatgcaagccggcatcataggagcaagggcgtgcagatggcgactggggtaccgatgctcgaaaagtcttggttgcaccccgtttgagtgacctgcaggcccttgatcatctctcgcaagactagacctggattgattgtctgggcatgaacgccgtgcgacaggattcgactagaagcctcagcgagcttatgcaaaacataattcgcccaggctggcttttatccggttggaagctaaaagagttagcagtcattccttagttagaagtgagaaacaggttaccgttatggaccagtgagtccgagcgcaacggatggagagatggcgcgagaatttctggcctcgcttatcgtccgcggaaaggttattctagggaaaaagcctttatgagaacaggatccacagcagctccgttcgacgcggttagtctttgtatcgtgtgctgtggctaaaacagacgagcatcggacagcacttgcgaatcgtgagtcgtgcaagtgtcatggtcccatcaggcggcggcaaccggggatcgccatgaatcgtagatgacaggaacggcacttagcacgcaacagaaatgattccaaatacttttactacacctcctacctggaaactccggatgatcttggtacaccggctgcgagacagctgaataattgacgaggccccaaatcacgttcggcaataaatgatcgcgaatgaaaaatattgtagataataataaatgttaatgtccatgctgcgcggctgacgggtggtttgtcacgttccgtaccactcggctccccagttccccaccactacgacagcaatgcttgcgcttgccgttcgacagtccttacctagcctgtgcgtgctgcttcagtctggctggtgcattgttaattcacggggttggtacgatcgccgctaggatcaccagctatcgctccaagcattttgccgggctggctgcgatatccttcaagcagcaggctgtcctcaccttagcatctgacaagatccgtaagcattgtaacctataacctgttctacataccccccttccccacact

SEQ ID NO: 5613 - DNA, 4077 bp, Emericella nidulans
  unsure (1)..(4077): unsure at all n locations
tggcgagtacacagttcactttttgatacatgtcagagatacgaatctgcagatctgggctgacgacgagacgtacgaccgcgtgcttaggggtgccctcccggaggagttccacggaatgggtacactgtggtcggaacagcaaatgtcagttgtgtacgcgggtatggaagagacatgggctcggggtttgtccgtacatggagtataccgtagtacttttatgcccatgcaatatttcgcatccaggcaccctgagtacgactactactggaactgggagatggacgcgcgctacactggccattggtaccacctcttcgacaaggttgtcaactgggcacgccagcagcctcgcaggggattatgggagcgaaactccagattctatgtgccatccgtacacggctcttgggatgactttagacaaatggttcgcgtgcagacggagctcggcacgaacagcccaagcaacatgtggagcgcaggtgctactcacgacttcgctcatggcgagaaacctggtcgacgccagggcgacaaattcatctggggacctgtgcggccggacgaacaggatatcttcgaagtcgatggcgagggtattcccccaacgactatggagaaggacaaatatgaatggggagtcaacgaggaggctgatctcattgtcttcaatcccatcttcgatcctgatggaacaacctggcctctcaaggatgatgttaccgggtacaaccgcgagaatggcctgccaccacgacgagccgcaatcattaccacctccagactttcacgtaagttgctactcaccatgcacaaggaaacaaccttcaagcggcacaccatgttctcggaaatgtggcctgctactacggcgctgcaacatgggtttaaagcagtttatgtgccccattctgtttacattgaccgcaactggccaaccgagtatctcgagtccgtcttcaacgcgggacgtaacggagcctcgggaggcgcgcggccgtccgtctttggtgatcgtgagcataacttccgcggtaccacctggttctattccgctggcttctcgcccaacctctggagacgctggctgggctacaaggtcgacaacgacggcggtgagcaggaggagcttgcaggcgaaggacgaatgtgccttcccccgatgctgctccaccctgttaaagaggtggagatgatcattgatgatggggtggaagctgatgtcgcagaaaccgatgaaatggaaccagaggaatggatatagacatgagttttatgcctttttatgcgatgggagaccttgatggtattgacgacggacataattacctctttctggatatgatgggactattttttgtatattgtgctcttatgatggcaaacggcgttggagtccttttcccaatacagacctcatagtatagattagggaataccaaccaacaatcaatactttagtgtgacgtatccgatgatccatgcacgctattaaacctgtatcagggatggggcttgcaattgcaaagtctcgcgagaatgataagccatgcatatccgtccattcatctaccacctgtaccatgatgctattaaggagctctattacacatagtgtgacccacgcttatcaagcgtagcagtaatcagcctgagcaaagtcatgggactcggatttactccgacaccctaccactatacatcccaaagagtccagactctatggcctcctttaggcgtagaaacagagttctggacaggaactgcattgtgtcccatcggccccaaaactctcagcgaaagaggacctgactaagggtgctgcaaggggaagcctgagccactgctgctcgatatggaaattcatgcgttgtgcgcgagaattaccaaaatggaacactctcctaccctcgatacgagtcccacggtttccccgcacctctaccaacccccgcccaatccacctgttgacgcctctttcctgtgactgactccaggttacacgttgtcgcgaccgcgtttgcgtttataatgacagaaaatggcaacattattcagtccagacccagcctctggtcatggggactgtccccccgggggacttccgaagcctaccctgaaatatttataccaatgtctgagcaattctgcgagtagaatcctgccttacgttgagtcgacttacattacagcttcaagactgaagtattctgtttggcatcaacagcagagccaatgaccatgtccttagctcaaaaccactatatcatccagctcccttaaacccccctgctgcaccgcgccccagaaccccggtcaatcgcccagaaatggataaccgagttcgaagtgctgctacggactaacgacttctctaagctcccccagctctttcacgaggactcatggtggcgcgacctcctgtgtctaacttgggactttcacaccatccagaaccttagtggcatcacagcctttctcaccgagaaccagcctcgagctcggttgtttgggttccgactgcagcatgaaggcaagtttcagccgggactggaacacccggcaccgggcctcacgtggatctcaacgatcttcttctttgaaacaggtacggggcgcgggtctggtgtgttccgtcttacacaggataaggagggggtgtggaaggcatacgcaatatatacgtcgctgcaggagctgaaggggatggaggagcctcttggcttcagaagggtatatgggactactgagacgatgccgggggggttggctagggggacttggattgagaggcggacgcggcagattctctttgatgaggaggagcctactgcgctcattgttggtgccggtaagcggagtacttagtgctaatgattccaccccggctaattggtgtataggccaagctggtttaaacgtaggcgctcgactccaatccttgggtgtgtcttgtctgattgtcgaccggcatgaaaggattggcgacaattggaggaaacgttacagggtatgtcatctattaccacaccagggatatactactaactaacaagacccttgtaacccacgacccggtcgagttcacccacatggcttacctcccctttccgaagaactggccagaattcacgcccaaagacaagcttggggactggttcgaagcctatgcgagtatcatggagctaaacgtatggacgaaaaccagtgtcacgggagcaacgtatgacgaagcaaagaaggaatgggctgtcacgataactcgtggtgatggctcagaacgagtcctgcgtcctcgccacctcgtctggtgcacagggcattcgggcgaacccttggtccctactttcccggatcaggagaaattcaagggaacaatataccatgccaccaaacaccaggatgcgtctcagcatgatgtcaaagggaaaaaggtcacagtcgtgggcactggcaatagcgggcacgacatcgcgcagaatttctacgagaacggcgccgatgtcaccatgcttcaacgcaggggcacatatgttatcacacaggataaaggcatatttatgatgcacgaaggactgcacgaggtgaacgggtttgttttctgctcaacccagctctacaagcctagctaacaacccaagtccccccaccgaagaatgcgacttgattgccgagtccctcccctaccccgtccggttcgcgcttgacgtgcacttcacgaaacgagcctttgaggccgagaaggacttaatgatgggtctgcaaaaggccgggttcgagctcgaccacggcatcgatggcgctggaatatcgcgcgcatatatgacccgcggcggcgggtactacatcgatgtcggctgcagccagctcattgcagacggcaaggtcaaagtccgacgcagcccggacgggatagcgggattcacggagcggggccttgtgctgaaagatggtggagtgcttgaaagcgacatcgttgttcttgctaccgggtatgacaatatgcggaccacagtgaggaagacgcttggcgataagatngcngatccgctgaaggatgtttgggacttg

SEQ ID NO: 5614 - DNA, 3490 bp, Emericella nidulans
acttacaggttattggaagagagttgctctacagccgatgttatctcaattgttaatatggtcctttcgtgttcagattacatgatccgttcattggcctcaacgaattgagtgcaagatgggtcaacgagaagtcatggacctaccgaaacgtcttccataagccaaccgttcctgctggatcttcaatctttttagtctttgacggactggatactttcgccaaggtcaaactcgatggccaggtcattctagagagcgataacatgtttcttgctcaccgggtggatatcacaaaagccctagatgtggaaggcgagcatacactcgagattgatttcgattgtgccttacttcgtgctcgagaacttcgaaagcagcacccagatcataaatgggttggtttcaatggagacactgcgagattgagcgtcagaaaagctcagtatcattggggttgggactgggggccagtcctgatgacagcaggcatttggaaagaagtgcgacttgaagtttattccgcgaaaatttcagatctctggacagaggtgcacctagccgaggaccactccaaggctcgcattaccgctgccgcagaggttgagacccaagggaccggcaactcgtacaaagctacttttacgttgagccttcaagggcagcagatcggcaaagaggtagctactctggacggcaatgtcgctaagacgacgttcgatgttcaagaaccgtcgctttggtggccgaatggatacggagaccaaactttatatgagatctcggtgtctctggaaaaggaagaagaacaagcccatcaggtctcgaaaaagtttggcattcggactgcggaggtcatccagcggccggacaagcatggaaaatccttcttcttccgcattaacggtgttgatattttctgcggcggtgcatgttggattcccgctgatagtcttctgaccaatatcacacccgatcgttatcgcaaatggatcgagttaatggctgtcggccatcaggtgatgattcggtacgtgaattctgttatttgaagtatgttggcttcgtttgacacttatagtgtttggggtggcggcatctacgaggatgagagcttctaccaggcctgtgatgaggtcggtgtaatggtatggcaagattttatgttcggctgcggtaactatccgacgtggcctgagattcttgagtcgatcgaaaaagaggccgaatataacctgcggagattgcgccaccacccttccatcgttatctgggttggaaacaacgaggactatcaggtacaggagcagcaagggctcacttacaattatgcagacaaggatccggagagttggctcaagacggatttcccggcccgctatatctacgagcatcttctaccaaaggccgtccaaaaaataattccatcggcatattaccatcctggcagcccgtggggcgatggcaaaatcacttctgacccgaccgtaggggatatgcatcagtggaatggtaggtaccgacctgtaccaattcgatgctgccaactaacagaatctaccagtatggcacggtacacaggagaaataccaaatcttcgatactcttggcggccgctttaacagcgagttcggaatggaagcgttccctcacatgtccaccatcgaccacttcgtcacaaatgaagccgacaaatacccccagtcacacgtcctggatttccacaataaggcagacggtcacgagcggaggattgccacgtacctcgttgagaatctacgaacggcaacagacttagaagtcagtatttatgcccgctattggcgactcagaatgctaaccgaagaagacctatatttaccttacacaagtcgtccaagcagaaacgatgatgtttggttaccgcggatggcgccgccagtggggagatgagagacattgtggaggtgcactgctctggcaattgaacgactgctggccaaccatctcctgggccattgtagactactttctgcgccccaaacctgcgttctatgccgtcagccgtgttttgaagccgcttgccattggtgtgcgccgggagcaccacgattggagtgtctcccacgcacaaccgcctaagactagcaagtacgagctatgggtcgtcagcagtctgctgaaggaggtgatcggaaaggtcgaacttaggtttatatccatcaagactggtcttgctattcacgagtctatcgtccgcgagaatgtcaccattgtacccaatggcactactaacatcttggacggagtcatcgatcacgcagtcgacgagccgcatgtccttgctgccagactctgggtggatggcgagcttgtggctagagatgttgattggccgcagccgttcaagtaccttgatctctctgaccgaggactagagattacgaggatttccaagaccgaaagcgagcaggtacttgaattgagcgccaggaagccagtcaaatgcttggtctttgaggaacgagacaatgtccgagtcagcgacagtgctattgacatcgtgccgggcgatgagcagtttgttactattaagggcttaaagcgtagtgatgcgccgctgaagtacaaattccttggacagtagcttagggcatactttctgctattgttcttactcatcaaaatatacaagtgcgtcagtatttttatttcctcttgcaagctggatcaaaatttccatatataaagcctcacgacattgctcctccacctgcgccttatcttatcagatagtcctaatcgggttaggcccgccgaatgacatcttcaagaacaactcaaactcccttctcaacaccacacatggagaataaaaccgacaattcctcggccgggaccaagcgctcctgggaaggcttacccctccacaacgacggcaagtcacagcggtttccatcaacgacaatggtagaatcagcctctttcgacgtcctctcaatgttcgagggcttccgcgacgagctagatcaacaccacgaccgtcgtgagcggctgatcaagataagtcgtgatattacagcacttagcaaaaaaatgtacgccgcgatttatatcctcttttcatttactaacaagctaatacgggtcatctcagtatcttctctctccaacggtccgtctcactccacactgatcgaacaggcaaacactgcagagtcctaaccacagccattccagagtccgaacggccggcgcccccattccgccatcaattctcaaagacgtccaatcccgcttcacccagataaatgacctcttcctctcggctgtcccagaaacacagggtctcaataactaccgctacctgcgcaacctcagcggcggaatccaagaattcatcgaagccctctccttcaaacactatctcgagactcagaccctcataacccgcgagcaagttacatcacatttgcctccggatatcctagtcacggaagatgactatgtg

SEQ ID NO: 5615 - DNA, 4163 bp, Emericella nidulans
cgctgaggttcaagatgccagcagaagctgacgggccggtatcgataccgttttgttcgcgtaatcatgcaacaacgcttcgtgttcattcaatccagcagataagtgcttctacagtatactgattgagctgtagaaaatgcatctgatcctgaatatggtgctatatggtctatcttagaatcgtcgttgatgctatctacgagacagaagatccgttggtatgtaacgtctcttacaatgatactctgtacccggccaagcggaactccccgtcgagtggataagaataaacccaatcgggaaagctgcccagcttcaatttcagttgttgaggcactttccagtgagaacattccagtctgcctctggttgcagactgagagattatacactgcaccaataaaaggtccttcagcactgtgcggtccgcagccgtgggtatccgcgggtaacgcaaaacattattaccgtagaatggctatcatcggcgtctatcctcgggatcggaccctgggccttcgagactcgttcattcgcggggtatagcactggtagtaaagcttcttaggcatcttcacaaaagcagccaaggtaattctgtgaagtcgctgatgaagtcgctgtcctggtcaaaatatatatgttaacacgacccattggccaacctctgccatatacggcgggtcgctttgataatacccaaaactcgcgaaaggagatgctttgagactcgcctgccacagaaaacaaagctcacatcccctctgtaggatttccttgattgaaatacaggtatgcaggtagccaatccagcgtcttagatatctttcggcgaagctccagcatcctaacctgcgaacgctagttcctgggctaattcaatactcgtgaagctgtcaaatttgtgttgacgtagtcaatcccattgttccccgtatgggcgatttcgaaagagatgcgagtcctgcaaaatgcaagagctgaaacccaccgtcttttgtctgggcctgctcttgttctgatgaaaacggtcatccgtggaaaaaactcggctctgccaggagcaatgttaccgacccgaatctccatctgtttgcagtcatggttggtcgtcctattctctcaatagccggttagtatatgttcgatgaggtcctccggcgcgctcgcacattgctcatgaagggctcagtttctggcagagaatgcaagttgcttcttaagcaatgacggaaggcaagagtaacactggcgcagagcataagtgtcgacgcagggtcttgcggctaacaaggatcgaacgtcttaacaatcggttagaatatacagcaggctcttgcgactaatgcctctaccaacgaagaactctgcgtcccgtatgagcaccgcagaggacttggcccttgcgtcgtgcgtgccgtgatatccgcctaaccaagagacgctgatgccacactctgaaaggctggtcgtcacacgcctctctcctattaggtcgatatgtttaggcatgacggcaagaagcaaatatgactgctctcagctacgtggaaaacctgcggacgatcgttcggctaataacaaaaatacttgccttaaacgaaaacatcaagctgttagtgacgacagcttggcgactcccggaaggacctgccgggcgacggacagaataaacagtctcaaatggttggttttagcgatgagggcgctaggcttgttagagaagcgagatagacgaagaagggacagagcctgccgggtaggtttattgaagatgaagacttcaccaagccatgtggaggccggggttgacataatcttgttacttctgaaagatatcagggatgccgaatatcttcgatctagattctggccaagtacggacaaccgaaaaggctgacttgcggacaccgccttctttgaactggcgtaaaattgtggatgcaattatgtcgatgacatactattcagagaatgttctttcccgactaggaagggaagtcggagttattccgttggagaccacaaccccaggctctccccacagtccacaaaaaccccattcgcaaagccatggagaggtgggcacagaccgtctgaaccactcggtcgaggttcaccaatcaatttcattctctcaatgttcctggtccctaccgcgggaatttagccgggcagcccgtctaaatgaccccaaacaaccgtcggattgccgatgatgggcttatcatcggcgtcgcgcggcgatatatcccgtccgttatccccagtcttcaggttgtcgcggccgactgtggggttttttacactccgttcatcgtcactcttgccagaaacgtaacctcattcgtctggatcaggtctccattgctccctcccggctttgattcggctcgtcagtgaggtcgatgtgcagtcctcaggccagcataagtagtcctgtaaccccacacgtaccctcactttttttccccccttgcgagcgagctttattgtagtggcagattgagcttctaatatcttcattgttgatacccaacgcccatcatgagtgatcaaatatcctcgtggaatgtcgtccacaagttcgaaaagcgcggccttctcatcgccattaactgcgtggctgccctgtcaatccttttctttggatatgaccagggtatgatgtctggagtgaacaactccaaggactatatcgatctcatggggtttggctatacggagatgaaggatggccacccttcccccgtggtgaccaacagtctgctccaaggcggcatcgtcagtgtctattatttaggtacgctcttcggtgcgctggttggcggttggactggagacaaggttggtagaatcaagacgattgccttcggctcagtctgggccatgtttggggccgctctacagtgctcagcccagaaccacgactggatgatctgcggttagccgtcttgcccgatccctgtgtttttgtgacttttctagctgacttaggtagcgcgatttataaacggaattggaaccggaatactcaacgcgattgttcccgtatgggcgaccgagactgcagaacacacgagtcgtggccagttcattgcaatcgagttcacactgaacatcttcggtgtcgtgctcgcatattggcttgaattgtaagcaatagaagaagccaacttggaccatgcactaacgatcatacagcggcctgtctttcatcgataacggcgcatcgcccttccgctggcgcttcccgatcgcgttccaaatcatcttcttgctcgttctattcgccgccgtttggttcttcccggaatccccacgttggttggtgagggttggtcgggagcaggaggctcggtatattctgggtaggctgcgtggcagcagcggtgaagatgccatccgggccgagggccgagttccaggatattctcagcgtcgcggaggcagagaggtccatgggccacagcacgtcttacctggctatgcttttcggatacaagaccgggaagttgcatcttggccgccgggttcaacttgtggtatggctacagatcatgcaggagtgggttggtattgccggtgttactgtttgtacgtcgcccttgagataatgtcgggcccaggctaatggttctgcagatgccccgactattttcagcattgcaggattcgattccatgaagagtcaatggatcagcggtttaaacaacgtcttttacatggtatgtcgtccttctctgggcttggtacaggcacatgctaacagaacagtttgctactatgatctgtgtctttactctcgaccgaatcggccgtcggtggactttgtactggggagctgcagcccaaggaatcgccatgttccttgctgggggtttctcacgtgtttcgatcgacgcacgagatgcgggcaacatggcgcgagctgaatcattcggtgctgctgcagcgtccatggtttttgtattcaccgcggtcttcggagccacctggctcacagtgccttggatctatcctgcggagatttatccattagccgtccgtgcaaagggtaatgcctggggtgttgtcggctggagtattggaaacggatggttggtgagtggtcgtgacccaaattacaaatttctaagcacgcactaaactatacttta

SEQ ID NO: 5616 - DNA, 3540 bp, Emericella nidulans
cacctgcagccaaaggagccagttctcgtcgagctcaggggagatcgttattcctgagtcgcgctgggattcagctgtcgtttcagcgtcaggatcaagagaatgtgaaagggaggtcggatcgaatgaaggcgggggatagtcattcgatcctgctagggtggaactaaatatcgaaccaagcgagatgagcacgatgtcgtcggacttcaagttgattgtcatttcgtcggtgggaacaactgaggctcgaggctgtccgttgaccacggtgaaggtctggatggctgtgactctggtcggttcgttgggttcagcagggttgtcgtgcgcgaagatgatatcgcagacccccgtattgaggcggaagtccacaccgcggttcagtaggaactgcgtgattgggacaataatcgactcgtggacattgtatttgcccagatcgagtagatgcggatcggacaagtcgtgcaaattgttgaagcggtgcagatgtcgtcggaactcagctgcagagtgttggggtttcaagccgaacctgcgatcagcgacatccagctgttagtcagtttccccttatacaggaatggaatggcatacgtcgtcgctagtgcgagccagtaactagacttgaagaacccttttgaaaagaaatcgcatatgcgggacctccccagcatcttctctgacttactcgacagcatgaatatactaatacggtcgcggacactcaaggccattttcttcccttgcacacggtgcaccttattgccgcttcgcgttagaaacctcgtctgttcatgcgtatgttttaagtctagcgttttagcgaagtcaaggatctcgtcgtgcacgctgcggttggggtctgtaaacgaggggactaatgacaatagattgagcatgcagacgtcgttaaactgcggacgcatccccgcgcgaaagtcgtagccttctttcgcattgccatgactgactgttgtaccgctggcgacgtcgagggtttcgatgatgtggatgcgcgacggagggacgcgggcttcttgtaagagaagtacagctgctgtgagggaggcgatgccactgcctaggatccaggcatccagattctcggggttcctcttggccattctattgttgaaagtaccgatatagaaacaactgcattggttaggttggttgcgggagaagaaggatgatggtcttgtatgacttcaaagcgcggtgaattgaaccatgggttcgttcctgtcatgacgacactatcgcacactctatctatattcataactcaaaaccgtccaataaaagagaaagaagaagaaaaggcatttgtgacatggcgctatgcgacaggcgagtccgggtcaacgacttcatacttcgcatcctcgacgcttggaagatcagggacaaagggcgcctgccctcgtcgctttttcttcaacagttcccgtatctcagccacggatctacgccctttgccctcaaagtatttggggcctagatcttcgaggtcaaagccgtggggatagtatttgtcgtcatcatcgcctgggagcggcatgcccatcgcccagcgaacccatgctccagggccccagcggttccagattgtcggcttcacatagtatgggatagcttcatagatattaacatagtagcgcccgtactcgttcggctcgtcggtgaaaatgtcaattcgctggaaattgagtctgggtagagctatatagcgtaggtagaacttgcggatggcgaccaacgaggagaataccttcttgtacgcagcagaaggcgattggtacctgtatcattaacacatgcattgatccgaaagggaaatctgggcatacatcatcgcctctcgcaacctatcatccatcatgcatgtcgcaaactttactcccattggtttcaagaatcgcggcaacgcataaacaagcacgtccatcgttttatctgcaacttcttgatttgatgaactcggcttcatgtattcctcctcatacttgagactccatgcgcgcagttcctccagaaaatggaaaccgtcccggaacgcgtgcggtcctgacggtagatctgcgacgtgatccccagcgcatcgccgagactcttccagtaagtgccgatggcgcactgttcaagttcgctgagcgaccgccactcaaacatatcaataaagcggatcggctcaagcgcaaacaggctgagtgtgtagagcatgtcagattcgaggatcttcccgctattccggtacccgacatgtaggaacttggtgcgagcaatggccgtttgcgcccgttcggacgacggctcaaaggccataaactggccgatcagggcacccgtgtcagcgtagcgcttaaaggaggtagccgggttggagaactgggatgttttgagcaggaggctggatattgttgggatgccgtaggtctgggtaggttagtatgctcacaatactgtagaggagtgctgtacgtaccctgaacaaagcaaattgcagcgctttcagcgaggccgacggaaactccatcaccagcatctctttctggatcttccaggcatcgtggtccgtcattgaggccatctcctcgcgtgttgtatactttcggtataccttttgcaggcgctttagccgtcggtatcgcaatgaccgttgaaggagtagatacgcggcgagagtgacagccgacaattccaggcgccttctcgggtccctccagaaatctaggagtagagcgcgaattggcagctgcctgagtccagccaggacttgagaaatgcgtttgtccatggttgtttgttagctcaagttgatgaagctgcccatcatgtcttggaccatgtggtctttataacatccagcgacgccatcaggccacgctccagattgtatcacgtatcgccataacgagccattgaggatgaaggagagtatcctagtatacgtggtgatgttttcatgtgcttggggatcggcgcgcggaccgaggaatcagggccacgatcgcggggcagtggccgcgttaaagggtttgcgatagtttatacttagtcgcatcgaatgagtcgctttgtttgaatagcataaccgaggaaagaggagcatctcgatgatggattgacgccgggctggttgaacccgggatcgtacgttgagttggacatgggggataagtcgatcgaactgacacagcatgtctgacaaactatgacgctgaagagtccatataaccttttccctgattcggcatgctactgcagctgacacctagtatatcctgtatcagaagtcggcagtgggtgacccagtctggattgttgcagtaggcccgcttatggcacacagacatgagtaaacaagaattcgctaatcttcataggcgctcgaaaaccgatttaatgtgcaagaagtccgtattcaaacgaatagccccccccacgacccaagggtcatgttgccatgtgaaaatgatataaacaaaagtaacgcgatcggtgaaagagccatggtgcagtcgcccggcactg

SEQ ID NO: 5617 - DNA, 7632 bp, Emericella nidulans
gattcggcaattcggcctttgggttgaaccgcgagacgaggatggcagtaactaacacaagaaacaggcaactccggcgttgtccgcgcacagttccgtcacaaccttcccgcaaagtccttcggtgctactgtccgtgtcatgctctacccctccaacatctaaacgccccgttgtttttcatatatccgcggcacaactccggaatctttgcgcagacggtcaggcaaggagtcggcgggatgagcccaggttgcgatggagttagtgggttgataatgatcatgggagaggcagggccggacagcccagccctacgagtctcaaaataaaaagataaaatgggatctcttgtctactgtaacacatggttactgtttcatcttaatagacatccagccggcatgcttgttttttgaccaggtggccgtgggttgtcttgacggcagggctctagtgtattatttgacgctcatgaacacacaatccagacaattcatctcggctaaaccatttattccgccatctgagtccatgttcttccgccgcagtccttactcatttcctccaagtgtgccctcgttgcctaatcgagatatgcccttacgcgacttatccggccagcagtttgatcttatcccatacttctgccattaaactcgtgaacagatgccgccccatattgcactgagacaccccgcgggtatcccatttgggctcataatagcatttacattttagagaaccatgaagcagtcccgcctgggctgagtagtaaggcttcagcaagcttctagatggaggcagtcagggattaggtcgatttatcccgtgtcgacgaattcggtataagaatgatgagccgtagagcctgacagagatgaaacaaggcacatagaacaagcactggccatactatgtatctggctattgcgtgatttcgattggaaccacggcattattgtattctcgttgtaaccggttgtccatatcagccatagcagttgcgaacaaaatggatatactgcaactgtcgacgttcatatgtaaacctgtgaacaaacccgaccttgtaaaggaagtagaccgcaattaaagcacattagtgcgcccgacttcccttctgcctctgttgtacatgttgtctatccgacataggcggagacatctaggattccctgtgcgagtttgtcacatgaatcctcaatatgggcaggacataggattactgagacctaccaggcaccagcacgtactagcatactaatgagagaagtaaaggcatttcgttaggcactcagtcgagcggcttgggcatgatacgtatctacctagtaagtacaagaaccactatactctcgcaaggccaactatccaaccccgaaatatatatgcattttacacagtcaagagcaggcgcaacaggctaactgcaggtcactattggtcatgtattgaccggggctcaacttggccagatgcgcaatgcaacttggacatttgggaggtaaaccaatttcgaagagcattaccgagaggagaagcttgcagtactagttagaagtatgaagatcccgtgtcttgcagtacagtgcgtctttcggttgtggggcctctttgatgtcatgttattgagtcgtaaaatccgatgtctgcatcttcgctgctggtgctaaagagagcggccctgttcctgaagaatatatatccgttcgaggatccatcggtaaataggccctgactctggggctgggcatattcgatcccaatcgggtccttacaagtcaccggcatatcggaatcatcatgaccggtcgaagagcaaccagatatcagaggtccaatcgtatgatgtatctagcgcacattcatgaagaatgttgcaaaaccgcaaatagacacgcactagcacgtagagaagggacccacagagatgcccttgactatgacgtaaaaccgataagatcagctcgcgaccctatgagcttggactagtccatcaacccaaaacaaagaagacttgcagctgtccctccttgcatatcagtttatgaggagctcgagttaaggagaattaaggtaggcgccatcccccaccataccagtaccgacccaccgggtactggaatgaagatcgcccgacgtcaacgggcaaggccaacgggcgagtggaggaacccaggagagtggggtgtgtttgggaaccatgaggcagcaagaacacatcgagccactaagccagaaatctggtagttaccataaaggtacaaggtgcctgaatcgataatatcccatgttttcagggcagacagagcgacagggccagctcctccgttcatgcactggtgatcaactgccgacgctaagcttcgttgaatcacgagtacgttctccataagccgaggctggaggctagcggacagcgaacggaggttgaaccgaagcaatctgggaacgatattgtacaggttggaatctggaccgcacctggcatcatagtggcaaataaggccaatagggaagccccgggattgcccgtgagagaaaaagcacggcgcgtgctgaaggtgtgctttgtttttttttgcccaaaagtcctgtatttccttcgctcgcggttgcacagttgtcacaccagcgatcgctagctcagatgctcaagagcttagacgccatagaagccatcagttcagcctgtggttgtgtttggtcgtccttcgttcctgacacgcgaagggagtcccatggaccaaaccgtgtagtgtggagagcagtcgtaacctcgaaccatagttgccgaggactgccaaaaaagaattcggtagcagagactctgaaacccaatcaatggccggttgaacatcaaaagaccattccagaaggccggttgatggtgataggaggggttctggctgacctctggtgctgcttgcgtggcgctggtcgtcaaatcgcccggtctgcttgttcaaaaggcatcaaccttcctcctccgtctttgtcttttgtctccgtcctcccccgtcagctactcagtcttcgtccggcgcttcctctgctctcatcgactttgtttctatcttgaacgggttcttgacagaccaggtaactaaccattctcgtcctagcaattagtctccatcttcctgtttcacgtcgatccccagccccaaccatctttttctcgttggctgacaagtcgtcgtagcgttaatttcctgcctccacctttctaccgtgcccacgttcgcgctggctcgactatttttatcgtttcaaacgtcattgactcaattttcgaatctctgtatggtgtagatattcgtctgcactctgtggatggtcctggtaatcatactcgatagtttgttggcgccttcgatcgcgcacggatccctcttgttgtctcacaacgtgctagaagtgtatatccaactcgagcagggaacttgatttcagttggtctagtcggtcagttcaacccacttaacttggcggtttccacacagtccctatcactgcactccactacgggcgatcgtgacgggtccgacagctccaagtcccagcctgctttatcggccgctaaggattagttttcgtcataaaaatggtctccccccagcccacgtccccgacgccctccaagcgcagtcgtggtttcagctccagcggcaggtccgacagatcagagaaaacccatcgttccagcggctcgggccataaaatatccctcactgagacttctgaagaaaaacacagacggagtttacaaactaaagctgacccaatgcttgctataaacgaggcgcaaccgagtatgtagtacgacgccgacgccgtctttcgagttgctgaccagccctacagatttggttgctcttgaaaagtcaaacctgggtagcctcagggctatgcagcacaaagaccagtatggcaacattataagtatgttttccaagcactttttattcttatccaaaactgactttcgcagccgaccccgacctctctaatcctacgcgaccccgattcgaacgccctttagacacaattcggtcattcgaggcggccatttacgggcaatatactagtcgccctgcatcttacgcgcaaacaggtaagcctctatttccgggcttactatcggttactgattgtgcaggtgaagatggcggcgactacagtagacgtagtagctactacaacccatactcgaacgggcaaactcggcaacacaacgatcgcggatactataacggccgcccaagccattcgcgaccgaacagttatatggacaacggaaacggttattataatagcggcggacccccggaaagctactatccatataaccaaaacggtgggcggcgaccgcgtcaatatccccgaggtcattccgagcaaccctcatactccagccaacaaagcggatataatcagaattcatacgcgcaaagcgggtacttcaagtcgtcggacaacgttaccgttgcgacgccttccggctctggcagcactcccgatcagtgggccaattcgaccgatccaagctcgataaacagttcatttgaccagtttcagcagcagcagcagcagcagcagcaggagcgaacaatcgcggacaactatggcttccagggatttggcgccgggccgaatatcaacgacgaaacatttgctcccaacgtggctggaaaggctccatacggacaggattttgcggcacaacctgcccatgatccaaattttggtggccctgtcggtggcccgcaaaaccctcagcttgtcgctggtcgacgccatctccagcgcaagtcgcaacagcagagcgtctcctccgacgcaggcgataacggtacaaaacgtaagagctggttcaagcggacgtttaccaaaagctagcctgttttcactctaatgctctctcttcccactcgcactactccttccagcgttctcgacttgaatttcttgggcgttaatgcacggcgtttatttgttctctaactgaaaactgcggggttacatcactttgtttcagatctggctcgcaggattatctactaggtggtgtattgacgactatgagattacgatatatgtgaataatattggttatgtacttacgaagcatgacagcccccccgtgtaaggtggattaaatcgaataactactctctactggttcgcgctgaaccctactcctgcattgctgacgttataatggaacgtttattatctgcgctctttttatactcgcaacgcgcactaggattgcatttcatcatagcttaagcactatctaggacattactcagtcaggggtaatcgaagccaaatccaagcaatacaaacgaaaaactgcaattcctacccagccaagggaagcaaagcagcagcaaaacagataaaatcaaaagccctccctccgggttgttcctcataatccagacctaggacgggaagatcctaggcagacgagcgaatcactcacttcttccccaaaatcttatgctttaatttatctgccaggccctcatgcgcaaggctggcttttttctcctcttttttctcctccttagccttctggtgctgaggatctagatgcacattaccctggccgccgcgctatatcaccgaaataggcaccgttagtgactgccataactgacaaatataaccctagatacataccccagtatgataatccccatccatggactgtcggactgagatttcagggatgaattcgacatcgtgaggctgtttcgcgggttttacgtgaggggaaccgatgtttccggcgccgccacgctgcgggtctcattagtatcgcgagcaaatgaaaatgcctttatatggatggtgatgtgaatgggaaagagcttacaccagcggaataagcgccatcgccttggtcgccaacgggcccttcgcggacgattccgccgtcaacgtaccttgatttgttagtgcttggtcctatggctgtggaagggataaggacgtactcgttgctatcaggaccgatgtttccctggccttacgatgaatgtcagttgagcatgctggttctgcgtggagtacagggacaaaggcggggtagggctgaagcaggcgatgaatacaaacctccacggccatgtgatacgataggagcatttgtctcgtgttgagtcatatttggttagacgccggttaagtgttgtctataggagggtggatagattggtacggtaggtatgtgacgtggttctggttcgagatcaggagaatgctgggtttgaggtgggggatcgggataaataaataagctgcgatacgacaggaggcaatcaagactggttggaggcctccggcctctaccagtgcgaactagtgggacgactgatgacgttgatttgggaagaccaagatatatatcagaggcatacgaagccgagctgataagataaagtaactagtagtgactaactttttgcctgatagtgagcaatggttatccctcaaatcactaaccattgacttattcttaagactgccagagcttcaaatgtcacaatagcttcgaatacaatgagttgacacagatgaaataaataacgatcttcctactacatagtttgtttcactgcaatcctacctagacaatctgatattaccctggccctaagaaccagtttaccatcatctacttctgctccttcgctggaccacctcctgtggttggcaggcccatgaatatcttgaacgaatcgtaactgtcaacctaagtcagtacatgccgcctgaaagctccgattccgcttcggataggttggaagtcgagcaaggaaatacatacatcatccattgcagaccggtctacagtacggagtagagttagcatcggcctaggaataactgtatatgaactcaccaatgttccgatcatgatgatcctgacggggaggccgttccatagacccataaagccgatttccttgtaaatcctgcctgtggcggcaccaaaggcctcaccaggcaggcgatttgcgttcaacttactcaccataacatccgcaggatgagagacgatcgcacacagaataccggcaagatatcctccagtgaatgcgacagcagtctgcgcgcctttgttgtagtctgacttttggcccgggaggtagtggtaaatggcctcgacaatattttcaaaagaagcgaatttcatcatggtataggggatctgtcggccccagagcggatacaaacccttgtatagtctggccctattagtatcaggttaaggcagcataagcgcctgcttacccagctgtcccttcttttgcgacaacagcagagatcccgccaaacgtggagcggaactcgggcggaatggtcgtctgcgtgcgcactttgactgcctcaaagggacagagtgcaacgtcggcaatcagctctgctgaagcactcgctgccaagtacaaaggcgtcttatagcgggcggcattttcaaccccgacaaggtcactatagaacttcttgaaatactcgtagcctccgtacttgaacgctccttgggccttttcccagttagcatcaactgcttgttgagcgctgtgtggtaccagcttacgctgtagccaa

SEQ ID NO: 5618 - DNA, 6988 bp, Emericella nidulans
tcaggcacgttctgataaaagatgacaggtcaatccacctttcgcacatgcaaattccccaccatgtgctgccgtcttcttcgtctggatacacatcattgtccatgctgggaagcgaggttggccgtttcaggcctgccgcatacgccatgcgagcacacccgccgattgagacaaacccccgatccaactcgccgcgccaatactcatataccgctatcaatatccctgcttggatcagattcagagacggcctaccgatagtttgagcgagactgaatagggatttggccgcaaggtagagcgtcgaatggtcgacgtgcctaccgtctgaccggtcgggatccggagcgtatgtgagcatgcagatgctcagcatcaagacggagaaatctgcccggggatcggcgccgaatgaaaggaggtgggcgtggaaccgttgccgcgagatgattgggaggtaccagtggatgctctggaaataccggacgcttacttcgtcgagatattgccctgtgaagctgataatgcgctggacctcccggcacacggtcgcctcgacggtcgaggacgtttcagacaccgaaggcgtcgggatcaggtctagaccgaccggacgttcatcgtggtactggcattgcagacctttcctgtccgagtaagcaatccaactcgtctgccaaggtcgcagcaggagacgtacgcagcacagtagccacaagagggcaaggccttatcacatctcttcttgcgcgctcggcatgtcgaacaaactttgggggcgaaaggagggctgctgggtcggctcatggcagccgttcagcggtggagttacaggaaccccagtatggcgcagccagtgctttggtacgtaagctttgtcagggtttcgtgtacggtgtggcacaggtggcattgtgcattcatcggccaaagtctgcctgggaagcgtcggatcggccgtcaggcgggtgggccaccaggggctgtttcctaaccaggacaggcatagtggcggccgacacccgacatccgtcggatccgtcatggaccaacatatggagtatgtgctgtgacttgtccaggatgagagtatggcgaaatagctccgggccttggtgctgagagctcgttgtgaggtgactttgctttgtacattacagtcctccgtcacggactgctatagattccgttcaacggattgcgctcctggtgccagggtgctacaggaacgcagcctgatgaaggattggcgctgtgacagattcgttctgcccagctcatagaacgagcttggcgtagctcggcaatataccacggggatcagagcgcaatgcaggctcatgctctcagaactggtcaataaggtctgcgtaaacctcagctgtgaccgagtcgataactatggtccacagattgtctttggacgtggtaatgcattgatgcagatctgctgaagtgcgcatatctgctttttgagcacaatagcgcagcgagctaaggtgaaaccttgctggcacaatgttgagctaacgctggtcatggcgaggccgctgctcagtaatataagcatttgccagggcctggggtatatatatttctaaatctctctgggataatagccactgggtcattgactcgcgtaagatgttagcgtcaatatgactgatccaatggctttgtttgaggatcgtaatggatatggaaagaagatatgattgaactatatttttttttcttctcatttcatctttttttgtggaaagggacggacaattgtcattattggatggctagttatctacacctagcttactaaatggtgactaaccgagctgcaacctggcggcatttggatagcagtatgccccaatattttttatttctcctttttttttttttttcatgttttctttttgcaggtcaattcctacactgtaaagttgccaggagttgcaggagtatgtaaccgtgcaaggagcagtggcggccaggtcccgacaggtccgagaccagtctgacgcgagtccaggatgaacaatccagtactgcgcgcctcctcgtcctaaacaaaatatccgcctggctagactttagaaatttcgaagggctcggtggggtcagtcaataaacgccgttcctaagccccgcgcgctccatggtcttaggcaggttatgcaccaatccactatatatgactcatcagctctgtaatgcgcatgctgcggctgtatcttgaatggacaattcatggcaattgattatcacagtttagtagaccatatagagcaagtgccaaatgaattctggataagagcatttgtcttgccgacattgatcaggaggcggcgtctccgactattttagacattgcattgcgttaagatcttaaagttaaatgtgataacgtggttggtaagcgagctgcgcatgtaagcgagctgcgcacccaaccacttttttacatgctgacgcggtcatctatcttccaacagccaccatgccccgagttcgcgttagttcaagccaaaattgccatgagaaggaaggtcggctcctactggctgtacaggctattaaaaaaaaggagattacattaatatgtgaggcagcacatcacttcaatgtgcctgaatctatactatgtacgcgactacgcgggactacaaatcgcgccgaatctcgcgcaaatggccataaattaactgagattgaagaggaagtgcttaagcagtagattctctctttagatctacacagagcagctcctacaaaagctcatgtacaagaaatagctaatattctgcttgcaaagtatggttccaccccaatccagactgtcggccagaaatgggtatataattatactcaacgccacccggagcttgagtcttgcttgtcaaggcaatataactgccagcaagcaaagcaagagaacctaaaggttattcaagcatggtttaatactgtataagccacaattaaataatacaggatcctaccggataatatctacaactttgataagactggctttgcaataggcctttgtgcacatcagaaagtaattactaagtcagaatcatgtggctgaagaccagttctacagccaggaaactataaataggttactgcaattaagtcaatcagtgcttctggataggtacttctaccaatacttatctttaagggcaagtagtataaccaagcatggtttacaggccttccgcctgactggcaatttgaaattaatataaatagatggacaactaataaaattagcctttgctggctttagaagtaatttatcccatcaacagagcattgtacgcgcggaagatattgacttctagttcttgatggccatggaagccatcttatactagagtttgatcaaatctgtacagattataatattatactactctgcatgccagcacattcctcctatcttctataactacttgatattggatgttttgcagttttgaagcgctcgtacgccagcttggttgatcagaaaatgtggcttggtatcagctatattaacaaacttgatttccttgcagcctatccacaagctcgaatcagcatatttaagctggatacaatcagaaacagtttttaagcagcaggactagtaccattgaatcctgaaccagtactttcaaagcttagtatttaggcttgtaggcctataccccctagaagctgtggcagccaggcaagcactttttgcctatatataccagcaaatattgatgagcttctaaagaaagcttctttactcagagattttctcaaacagtactcaaaaagtccactatcaccgtcccataatgccctaaaccagctaattaaaggctgtcaaattgcaatgcaaaaggtcatactattggagcaagagaatagggtgctacgtgctgaaaatactatacaaaggcaaaagcaagcttgtacacatagatagatagctcatgataatggtctgtctgtacaagaggctacagagctcgaggaagcttataatgtgtcttttcaggcaatacctggtccatgcgggccaccagcagaaggtgcacaaacaccaaaggcatgggcattacctatatatagtacctgccatagaattgggcatagaagaaatgcttgtccaaataaataataattaatataaaggcgttgtggttgattaaaaggtcaaaatatgggaaatctgtatgcaggtgcgcagctcgcttacatgcgcagctcgcttaccaaccacgttagcctttggattacaagatacgtcatagcggatacccaaaaaagggaccatactcgatattggtattagaacgcaaagggtcttgtgatgactttagactaccttctcccggtccgtgcttcagagacttcaactccgactgcatgctcagtccagaaaatggttgctatttctggcctgcagaagttcttgccccttgattccctgattttatgcgacgttggcgcacggtggaccatgcccagcggcgagctttctccacgtttcatgtttatccgcgagcgtgtcaagcgccctgactcctgcttgccggacatattaaagattaatctattccagttcaaatattcaaccgttgtttctgcacatttcggcccgttccacatctggaaatgctctgctgcagcggcttcgtattgatcatatcaaaaaatacgggtacgacctgactcgacgtataaagagtaaagctctggacataggccatgaaacccaggtgaatcgcaaaaacgaggactaacaccatgcagcccctccacactcttcttgccttgcttcctctttgccggtcaacaaccgctcttctcgctttccccggcgcagaagggtttggtgccaacgccgtcggcggccgcggcggcgatgtctatgttgttacgaacctggaggactctggcgagggatcgcttcgcgatgccgtttcggaaaccgatcgcattgtcgtctttgcagttggcggcgtgatcaacattgaagaccggcttgttgtctccaagcgcgttacgatccttggccaaacggcgcctggagacgggatcacagtttatggcaacggatggtcattttccaatgcggatgacgcgatagtaagatacattcgagtgtacgtctctcttacaagccccttccaagcagaatgatcaagttgctgactgataccggcgacagtcgaatgggccgcggcggcgacagcggcaaagatggcatcaccatagccgaaggctccaacatgatttttgaccatgtctccgtctcatggggccgcgatgagacattctcgatcagcgggacggccgagaatatcactgtgcaggacagcattatcgcacagggcctggagacgcactcatgcggtggactcatgcaaacagatggtggtgtctcactattccgcaacctgtacatcgacaataagacacgaaaccccaaggtcaagggtgtcaacgagtttacaaacaatgttgtttataactggggtggtggcggtggatatattgccggggactcgagtggacaatcttgtaagtctcctctttgtctcttcccattttccctcagtggtagatactaacaatagacacaacaaagacgcaaatatagttggaaactacttcatcagcgggccctctacgtccgtcacggctttcacgcgcggcaacgagaacttccacggctatgttgaaaacaactattacgatcccgaccaggacggaactttgaacgggaacgagctcggcgtgtcctcttcaaactacggcggtatggatatcgtggacacaaaatacgattatcccgctgctcaatatatcatgacaccggacgaagccgtcagctatgttactgagagtaagttccctccagccttcttcctcctatccaagttaggtgacaatgtggctgatgtgaatgtgtagatgtcggcgcctctcttgtccgtgatggtgtggactccaatctcatcgaccaggttttgtcgtacggaacagacggggccttgatctcggatgaggatgatttcggcggcgttggggacctggacggtggcgagactcctacagacacagatggagatgggatccccgacgatgttgagacgcagcttgggacggacccgaatattgctgattccacggagattgatagtagtactgggtactcgtggttggaggtctgggcaaactcgttggttccggagggatacgcgagtactcggaagtgttaggatgtgacgggctgtgaattccgttgttctgtatgtaaggtcttattgacattgtttattgatgttaatctattctgtccctcagatgatttacgagaaatcactgcataagcaaccctgtctagtccagtgatttgtctcgtaagactcgatgcccgaggaagaaaacaaatggatggcctactcaatcctcacaatccccaaccgctcattctcctccttccctctttgactccacagcggcggctcatcttcacccttttcctcctgtctatccccctcttccttcgtcgcatggacagttcgcggatcatgctcagccggagaataaatagttacgacctccagcggtacgtcaccaacatttaggaactggtgctgctgcccgctggcacaattactacatcgccctgtttgacgacttgctcctttccggccacgatggctttgccagtgccgtgtgtgaagagcaggacttggtcgacggcatgtttctgttgaagttaaaaaacatttccttctctattgcgcgatctggttgagaaaggtggctgtttcagggggaggttggattcatacttcgtcgccgatttctccattcacgggaatttccattgcaacaaattgggagtagagacccgtatggatgaccttgcggaagaccccaaaggatcgtgatggagagagtatccccgggaggtagaccatctcgttcg

SEQ ID NO: 5619 - DNA, 9598 bp, Emericella nidulans
tacttctctctcccactttttctcttccatacgctcctaggcctccaacagtcttcggtgccacagttgcctgtcgccatggaaacgattacagcccaggccattcgggatatggcggctcttcggaaaccgccggctccatggacactagatgagccgtatccccagtcttactacagcttcaaccccacaacatctgcctgggtctccaaaacaccatctaccgcggccgagcagagcagcccgcatgctggggctgtcgccgccattgcactctacacctggaatatcgacttcatgttacctttcgcggctgctcgtatgcggccggctcttgctcatttgcacgaactcatccgtgatctccaccaaaatatcgcccctgtgatttttctccaagagtgcactccttctgacctggggaccatcgctgcaaccccctgggtgcaagaccattttcacgtgacggatcttgaaccaaccaattgggctacctcgcagtatggcacaatcacgctgatcagcaagcgcgtacccattgtgtctgtctttcgcgtgcattactctcacacacgcatggaccgcgatgcgcttttcgtggacatcacaattggacatgagaagcggatgcgcctctgcaattcgcacctagaatcgttggccctcgaccctccctaccgcccattgcagatgcagctgatcgcgaaatacatgcatcaagatgacataaacgctgctgttgctgcaggagatttcaatgctattcagccaattgatagaacactgcatacggaccagaatctcaaggatgcatttttggaatttggtgggaaggaagacacccctgaaggatatacatggggccagcaagcagcaaccgcccagcgcgaacagtttgggtgttcgaggatggataaggtctacttctgcgggtgtctcaagttgttgaaggttgataggtttggtgagggggtgctggtggaaggggacgaggagagacggcagattgtgggtctgggattcgagaagccctgggtcacagatcatcttggtgtcatggccgtatttgatgtcgggctcaccatggattcgcaactctaggcatcactcgcgtgtttcagagagcattagattgacgggagcgttctggacgtctttatcatcatcactagacatttctctgcaagatatcacaatatatccaatagtaacgtgggccaatttgctcaacgtctctagggtacgagttttaatcaccaggccgccgggtatatgtttgtcgtgtgcatcttctatcgcatttccgtactcctgcgcactataagccgcagtggcggctcagtgcttataatctcaagcgttagccgtccaaatcggatgtgtgtccgttcttgtgcgctgtgaaaaccaggccgacgtgctccacacgcatgggcgatccctatagtcactaatggtctcgacgactttgcgatgctagagaagataacccaaactcgacgttgtccttaactgcaccagtcgcttcacagaggactgcgaagcgcgacggtagaccggcaaggaggtccattttattacatttcagccccaacgggcgacttaatctaacctgagcattctgtgttctgtatgttataggctgtcggcgaacatagcccctcaaaaagtgggcctggagtgtagccttaggtctggagcagcctaattcccaggcacgtagccgagtccaggaaacataaaatctgacatcgccatgtctgtcattgcgaagctatttcagtcttctgatgtcgttccaacagggttaattataagagatgggtaagttacctcgatcaccagggcctagctggtttggcttataacgccgccacaggatactcagaggtaccgtacaatctctcattggcagtaaaggcgaaaatgaatctgataaataacaggcatactgtcatctttgcggcgtcagcttcaatatcgctcgatatcgaacagcgggagaacctgaaatagccacctgggattacacaggggaccaggacgatgagccggcaattgaatgccttgtgctagaggagtgccgtaaaaacagctgtaccctcgctctccggcatccgaaagaaagaggagatgatgatgcggtccatgatccagacttcgagccggtagagatggacttcagcaacgatccgtatgaatgcgactcagagtatgaatttgccgatgccatgagtgtctcggagagtgaagaggagaatgaagagtgcagtgacaggaaggtgtacgaagatttcctgtcgaggactattgaccgaccgcatcaattaagaggcgaaccagttggtgcctttgcctactcgacagccgttaagatggacactctggttccaataacatcaggcgaattgccagataattacgaccccgaaggtctcgagcacctccccggcgctgcctgtggcgaagcaaacgcatactccggcgcagcaatctcccttgcagagatgaggggatgtcgcaccgcccagttcctcgtccacaaaagctgtgctctgggtggttggcagcctgatggactccacgaggcgtgggagatgacgaaagattggttcctttcgggagtctgcgatgggatgatatcgcgtgattgtggctaccctactgtctggcctgcgcgaggggggcttgaaaaggtggcatctgataatgtcaattttgatgtgagtcaccctttcttacggcgcggtcatccaagctaatcaactgcaatagcctgaacatttcgactcaaataagcttgcaatgccttttcacccgtggtgcttcgacaccttttcccgccagtcaaaggcactatttaacagggtgaatgtatcgggtttgatgaaatggcgaaatgctgagtgtagctatgaagcgttctttgaattcccgcgtatcgcggatgtcttcgaggcgcaggagcagttttggcgacatgtgccagggcaagagtatctgtctgccaatccactctatgtgcctggcttaccagcgttgcttcgagctgctgagcggaatgacacgacaggctatgaaacggcttcggtctcagcgtccttcttccagacaaacagactggcttctttacccttggatgtgcgcctccatataatagactttttggagtccgccgatatcctgagactccgagtggtgtcaaaggcgtttgcgcaactgcccaacagtgtgtggcaccgtctcgttcgcggagagatgccgtggctatgggaagcttgggatgattctgaaatcgaccataccccttctccttggacaacgatgaccgcaaatgaggttaagtttttcaaccagacccgaaaacgctaccataaggtattgcgtaatgagtctaccacggttgacacaacggttgagcatttacttcctcgtcccattctggagacggaatcggtcaatctcacaaaggcaaataccaactggcacacggtatatacgactattaagcgcaactgggcctgcctcaagggactgcgcaatcgtaagcggatctgggaagatgttgcggagattatcagacgcatccagaaatatgatgagcagtaatcagatgacccagagccacatattccagtcaaagattttcgaactctaccaagacagaaacttagcgaaacttagcatcatgtatctatccaatttgggtttgccttacagtgttcggttctactataactttagcctatagacctttatgctgttcagtctcagtttgacttatgtgcaaggtcaatcttttaaagtctctctaacccgggtaatcatctgtaggctttgtaaagctgattaactcgcctaaaccctattgaagtctataaacactgggattggtgaaagggtcaagctcacagaacaatgccatgatacagatagagctattatttgtagatttagatccggaatgagttattgctgttaagggactaataaagtccattattgatcccggttctgtcttctaagctatgccttttctcgtctctgtaccattcattgcttgactctctagctgcgctgtcgcacccattccattttgcggtattgctgggaggtttggtaaagatatcttctgaagggaagaaatgagctttatcgaaaggtcagcttgagatccggtgtggtctgaaccacccgtatgtaactgatataatttagagatgaaaaacgcaaacgtctatgtcatattttcttggcatcagagaggaattgtacggccatattaaacaaacaaatctcctcccgtttctgaaagcaacagcttccacttagccctaaaccaaggcgcaatcttccagcttcccaactcccacggctggccttgtccttttctttgcttattaggttcacaatcgtccaccccccaacacaccagcccaccctcgataatatccctcttcagctcgaaaatattcaccagattcgttccggcggcactgagcacaatagctctagtccttaacgagggcagcgggattagatcgaaaattgggtgatggggaatcaggatctgagggagtgtagggcgaaggtgggtagggatggatggattcacactgagaaccgatgcgagtagcgatctggggtctgtggatggggtagcgggtcggtagaagggagagcagagggacatgcaattgtaggtgaagaattcgtcgatcgttattcctattgagaaggcattgtgcatgcaggctgtaagaaggtgggtgcgattttctgttatacagattgtgtttggcgatgaggaaggttcccctgaaaccggggaaagtgtggatattgtcattgattcggtgctggaggtaattggtgactgatctgtagaagaggtaccagccagctcatccacagctgcaaagcctgagccataatcagtgttggtgatagtagaaggcggcaatatggcctcataattctgaatcgattctcctgggttgacatctccaaactcgattagagaatcatgtccaaacacaaggttctgggcggacggtatcggaggcgtcagagtacactgtgtacccgtaccaggtccgctagatgatacgacttgcccactccaatttggtaaatctttctgatccagctctctagatgcaatcatatacccctgatcactctctcgatggccggccggagaaggtatctgcacaagcggcgacggctgaatttccagacaaccatttctgccctgcttccttaaagcctctttttgtgctctcaaacggtctctctgccgttgacctacttcacgcgttagctagaggatcactaatcgtatctaaaagctagcgtgcacgcacggtatgctcgttgcgcctcccgattctggatcttccgggcttctgtgatgaccctttttggtttaggcgctctgaatgatggggcagatgtgttcatcacgataagaagcttatgaaatctggtgagtctgtataatggagcggcgaagaatcgggtgaggctggcttacggttctggtgttgttgggggcggtttggttgcggggcgaaactagctcgtattcagtatcacaaattaccatttatcgaccataggagccaattgtgatggttcactgtcaatactaggcactaagtcaagacaaaagctgtattttgcattgtactaccaactggcttacgcaggattgaccaatcactgcacatcaaaacagtaagccagtaagccagccgtgcggcttctggcccgattacgctcatcgaccaatggctcgtatagtttcatatcaaattgaatagtggaagattcaatgcaggccacccgaaagaaatttataagagctgctgtgaccccaagcaggagaagtccatccttatccccaactgtttagtactgcattcattcacattgcattccccttccgaccaccaaagttccaccacaaatctggatctcacgcaattcgcaaaggatgtccagccaaaccaagactatcgccgtaatcggtgcgacggggaatcaaggcttctccaccgcagagtccttcctcagtataccaaactgggccgtccgcgccctgactcgtaacccggactcagccactgcccaaaagcttgcctcaatgggttgcgaagttgtccaagctgatctaaacgacatgtcctccttggacacagcattcaaaggtgttcatgctatctttgtgaataccgacttctgggccacatacacaagcgatccagcacgtgacagtttcgcagcatatgcccaggaagtaaggcaggggaagaacgctgcaattgctgcttcaaaagtcccaagtttggaaagattcgtatacagcgcgttaccatctttcagcaaagcctcgggtggaaaatatagcaaggcgctgcattgtgaatccaaggcagctattgtcgagtatattgaaacaagccgagaccttatcgagttggcgaagaaatcgtcgtttatctacctaggagcttattcgacacatccaatcttcacacccagatccctgtctgaagatggtgtctaccagttcatcatacatgttcgaccggtggcgaagataccaataatcgatgcgccaagctcgaccgggcgatttgtcaaagagctcgtcttaaacgaggagcctggcacaaaacttttagcctacgacacagacagctatctttccgtgcttgaggctgtcgaggtctggtctagacgcacaggagaaaaagcggagataatcaccatatctgctgaagaaatgagggagaggtttgggattcccatggaagtgttggatgcacctctagcaatcgatgagttcgggtatatgagtggggttgaggggtacattgagccgaaagatttgaccagtacggtggtaacgaggagcttcgaggagtggctgaacaccagagactggagggagcttgcgctggcaggggagaaggagttggagggggtcaagatttgaagctcagtgggatgttattgatgcacttgtgctttgttgatctctttcttgcgtctcttgccagttctcttcacatattatatacatcgctttgaaatgggtggtccagtatcatacattcatcatctgaatgttggagatataaccatttagctatggctgtaaccctatcaagctgtttcatcaaactacaaagcagtgcaaaagacaacgttatattataacgcctttaccaaacctggatatcgtaacttagactacatcatacactgctcctgtctgccctctgcaaccaccgtagcaacaattaatgtacatatctacgcaatgtacgacacctccggtgtagcaagcaaggcaattcatacgagggtaccacagcaggatagtaagcgcggccggattctctcgtttctaatatcgtagacaccctctggcccagaactgaccttaagtcacccgtcgggcttatgctggacgggttatggtggtccaaagttggacccccttgtggatgggtgtagtacaatctcgccctaccgcacaattactgagcttacggtaggcgtcggagtggctccctttacgcacctttgccaggcatcccatggaagcccgcttgagccaaccacaacgtctgtctcactactcctagctttgttcccgtattccgattgagttaatctggtgtcatagaccctaactctaagctgttcatagcatataagtaccctataaataatgcgcttaccaatatatttcttagaaaagatcgagcggcatgtgcagatttgataaggtaaataagtgtattatcattgctaggtctcactataactctgatcctggattcttgagatttctcaacctcagaaacgtcaatcagcgaccttacaggtcaattagaagcaatattttgcttcttggctcaagccggtcctgaatcccagctaaacaagctccctctttcttgcttcgagagagcacctacatcccggactcgaccatttcaagtgctcttggccaattagtcttgtccagactccaaatagcctcccttgctggtcagcagtaggtagagtcgtatttccactaaaatccctatcttaaaactatcttaagtagctggatcaatgtatcgttattagcacgctcccgagtgacagcagcgaatgggtaggtttcaatatcagcgacaatgttttctgatacggaaatatgaggccacgtgatctctggtagattgaccggacatcgcctgtttctagaaggttcctaccctctgtatatatatagtggggaagagaggaatacacacaagggaagaaatgaaggaatctatcgtcaacaagataggtgtcaatcgtcatatggcatccaatccttagtaggccatgttggtatagttgatgcagtttcctcctgccctttctcctctgagcatattccacaatattggttatgagcccaggctgctacgtctagcctaaccagcaggcctagcacctcgggggattgtgtgaagcctaatcgctttgcccaatccagcaggagattgaaactgtacgtgacgtattgatcctcgatcttgtgaaggtggccaggcccgtacaacctgcctatctatccctgatcgagctatcgaacctcgaacctagaaccgaacacgacggatgccaccagctcgaagacaagaacaagacccatggactgggagatatatatcaagctgagaaaatactgaagacctagcaggaccaaatcggagcatacccagggcatttgatgaactggtagagacaattgatcagaccaagacggcgccaggggcgagtgagacggtcgagatagagccaactgagacgaccaaggcaactgtatacgagacggccgagacggacgagacagtcgagagaactgagccggacgagagaatccgaagcgctagttgcattgagatagatcctagcgagcagctgcaagcagaattggcagctgaggaccctgattggcagctacaaggagaaccagtatctgggatactaggtatagaagaatcgacatccaggatatcaaggaattcagaaagacttcctccccttgataagggtgaccgaatcaagccagtgggtgtcaaatatgatatactggacgcgtcgaatgtatgactatggaagaagaagattaaaggcctattgaggctttagaaatgctggaaagtggttgaaaataccaggaagataagacttgaagagaaaactgagcttctctgtcaagcaatgcaagataaggattatatagactataatctacttgctgttatatatctaatagcctatatctcagaagaggatgcaactgcagtgaagaaccttgagattagtagaaatatctagatctaccttatagagaaatacaaggctatgaaccccagaaggaaggttaacctcctaatacagctatttacatagaagatagatcctaagataaagatcaatgaagctattcaggaccttgaaagactatataaagaagttaaagatatataggaaaaggaatacctggattaggatgtctgatagtattattctatat

SEQ ID NO: 5620 - DNA, 9757 bp, Emericella nidulans
ctccctgtagaaaaggtgtgaaattgtaatgtgcttgaggatgatgaggtggtgattgatcttgttgatgagcgccatgggtggaaaaaggttgatattgaattgagggcttttgaggttgcaacttacaggttacagttgtaggtcgcgcgatctttatctaggctacgaggttcatcctagtttagcttgcctcatcttgaatgatatgatccactagttttattgcttggtccggaatgttctgagtttcttgattatattttagtatgcatgacctcttgacggtgagaaccttctatctaggtataaacagactatatcaaaggagcgcaaaaaaggctgccctgaaaagctactccgcaagtatgagactgaaagaaagatgcgatagatcgtagacactcatatctccagcgccaaagctccctgaaaaatgccgtacccagttattgaatgaaacgcactagaccttaacccataactccaagcaaccgcccccttcaatttgacagaatcaaagcagacgaaagcccttcaccaagcgatacacagaagaagtaatattactccctccctgcgtaggtaatcttaaacctcttcgtcggcggtttgtcttcctcatcctcctcacccttattcgcagctttcttcttgttcttcgacgaggacgatgaagacccctttacactccctgccgtagaagaagtgtccccattgcccggtttgcctgtcgacccattaaaggttgagttaggagtcggtgcgtgcgagggcgttgtttgtgtcgagggtgtcggtgagtcctggcaatacgcaatccagttagtcttaccattcgcatcatctcgtcgctgaaagtggagaagagcaaacatacacgcatgaagctcgccgagcttctcgagaacacgcggtcattgtcggtaacagcagacttgcgtctcgatgctgttcccgcgcccgtggaaagcgaaatcccgcctgctcctagacctgaccccgttgaggagcccttgatgtaattatcaaatcccttgatgatgtttccggcggtggtttcttcgaggtacgattgttcaaagcggaatatttggtcttctagttgcgcctgcgcatcaccagacagttagcaaggtgcgtacacgggcatcggcgtgagaaaggagcaagtaataccatgctcttatccataagtctcttcttttgcagtgtatcgcgcagctcgcgacggagcttttcgtagtagggtaggccgcgatttgcgcgttggtctgggttttggttttcattattgtttgtagtggctgccgtcgctgttgatgagccggcattgttgttctggttttgattttgagattgtgattggttttgcggcgtgtcagctcctgtgctgggcccttgtcctgacccgcctactgctggtgtgcttgcgccgggcgcggaaggtgtagcggctgcggtttcggccattttgacgtccaccggcttttattaagagctacaatttggttcgggcagagtggttagacgggcaagacgtgacttgatcaattggatgatgcggggcgtccgtatggcgattgactcgtggtggtgcggaggaagaataatgaaatccagtcctccgtgatgggatcgaccgatcttatcagtcgctgtttgtcttgtttgcaatcatctcatcgtcagctccaacctcctcacctcctttgatcattcgatcattttcattgaagcggactcctttggtcgagttgacgctggtgctggctctattattgaaccaccatcatctagttctgaccctaacaacggcatttacaccccggtataatcggtaactctcagcctcgaccagcacctacctactactaagcgaccatggacatgtaccatatgggaatggacatggaccactcacatcacgagcacggcgatatggacatgggaggtaaccaatgtagcatgaatgtgagttctcatatttataactgcatagcctagctgcctctgggcgattgattcgacgaccgaccagatgctttggcttgtcactcacaggatgctgatatcttctgcagatgctgtttacctggtccacgaaaaacctctgcattgtcttctcgacatggcgtgtaacaggtcctctttctctcctcggatccctggttgtcatagtgctgctggcggccgggtacgagggcatcagacaagttacacggaagtatgaagtagcacatgcgcgaagactaagtgcattttccactgctgtagttggaagtaagtttctctctctcttttgcctcgcatagattatatgatactatatgtttctatatatgcgttatgtgtatttgtcggtgggaatggatttctgggcccagtgtctgtctgttgggtggaagtgccattgacattgacgcccggactttaaggcaatgagttcgccgacgaagatgtcacgggttctggacctggacatgaatcccaaagccaagcatatgtccccaacgcaagctcaccgcttcttgtaggcagtgataacaggagagctatggaacggagaggaaagatcaccatggctgcgctctatggggtgcaggtcttctatagctttttcatcatgtgggttcaattttccttctcccctggaacaatcaacgttgaccgtttaggcttctattcatgacttataatggtttcgtgatgcttgccgtcgcaattggcgcatttgtcggctatctggcgttcggggagaacatgtccgcgacaaagtcggtcgcttgtcattgagtcgatggcatatatttgcatttcttgttccgacattggtataggtgggcgaaagcctaaattagtacagtcattgcatataatatatgaaggctttgttcaaggaacttccgcgtcactgtcatcaccaccaaatccgaagctgaatgcaccggcctcggagtcagcgttagcatcatccgtgcctgttttgccatggactatttcgtcccatttgcgcttcttgcgttcggccttctttttgagttctccaagagctttttgcaggagttccggatgcgactgtcgcattctagccacaaaccgttcgtacggattgttaatgtccttccggaacccagatacctggtctgctttgttggagagaaaatccaacgcggcagtcaagtgggctcgaggaatgaagttctgtgtaatcgcgatggcaggctccaggttaacaaccagatgccaccatccggaaggtacatgcaagatttctccttcccggcaaattccctcaatgcagcctggtgtgcggcgggcctcggcatggaagcccaaaagccactccgcgatactaagcggagaagttacttcgctttggtcctccgagacgtagacaccgggcggaggcggaagtttggatgacgaggggaacatgatccagtacttggaaccacgaataaccgcattccaggcgctagtggcattcgggtccttgtgaaaagtgcttccggaccgctcaggacctatgatcagccattgtcgatccggtctatcattacccagcaccgaaaagaagtcttcaccgaagcatggcggcggccaatacgttgttcctggttcctgatgtggcggtccaacccgtagactcatcttcgagacaaattccttatcgaagagatatagagggctctcgtccgagttattctccatatagtccacgtatgtccgcagaggccagtcgactgcctctgctcggaagagcgtctctccatgcttcggaaggagcgtctcaaccgaccactggtgatatgcaggccattccttcactggttctgtgaggatgaaaggcgtgtcagaccacttctcctcgaactcttcggcagagaggtttggtagccgagtaatttggttcctagctggtatgttggatgcgtacggttcaagggatatgtgcgcgcaatagaacggccgatgtaatgcgtctgagaataggctggaacaatccagggaagcaacttttgctggcggcaagttcagaaacgtggcacgccacgttcctctccaggtaaatgttgccggaggagatcttgcaaactttagtacttactttcaatgtcatgcaatatgcagcctagaactcaaaactagccaagcttaccggataaaaagagccttccacagatcctctgttctggtaaaagcatagaatgccttgcatgtctgacccaactgcagtagactgcggcagtccaggaactccaataatatgagaatcagctcgtcgggtactatgttgtatgtgccaatcgcagtccgcaggtttgcagaggcgaaaagtgcattgccactcggcttaacgcctaaagggtgtcctgggattgcgtcaagttcggctgactcgtcaaccgtatcattgcgacgactacccagagtggtgatgtctggcatctcacctgctgatcagatgtttttttatgttcccgcggtaaaacgttgcgctaaccagcagattagtgatgagggcagctgggatgactcaagaggcggaagaattaccctgacacgtcaatccaggtgagtcaggtctaaacagcctaaacagttcaaatctcgaagggaaaaaaacctcgagaaagtccgtagcctgttagaaaataaggaaggataaggctcaaaggagaaggcggttgtgcgtcattgggcagaaaactcgtacgaaagttcaggcggcaagggtaattttgccatagaactccgaaacttcgcggtcacagccagtaaaatttgcgaggagcgaaaagcccgctttcccccatccagaataattcttttttcccaccatcagaagatccaccacttcttccaactttttttctctcttctcccacttctcaagtctcaacttttacaacatctatcattactactactagttcctgaaaagtctctataccggagacctgtggttctagtcatcaacgctcatccgacgagtctatttgactgagattttcagcgacaagaaaaccccaccgggccgcttcgtcgctaaggaacaaaccttttaacaccaaacccccaccgtcttcattcgatcacagtccgttgctgtgatcaccccttatacctcccgcaatcatggcttccaacgacaagggtctcgaggagatccccgacagtatgttctccatcaccctccgtttcatctcctgttcgggcaaggatttttttcgcggtctggaggggcggcgggacaggaaaatctttgcactacccacggcgagacacggtgtaggcacaatttttgctaacaattttctccaggccagatcgagtctaactatcgatgagatcaccgactccttcgactctatggagttgaagcctgagctgcttcgcggtatgtgaagatattccccagtatcaaaggaaaaagtgggggcattttctgacagttttcggcatccaggtgtctacgcctacggtttcgagcgtccctctgctattcagcagcgtgccatcctgcccatcgtcaagggtaagttcagacattccacgcaacccgttctagcgctaatggactgtttcaggcaacgatgtcatcgcccaggcccagtccggtactggaaagaccgctactttctccatctccgctttgcaaaagctcgaccccaacgtcaaggcttgccaggctctgattgtcgctcctacccgtgaattggcccagcagatccagaaggtcgtcatcgctatcggtgacttcatgaacatccagtgccacgcctgcattggtggtactgctgtccgtgatgacatgaacgctctccgtgagggccctcagatcgttgtcggtacccccggccgtatccacgacatgatccagcgtcgtgtcctcaagacagaccagatgaagatgttcattctcgacgaggccgatgagatgttgtctgtatgttttagcctttgattttagtcgcacgatatatactgacatctgcagcgtggtttcaccgagcaaatctacgacatcttccagctccttccccagtccacccaggttgtcctgctctctgccaccatgccccaggacgttcttgaggtcaccaccaagttcatgcgtgacccagtccgtatcctggtcaagaagcaggaacttaccctcgaaggtatcaagcagttctacatcgctgttgagaaggaggagtggaagcttgacaccctctccgatctctacgagaccgtcaccatcacccaggccgtcatcttctgcaacacccgccgcaaggttgactggctcactgacaagctcactgcccgtgacttcactgtctccgccatgcacggtgacatggagcaggcccagcgtgatgttatcatgaaggagttccgctctggatcctctcgtgtcctcattgccactgaccttctggcccgtggtatcgatgtccagcaggtttccctggtcatcaactacgatctccccgccaaccgtgagaactacattcaccgtatcggtcgtggcggtcgtttcggtcgtaagggtgttgctatcaacttcgtcaccgctgacgatgtccgtatgatgcgtgagattgagcagttctacagcacccagattgaggagatgcccatgaacgttgctgacctcatctaaattccctgatttccgagccacctaatgtcttcgatgcgggttacgattgccgctccaagggcgagttgcggtgggaaaagacatgttttgatcgttgcagcttctcttggtaaaggaggataccttaaaagtggctttctgtgtctccagcattttatttgttagcagtagcggcgacaattgaggaactgtcgctgatttactgtttcatggtttcctttgttctgctatgcttatggagatgcgacatgtttgtgcgaattttttatgctgtaattcatgattgtctcttctgggatttctttccacctcttttcctttgtcccttttcctactatgctcgaccaaaaaaagcgagcaaaatgatgattgctcgtgggggcgttcgtcctccaatgattgggtggatgaatgtgatacatctatggatctgggatggttgcttaaagtatggagcacaatagacaaagaggtaaatgccattccgtttggttaacccagtcttgatgtctcgctgtatatgtaggacgggagaagtagttctgatacacaattttcataactcgcgggcttgttctctcccgtcctctgtgataaacaagagtcctccgtctttcggattattctctctaccattcatccatgcttagaaagacacaactttcccatctcaacaagctcagccgaaatattcagcagaaccttccccacttcagtctgcagtcttgtcgatcccaacattcaaagctaattccgcatctggcaatcaacatggaccaaaccgccccttcctcgattctctgggccacccaactccgccaggaaaatattcaccttgtcaataaaatggaccaaataaacggcattctcacctcagctatgggaaccattgagacgctcaatagtattattgacatgcagggtgaacgtattgaaaggctggaaaagcaacgaggactagacaaggaacaactcactgggattatccaagagtcgaacgcgaagagtcaggatttcgaagggcatagctgcaaggacaacatggagcgcttcgaggaagtctctgagcggactcgtaccctggacgaggcgaatttcgaattgacgacaaaggtcaatgtggcgtcagataagcttgttgcacttcagactgagaatgcgacgttgagagatgaatttgctgaagctcgtcaaaagctccgtaagctagagacagacaacgcaacgctgaaggaacagattggcagggtcgttgagaaatttggcgttcttgagacagagagcaggccattgaagcaggatcttgtcagtgttctacaaacatttgagacaacgcaaagtgggaatgcggagctgaagcaacgagtctgcgtgcttgaaaaggagctctctgtgcaggagaagagggtaactagggttttgaattggatgtccttgaaaactatgcttaaggatacagataaacaaggtatatctgtgattatattgcactcagcagtactgctaactcttactcgcaatgcgcagcaacgagcgtaaggtcacggccgaccccgacgcaaacagacacagatcaagagggagaacaagaaatgcgcgtccctgactcaatcccaaccccaacatcgcgccattcaactctggatagaaccgcccaccggaatctttcagaaacaacctggggctcattgactgatctcgacacagccttgacccccgaacgagccagggacactgccagttccccgcagagagacgccggtaagcaaaaaacgcaagaggatattcgccaagccggcaggtcgttgaaagggtactttcagttcgcggattctattcgaaaatcctgccctgtaccagaagaagcattcattagggctttcataaatgggttagaagacgaagacatgaagaagcgcgtgcgggagataactagtcacacgaagctttcatggaagaacatggcgtctcatgtggagcaggtcatattggagcacgagcagggacaggagattgagaaacaagctcacgggaaggtggcacaaattcctatgaagagagatgcagcgggtttgggtctcgggtcgcttggaaaccggagagagaacaagttgagaaggtcaataccaattgtgccgcctgacgaagatgacatgttcgccccatgaattctggtatggctcgcaaagaggcattgtaggtaacgaacgacacattcccatgcttttacccagatatgtagctaagggttttgaatcaagaattctatttatcacatatgtgcagtgtgccactcacaaatgtatatgcggaatcagcaactaagtctcgcagtactcgtacctgccctcccgatcctgcacctcaacctcaatccgtccctgctcgatctccttcccatcaacctcaatcgacgccttcatcacatcaccactcttcacctccccaacgcccttaggcgtccccgttaaaaccagatctcccttctccaacgtcatcacgcgcgagatctccgccagcaacctgggaatacggtacagcatcagccctgaggaatcagcctgacgctgctgcgagttgacgctcagacgaaggaatgcgttgtgtggatcgggaatttgagacttcaaaatctcctgcgatatggggaggaaggtgtcgaaaccctttgcgatagtccaaggaagacctttcttcttggcttcatcttggacattgcgcgcggtcatgtcaatggcgaggaggtagcctattgtacggaattatgttagtcgcactctatctaagaaataatgtgggccactgactctggatcgcatccaacgctcccttgtcatcgtttggatcgaggtcgcgaactttcttgcccattaccaaagccaattccacctcatagtggaggcttgtgcctttggggcgcaagactggaccttcgccagggcagagtattgaagaggagggcttcaggaagaagaaaggctgcttgggttttgtgttgttgagctctgcgatgtggtcgctgcgatctagagtcagctgaccatcggtaggtagtgggagggatatgcgcacgcgtagttcgaacgatcagatgcctcg

SEQ ID NO: 5621 - DNA, 4326 bp, Emericella nidulans
cgcagatgatttatcatcttgtacaacggcgcggatattcaccggttgttgcgtctctgctgcccaactctggctgagcaccgtattccgctcacggaaccagtcagggattgtgacagtttgggccactggttccttggagcgcttcctacttctgagcgcccttcgaatgggagacccgtagacccggatcctttgcgcttggccggtctactggatcaatcgaggcgtcggcgtgagttggattgaaggtgccattgagtgttggcgtttcgctgtgggcattctcgggaaccgagtctcgaggattattaggatcagacggtgtcgaggaccgccatgtctgcgaaagatgaaagcgacgcaacggagacgtgacagctgcaggaaatcgacggtgcgcgacgaaacgacagggtcgtgcgagagaccaaaggagccggccctgttgcattgacgagtacatccggggcaagtgatgccgccggaatcagagaatagtgaggctgctgatgctgcacgaaacaaacgtctgcatcagatgtcaactgtgctcttgaggacggaacttttttatcttaagcccatggaagcccagtttgttctttgtcagcaaccacgtgatttctcatcagtgtgcaatgtacatagcttttcctggagtctctttgagcctcaaattcaatgttcaatactattaataaatgttttgacagaatgtgggacttgacatgacgtgatgcgaccttcagctgtttgaaggaaattcctcgcattacgttcgtttgctgggaaagcacttgtagtatgcaaagcatctatctggtagtgacactcagttgccagcgcccgtgatcccagcagctccagcagttctacagcaactctaaatcgactctacggtaaagaatgtgaacatagattcgttcgaagatgtagtattgacgcagatatctgattctagtccatgcacaccagctacagcgtgagaagcttaagcccaccttttgagataaagccgtgtcagcaatccaaccgcgttgtcaaagaacgttctgtgtttctgccttttgataccgttagccactggacacggaacacgtttggcgaacgaaatatagagcgaataatctctcagacaaaatatactggcaagtagcagaccaaccgggaaaaggaaggtccgaactgtatcgtcatgggcgaattggataatgaaagaagaagagatggtgttgtcatcctcgagagaccaagacatgaaaaacaagaggaattggtactcaccctgctaattagttgatgacctgatctggcttaagatgtatggtatgatcgcactgcatcacacgtcatgtcgagagatgcagcgttgatgactgggctgacatgaaagctctaattacatggtacgagatacatgcactgctcccgaacaatcatgagactttttccagagagaaaattgaataggaagatggaagaaaaaagtctcgagataaatactggtgggggaaaaagatggaaaaggactgaccgccggccaacggttttcccgagataagcgctagttcgtttcaggagtagcggaactcggcgatcaaataatccggccagcaaagcgcctcacaggaagaaattcagaggcaggaccaggaggtggtggcagataaccgtcagggactgtcaggaaattcctggaagatatctgagatctggtgctcgacgcagtagccagctggctgaaggtgagtgctgcaatttatggttgttggaggttggaagacagaagatctgtcggcgccttcgacctcaccattttccctctcgctctgccttttctccctcttccctcccccttggaaagccaccgcattccctccaccacgcccttttgctttcccctctttttgagcgcgatactgggttctgtcagctgtgtggcgcttttctggttgttcgtgtctatcccgattgcctgttcaaacccactccgttggttatcaagcctcatattgaactggcgatcgcgagagtcggccgcccgtctttggtccctaaaagcccctccacttcgttcatcttcctccactcgatcttcccaattctcgtatccgccgcttctctgcatcgcgtctcccctaattctgatccagcaggtgacgattaaaccgtcgacaccggcgatatctttcaggccgatccatgccttagatttggtgtggtcccggcaggctcaatcgtccgcccactgcgcttttaggctttagcctccgctccgacactaaaagcggccctgttgtgtctccacgtcaagcgcgccttttcgagtcgtccgcccgcctaaacctccgttgctgtattttcgacactttgtattctttattttctacttcagtcctgtacccccttcactcctagtttacactacttctcaggctgtggggtccccgatatcggtgacttcgtagcccggcgatgatgatggcgcagccattcgctgcccatccaggcatggccggccacccgggtcttcctccgggtcacgcattggctcctggtcaacacccgaatgctcatccaggtgcaatgatgcagcaagtacaccctggcgtgtctggacctggcccgcaggtttcccaaggcggtccgatgatgggacaaatgcctccaggagcgggaacgactggtccaggagggcccgtacaggctcacgctctctcccaccttgggccgcagccacacttattccaacagccaccatacgcgcagaattgtacgtcgtccctctaaaatgccattacctggttgaaggactttcctagttggcacactcccctgaattgcttctggtcatggtcaccggctgacacgtctcttaatagtcggcgggaatccgcagctccttcagcagcaccaccaaaacatgatcagacagcgcatgatgtttcagcagcaagcacaacaagcacagcaaggccaaccccaacatcagcagccacagcaaccacagccgcagcacggcggtctctctgtctctctcccgaacggaacgcaagccttaagcgcagcgcacatggtcgccatgcagaatccggcgatgcgaccggcgaatatgcagcaaatgcagcagctacagcagatgtcacacggacaaccccagaatatccagcaacaacagcagctcttcgtaatgcagcaagctgcacaggctcaggcccaagcccaggcccaggctcaggctcaagcccaagctcaagcccaagcccaagcccaagcccagcaagctcaacaagcgcaacaagttcagcagcagaatgctgttcaacagggccaacacaccccgcaacagcgaccggcgccccaacctcaaaatgtgcacgatgcgcaaagtgccactccgcaacctcagccaggtccgccaccgcatcaagggagcgcaactccccagccgaaccctcctcaagtctcgtcctctcagccgccgcagcagcaaccagtagtcacccaacaatcgcagcccacaccgaatctcgccccccagcaacttcctcaggctcagcagcccggccagcagccgcatccgcaacaaccccaacaacaagcccaaccgcagcagccgcagcagcagccgcaagcacagtcgcaagcacaatctcaacagggccaaccgcacccgggtcagcagcaaggccagcaaccccacccaatggccgcagaagccttgaaagcccaacaacaacatcaacaaaacgctgcaatgttgatgcagcagcgaatggccatgaggggacaatcggtcctagtcctaggtaattttgccgaacaactgagcagctttacggtatgtcactcttgctattcccaacacttaatgatcgttaataaattgaaactaacatgggcgcagagccgtggagaagcggccgatttggcgtactggtcaagctttgttgacagattctattcacccactggggttctccgtcagggcgtgttcaataaccaagctggtgctaagcagtttgaaattgcaacaccagcgcttgcgcggtattatttgacacaatttgcgagtgggattcgacagattcagatgcttattgaagggcctcgagaaaaggatcttcctaacggaggtcatcttgtcgagtgtcctaaagctttcttcatctactggttcacaaacgatgcacaggtgagttgctgattattttccttccaaagttaaccaattgtccgtgctaaagcttttgctagcttttcactaccggcaccttgcaggcgcagtttgactttcaaaacaaaattcaagttgttgatatt

SEQ ID NO: 5622 - DNA, 12332 bp, Emericella nidulans
cggttaccatcacgaggaagagcctttaccttgtgcttgtacgcctggacgcccatatcttcaattgtgtacttgagacgggcgtgcttgcggttcttgcggtcaccatagtcacgctgaacaagcataatcttctcgcaaacgatgtgggcttgatcagcgggcacgtaaccaaacatgcgaccagtctgggggtacgtcttcttgttgttgtgggtggtacccataccaccaccagcgaggatattgaaaccttccaggtgtccatcggcacccttgatggcaatgagaccaatatcgtgagcgtatacgtcggtatcattgtgaggaggaattgcaatggtaatcttgaacttgcgagggagataggtaggaccgtacaagggctcctggtcaacaacagcatccccagcgacctggaccttcttgtcattctcatcctggagccagatctcgtgataggcagtggtggcagggagcaaatggtcgctaatcttcttggacacggcgtgcacttcacgatggtagtaggagagctcaggcagcgaactgcacatgacattacggttgacatcaccacaggcagcaatagtcgtcatcagagccttgttgatcgcacgcatagctccacgaagattgcgcttaacgacaccgtggaactggaaggtctgacgggtggtgagcttcatggtctcgttaccataagcgctgctgatggcatccatctgcagccactgagagggagtagcaacaccaccagggagacggcaacgaatcatgaagctgtaggcaggctcaaggccctgagccttgcgctcatcacgaacatcacgatcgtcttgcatgtaagtaccgtggaacttggtcaactgctggtcgctagcagagatagcaccagtgctctcgtcgagcaggccctcagcaatagtaccacggaggtagttggactggatcttgatatcttcgtttgtaaggggagcaggctcctcagggagaccctcaaccttgtcaacacccagtgcttgccagatgcggggttcccactcggagtaaccggtctgaaaagcgtcgggatcctgatcatcgccgagaccaatgtctgtaagcttgcgtccaccgaggaaagcgatgcgagcatcaaggtccttagcgggcttgttgtagtagatcttgtcttccttgcgaggccagtagtggctgtctccgagaccgaagacggagtagttgatggtggacaggtcgaggtcaccagtgttcttcacgtactcccacaaggcaaggccgttctgtgggaattctccctggcctgcggtactggtgatgaagacgacgatctcctcggtgggcaagtcctcaaatgggtagtcctccatggccatgaccaaggtcttgagcccacgggcacgtccacggttacccagtcgcttggccagtgtcgcggcgttgccaccgtcagacgcgaagaggatagtcaaaggagcaccaaagagaccttcgagcagcttctcataggagtccttggccttgcgcttctggatagcgcggacctccgtaccgtaagactcggagaggacagaggagaacttgggctggcggttcattagttgggtaagctggttgtcccggcggaggaactcctccaactcgcgcttgacacgctcagagtccagagcgaacttaggctcgcccttgtcctcgttggcggggttccagcgatagagcggccagtaaccgaggtcaacagccttcttggtttcctgaagaacagtgagggcggagtcgttctcctggttgtacggtaggtaagcgactacgatggacgggcccttgaactgctcagcctctgccatggcctggagaacctgggtgtaagagctgtagacagcaacggaagcgacataagcgttgccaaagttcatagcatagagaccgatgtccttctttctgcgggtagggtctgctgcggagcgctcagagtaaggctgagagtcaatgacgagcatgttgacgtccgctccagaagcaagaacgtggtgaacaccagagttaccaagatcataagcccaggcgtcggaaccaatgagccactgggattcactgtagaacagcttcttagtctgcagcagctgctttgaaagcgcagagccgtcgttgctgagacgagcaatgacatctggcgccaacctgttggcctttgtagcgtcagtcgcattcaaagcccagtcggcaagccatttggaaacgacgtcagttgcaaagctgttggacttggaagccgcctcaacctcacggatgaagcgctggcggtgttcctttctagcaatcagagaaccgaaaccgtactcagggctggccgcaatggtggaagaaattccggcgttgttcgagctaagctggttcgcaaggtataaccgctcaccgaaaagctggttcaggattttcagataggcgttctcaatacggggctgctcgaggggggtctggagagtaggaacgttggaactgccgatttcaagactctggataggagaaggagagctgaggttttggatgattccacgaagagcctggacagcagtggaaggctcgacgtagccgagtctgtagcccacaatttgcgggctgcgtcctccaacagcggccggagtcaggctggaaaggaggtccatgaaggaagggccccatctggtggtcttccggacctgctcaagaaccgcgatcttctcaatcgaacggggaatcgagttcgcaatctcggcaccaacccagggacggtacagacgagcggtgatcaatccgatgttcgtgacgtagcagaccgtaagaaaccagtggggaggtcgacgaagacgccgatagatctacagaagagcttggtattgcttttcttcggccattccgaagcacaatagactgaatcttagtacgagagaaacggccgctctaaatagaagcatggactccatccagaactgagacacctctctcaagtgggtatggtcctccttcaaaacgcttttaataatagcagtagcacgatcatcaacacatatttgactataatttaaaatcatccctttcctggcaggagtgtatcatttattctcgaactgacctctgaactcctcgttttactccgcgcccatcgaccgccttccagaacgccgttgattgcatcgcagcgattactagtacagtcagtagtgttaggctgtgctgttagtgaaagctgttaaggggaggggagaccggcaactcagctatctcgcctgctttttcccctctttgtctactccgacatctttttgccctccctcaactttaaataccccagagatcaaagtccgtcgctctgaggggcttccgcccgtttggtttctgccttgccgattgcctttgccgtctgtgttgtctctagggagctcgagtccaccaccccggcttccctgtgaaaatggcccagcaacaggatgacaatgttatgcgaaggtttgtagttctttgtgatcttctgtgctatctcacgtgggtctttgctggagggtcttgctgacctatcgctactatctagaaagctggtgatcatcggtgacggcgcctgtgggaaaacgagtctgctgagtgtttttacattgggctacttccctacagtgagtattctctcttgtcagtccagtaggcagttactaatcgctactttatagcattatgtcggtcctttccttcccgcgtattcactcctcggtcttatctaatatacccccaggtcccaacggtgttcgagagctatgtgacagactgccgggtagacggccggtcagtccagttagcattgtgggatacagccggtcaggaagattacgagcgactgcgtccgctagcctactccaaagcccacgttatcctgatcggatttgctgtcgacacgccagattcgctcgagaacgtcaagatcaaggtccgtcgttatcgcttcacctgagtcttcatttacggcctactaacatatctcatatatacagtggatcgaagaagcgaatgagcgatgccccggcgtacccatcatcctcgttgggctgaagaaggacctccgcgagaaccccggagcgatcgaggaaatgcgaaagaagtctctccgatttgtgtcgcccaaggaaggaagtgaaacagcaacgcagatcaaggcccgaaaataccttgagtgctcttcgctaacaggcgagggtgtggacgacgtctttgaagccgccacccgcgccgcgctcctcaccttcgataagcggaaatcctcatgttgcattgtgctatgacacgactgaaaaatggatatgcaatgccatgtctatgtgataacgggagacagcgacctcgaactcgtgatcttttcctagatgagacgtcttattatgcctagcgtcgggtcatggtagattggattttgaaaatggaggaccgactcgtggataaatgttggttgatttgatatatcttgcatttttggcgtctggtggccttgattttctgtcttcgatttgtttgttttttattttctttcatgctatgtctaacaatcctgttcttttcattcatgttcaaccatgtttttccggatacccataccgttccttaatacctcttgatggtttctacatcacgggcactccgagttccctccttagctgtcgttgtattttcatcttacatagctctactttcgttatattcacaccattcggaagcattaaccatgttgcaatatctagtatacatctgaacaagaacagccctcaataacacctacggaaattaaaccagccatcaccatatcaccgctttgttgttccctcaggcctcttccatgcatgattccaaccctccccaggtccctccgtctgcaggcgcccatactcaatggggaacatatcctggaaaatcctcgtcttaatcatactcttgcggaacaacttcccaccatcaccagccccagtccttagctcttcgcaggcggcgttcatggcctgccactgccgctgcagctcgagctggtggttgcgcctgcgctgggcctggtacaattgccaggcgcggtggatggtccagtggcggaggaaacgggtgcgactgaagcggagtggacgcggagtgagcgggtgatataggaagtagcgaataagagctttatacagtcagttagttcgtttgcagatttagaaatggtttagttgggatgggcagatatatgcagggagattaacgtactaactctccggtctgtatattgagtctttcgcttgagtagcggggttgtagtcgagaatggggccttggcttgcgcttgtaaggtgctgggttgtgtcgacgtttgcttattgagaaagggaattgttggccggagagtcgattgtgataggggaattcggaacacgtttgccagagaggcgaggactggggataccgatggacgcattgttaaacaatcagctcagagacccgtcgcattaagtgattgctaattgtctgtcgtagagtcttggtggtctgaacctgggtggattggggtccgggagactttttcggggcggaagagtgactccttaagcgcgcgctaagttaagcgccgcactggatactgtggaatgagcactccatgccctccatgcggcgtacattgtgaatgggtagtctcagagacactgacttaagagtgatattttttacgtacatgtaattattctttcttacacaccctgctagcttccgagccagatatacaaaaatgttcaccaaaaacgcctagaatgctgcatcatcaagttcatgaagaatagaaaaagcccaatctgcgacaagttaccgcgtaacccgtttcttcaatcggtcgtagttcagtaccttgcgccgcctatgagtctgcgcgagcttccaccgacagtacagaactagtgcgtctttgagaagcacaaaaacacaacccccaatcacgctccggccccatctggtctgcaacaggccaggccgccctctttccagagtcgaagctgttgtccatgactttggcaggacgtacttaagaagtcctcccatagtagctgagatagctgggaacgcgagcgcgccaaggacgatatccgcaaggctgcttgtttcatggacgaggttttgaccattgattgcacctccttgattctgattattctgttgctgttgctgctggtttgcgccttgcaaccccagaacttcctgctggtccgcattatttcccattccaacttgaaactctagatcgaactccatcaggatctgtccatcatccgccgccaccggtccttgctctggttcaggtgcgttatcgtcgaattcatttacatctgcctggcggggctgcacctcggcaatccatttccgctcccacttgccaaataatctctcgtaaagggcaccgtaaaagcttttgatgtacgggagagctgcaaatgtcacagcagcactcggaggccatagatcaagatctggctcctgccctgggctatgcgtcgcgaaaaagaggacaggaatggcagggagaaggccctctgcgtaacgagtgcgggagaagattaataccaaaggtataagcggcagtcccatgttaaggccagagttccaggtaccctccgccgcttcctccagaatctgtttcgcctcgtccgtgccaaagacgaagtacattgaatatacaccgtgcgcacagcaaccagcccagacagtgcccgccagcgtaaacaccattccaggaagcaccaatcgaccggctagccgctcaaccaaccgcacaacatccacaatatagctccttgggcgagtaacaacaatctccgtcttgcactgaggacataccatcttcgcactgtgaccggtgcgcttccgggcgcgcgggttttcgaggtcagcaagccaatcaagaaggcaggcttcgtgagctgtcagcgcacatggacacggtgatcgccactctgaattaagtggggtatcctctgtttcatcggtataacaaatccagcatttccggggctcgtcggggactgatagggtgtttgcgggtcgagtggtaattttcgcatctggcctttcaatttcttctgatatagattcatttagtaggactgcctcatcttcttttgaaagttcatttgcaggctcctgataattgtggtgctggtcaggctgagatgatgaggcggctggcggagaagtatcagacgaccgcgttctcccaaaagctgagaaacttgggagggacgccattgtagcatgcggaaaaatgtttgaaggtttaggtgtggaatgatgctgatcagaaagagtcagaaaaactcagcatcctgcgaaggacgaaagttcagctatcgcatccgaggtccaagcaatgacgaaagactatcggaagcagaaacgagaaaatgtgagggaacgaataaactagtataccgcggacgctaacgaccacaacaatcaacacgggattcccgtaagtcaggcagtaaccactgcagtgtagcaaaactgttgtgcctggaaagagatccaactgagtcacttccaaggctcatcggatgcaagcagcggcattcaatggcgtcacgtgagcggcgggggcgatagatggcgtgcctgtgtttgccgccgcatgagcgtcttaaagcaaaaatgcgtttgacgcaagctatacgagtgttactttgtaaaaatggatagactaaaagctcattaattaccttttaattctccaaaatgcaaatacgcagaatcgtgcagcacaaatatcaggaattatatacaggcgaaactgagccaaacttttcggcggccagagcgcaagaatatgcaagatgtgagaacttcagacagagaaacaatgacagatcagatcctggattgtcgaagaactctcgtagacaggcaactgacctcacgcatgccgctttgggtcattgcatggtgaaccctagcccagcagaaccaggggatttgagactgtccgagagcacaaaaggctctggatatcgctagcatcttcgacttccgaccctgccaacgttttaaagatgatgctaggccccgctagcgtcagacccgccagaaacgccgtggatattaacaaaaggatcgcaggccattttggtaatgactcaacaactggctaaggaatggaatcaggtgctatccaggcgtttaaacgccgttagggttccttttcttcattaaagccctcctctcacggtccttggctatcgagaacgttagcaacacttcaatatatcctcaagttctgagaggcttaccttcgtcgaaaacgaggaactcgtgcaggccgctaccaccaggaaccattggtaacacgggcacttacggtcggtgaatacctcgagcaaggcaggtccatcactctcgatcagccacttcagcttggactccacttctgagggcttggtgcagcgctcggcagcaacacccatagcctcagcaagacgcacgaaatcagggttcttctggtgagtgtgggagtagcggtcctcgtagaacaggttttgccattgggtcaccatgccctgctcctcgttattcaagagaaggaccttgatgccaatgttaaactgggcagcagtggtaagctcagtgagagtcatgttaaaggaggcatcgccatcgatatcgataacaaggcagtcagggcgggcaactttggcaccaatagcagccggcaggccgtagcccatagtaccaagacccccagaagtgatcatggagcggggacggcgccaacggaagtgctgggcggcccacatttggtgctgtccaacaccagtggtaatgatagtgcggtctttcatgtgagcagtaagatcactgagcttctcaatcaaagcctgcggcttgatggggccgtcagagtctgtttctcgtagagagagagcgggaaccgggtcttccagtcattgatttgggcaaagcactctggtctttcggagacaggttcaacaagaggaaggaggtgtcgaatgttctcagcacagtcaccctcaacagcctcgtttgcttgcacaaccttgttgatattctgcggcatgatctcgaagtgtacaagaccaccacgattttccgaagcagcgagcttagcctggggagcaaatttagcgatgctaccagtcacacgatcatcaaagcgagcaccaagggcgattctcaaatcggcttcctgcatagccaagtttgcataggcagagccatgcataccaagcatgtgcagggatttggggtcgagctcgtcaaagccgccaagaccttgcaaagttgtagtaacaggaatgcaagccttgtcggccagctccttcaggagtttggggccgtcggggttttcgaggataccctgaccaacgtagagtacaggtttcttggcgacgttgacgagacgggccacgcgattgatggtgctgtgaagctgcttctcactcaattccttggccgccagagtcgcggcgctcgggcgagaaggaagagtgctctgcataggaatgggtttacggaggatacctgcggtgatatccttgggaagatcgacgaggacaggaccaggacgaccgctagtagcaatttcgaaagcttcttggatacggcggggaagttcggcgacggacttgaccataacgttccacttggtgcatgccctagagataccaaccacgtcggcttcctggaaggagtctgtgccgatggaggtagtgacaacctgaccacagaagacaaccatgggggtaccatcagagaaggcgtcctgcatgggagtaatgacattggtagcaccgggaccagaagtgacaaggacaacaccaggcttcccagaagcacgagcataaccttctgccatgtggcccgcaccctgttcatgtcgaggcaggatgaagtcgaagtgcttagagttgtaaattgcgtcgaagacgggaagaatggcacctccagggtagccaactaacccatggtcaatacgtggtcttggctgttcagagtattgattgactcacaaacgtgcttcacacccaggcgcagcatcatctcgtggaatatctcaccaccgctgagtccgacgaatctaaaaagagaacaaatcagctcatttctaacatttggacgaaaagaatgagaatgccatacgagtcgtcgagctcgggaagctgtcgattctggagaggtgatacttcattgcggcttggctcttggttgaaggcagggctgggtctagggcgggaggttctgtgttgaacaatgttaacaagccaattacacttggaaacttcgtgacaagttgtaggcactcacgaagcagaagccgttgctgtgctctggtcgcgcttctgagtcgaaaagcggtggggcgtcgagaccgcagaagcaaaggctcttcgtccagaggcaatgtacctctgataatgcagagtgcgcagggcgctttttgatggtcttaaaggcatcatcgttgctaggatgactaccaggccaagtgagaggtaaaaaatgtgaagctcaaagaaaaattgagtcgaccacaaacccggggagagagtagcaaagtcccttagagccggcgaaggaataatgacctgactggacacttgactcactcgtccaaactcgccgagtcggggactgttcagacccgctagctttattgagtttagctcaattttggtcagaaaatgaacgcccgatgattggttcccacgttgccaccgctccgatcatcggccgcagttgtgcgccttaatttctaggcactcaatcaccagcaaactgcaccgtgcacactagacggccagcctaggctattttcacatgtttggcgtccttgtcgtctagcgcaggtctagagagcttgataccccagacatactctggtacaatccgtggcctgattgctggtgtttgcctgatcctgacactagccatatataaacagtgtatgagccatgacttgccagtgctccagcaaaggttgccctgggataatttgttgactcgacagtaggtactcgtgctccaggtagagtcggcaaggcagtaatctggaaagttggtgaaatctcgtcaggtgggtttctgaccccagggtagagggcatataaaaaccagggcagttatgcttagtatcggttaattattcccatcgtctatatctgagcttagtcaaacattaaatattccatcccgggattaattaagccgaagcaagccactcggaccgtgaataacctccggtgagggcggccgaatgtgacggtagctgtggaatctatcccgtagcggcgtaggaggagaccaccgtccccgcaatagccaggatggcttaattaaacacgctgaatttatcctgaacccctctatgagatcacaggcacattttcttctactattctcactttcatcgcagtctcttttctttatttcttctctgtattatttctaggattcacttgctcttcccctagacctcagccctagctttttccaccgtcagtctcagtttaccccaccatggcgaccccgcaggaacttgtccctcgaactgaatccatcgctgaggtttatgccactgacaatgcctctgctactactgcctcaccagaacatgtcaagcggttcaacaatctagtttctcacttccacaagcaatataaccactcccccgatttcgttgcccgcagccccggccgcgtgaacatcattggagagcacatcgactacaacctgtacgatgtcctccctacagcagtgagcgtcgacgtgattatcgccgtcaaggtcgttcccacagagagctcagaatcggctgtaaagattgccaatgttctgcctgacaagtttccgacgcgtgagttctctgtgcccaaggactcggacgtcgaaatcgaccccaagaaacatgaatgggtgaactactttaaggctgggttagttggtgcacttaaagttttgcgcaagggtgctgcagatggttcgtttgctccggccagtatggaagtgctagtcgacgggaacgttcctcctggtggtggtatctccagcagtgcagcttttgtgtgctccagtgcgctggccgtcatgaaggcaaacaaccacgatgtctcaaagcaggacttgcttgatctagctgtcgtctcggagcgtgctgtcggtgtctattctggagggtaagttgcctcgttcatctattgtcaacacgctgaccctgtctagcatggatcaagcagcgtccatcttctcccgccgcggatacctcctctacacccagtttttcccaa

SEQ ID NO: 5623 - DNA, 1456 bp, Emericella nidulans
cagagccttaaggcaacatcaggggccatacttccaggactactccattgatcctgccctggtcgactccttcagtttcgtggacagccttggtgcatatggtcccgacttgacccagccttcctttcagaatactgggttcggtgattcatatactgacatgggcaaacaaaattttcccgttaccacttcagaggggtttctgtctggtgtgtcgaccgcttccggtccttcgattgccagcgcttcttcatcagccatgggctcgccttactcggcaaatacgcaaacctttcaagaggattgggttgacacaacccacggtttgagccatcctactgcagtcatgggagatttgttttccaacgagagtatggtaaacacttttgacgcggaggggttttaccaaaagaaatcagatagctttgctggtgagtggctttcggaatcttatgctggagttgagctgacatttgacagacccctctcttatccagcccatgcagcaaccgcaactcactcttactcctgccgccatttcataccctgaacagcccgactacaacctggccccaaccagcttctaccctcagtctccggaaccttctcgatttcactatgcagaaaattacatgccgaagcaatcattcccgcaacaatccaacctcgcccctccctcgccaataccctcaggccctcactctcgccctgcgtctatatatgatcgccggtcgtcgatatcatccatacactctcgtccttcacaagcaagcccagctcccagcggtgctgaattcgaaggcgatgtcaaggagaagggacgttgccctcatcccgactgcgggcgtgtttttaaagacttgaaggcccacatgctcacccatcaatcggaacgacccgaaaagtgtccgattgtgacctgcgagtaccacatcaagggctttgcccgtaaatatgacaagaacagacacactctcacccactacaagggcacgatggtctgcggcttctgtcccggctccggctctcccgcggagaagagtttcaacagggccgacgtgttcaagcgccatctaacctcagttcatggtgtggagcagaccccaccaaactgccgcaagaagagcccggctgcctcttctgctaagagcgtctcggactactgccaagatgcgacgggcaagtgctccacttgctcaggcaccttcagcaacgcacaggacttctacgagcatctcgacgactgtgtcctccgcgttgtgcagcaagaggaacccagcgaggcgatcaaccaacaaagacttgcagaagtcgagtcggatgaggaagtccagaagacaatggaaaagcacaggctactcgacacggctggctccgttgatcaatacgacgatgaaaacgatgacgacgacgatgatgactctgacgatcgacgaccagccaagtctgccaaaac

SEQ ID NO: 5624 - DNA, 8092 bp, Emericella nidulans
tttattttaaatgttatagggtagccagtaagcagtccttaggaagtagaataagtctttatatatccttatgggtataagtaagaaggaacctgttagtatttttcagtttttaaatcccttttttatatctagtggagtaagtaaggcctctttttccttgttaaaagccttttttcgtcctataaataagaccctggattaggttaatagtagagtatcctagcagggccttgaagtagtagggggttagtatatctccctaaattacttttatagctatctactatactaggaggtattctaggcctttacctagggtagagaggaggctaattagctgccaggtattgagttgggtatagtccttctttcctagttttagtaatattattacctttgctaacttcaggcttagtagaaagcagtcttcctctatatacctgtagtatagttatataattatatcccctagtacaggccagagctccctctaagtagtagtagtaagtctgtcctccctaggggtagacaggggtagggcatagagagcagcccagcagtgctcttttgttggcaggtatagtaagcccaggggcttgtttaggggtccctcttctatctaatttggaagcagggcccccttctctaagaggtaattaagaaaggtgtctgccttgccctgtagggtagtaatctataccccttatatatttaggggaagagcagcaagctagtctagatattatatctatttagcaagtttaaatatatctataggtactatagcttatttaatttgctgcttctagtatttagcctttacctatataatagccttctagagctgtttataatcagggttttattactatcttgtttagtatagtatgtctattaattctggagtctaccatagggtcctggagagtctataagtattatatcttaatataccttatattacaagctggatatctggactagttatctagctagtaggttaattagtaaggttaggtcaggcaggcttgccagggctctggctttctcctagttagtagatctaagcttatatataggcaagggctcttcttgttctagtattattctaattattgcatagttacttggagtctttagatggtcttctactagggcccttagtagtaggttagagaagacaaggtctagggtatttagtctacaggtaggggtgcctggcttgaggcaaagttctagcttataggtattaagctagtctaataatcctgttatgccaggtataatagtataagacttagtatctggctaccagaataggtactgggtattaaagtcttctgctaggatagtattctctaggggtgtatattctagaagtatagaaaatatagaaggtattaagctagtactagcaggggtaactgggttattaggagggcagtagatattaataatagtaaggcctgctatatagattatagtaatatctagtaagattagttctaggagggaataggctgggagatctctttatatatatattagagtcctgggtctggcagtctatcaggttaggggactgaacagctgatattataggtaggtcttagttaggtactttactatatttgtccaaggttcttggataagaataatatctgcttcaaagaagagtagcaggttatatataatacccccccttcctatattagcttatagtatttttatagtttagggggggtcagggtttagtttaagagctcctaggtaagctgtcttgtaggctagtttatagtataagtattatctatttattatttaaagctttcttctgctttcttctgctcctgttagaaggcaagctagcctgccttatagatagcagctagagtatcttttaagaggcaggtaatagtatttctctggatataaggtctagctaggtatttttagaagtctactatatacaggctgcagcagttaatatactatatatagtagttatattcctactttaaggatctatagaagatatagtatttactagagtagtaggcttgtatattatagaagcagtagtattaggtatattataaaggcctttgcttagggcaggtaggccttgataggctggacaggccaaagagttgtaaggggtattatagcctttttagaaaggctataactgctgtaatagagtccctctctactaggtattttaagaatttggttataagtagtttaatactagtaatatactctactttattgctgatatctataattataatatctatctatctatctagggaccagagttgtttcaggatctaggagacaataacctagtaatactctgttaatatttcaaagtatctatccccagctaggcttgcagccttctttaatagtaagaagaccttgccttgttcagttatagtaattatatatcctgttaatattacttatacctgtataatcctatccagaactttccctataagggtaacctagatactatatagtctaatagcccagaggctagaggaggctgggaggtggaggaagatatagtagttagtcttatttaactgctttagcttttgttatgctagttacttagcttgtatatagtattctagggtaatagtttgccagttctcctgaccagctcttagggctgtcagggatgcctaggttataggctgcaagatttgcctctttagggggcctttgcaagcttcaggagtaggaggttagtttagctgttctatctgcctagatagctatgggggtgcaactgctgttattagaggaatctgctaagaagagtcctgttttgctagagaaataaatctagctgcaagcccccaggccaggtctcttgggcagccctgtagagaggagacagttagatctaaagctttggcaagagaggttattgctagtttccaattattaagaaggactagctggttgtctgctaccatgctgacctgctcacagattaatagggcttgcagcaaataggatatagggaccagagctgcagtaggagtcttctgtggggagaataaggcccttctcttcagggagttccggggtaggggggtcagggtggtaggtcctgaggggggttcagagttttcacccaggagcggagtccccggacgggctccgcctgggggggagtcatccacctccatggggtggagggaatgatcaatgagcaaagcataagagatcagttattagagcagtagggggccctgttctcccctcgtcgtggtgaagccagctgtcgtttcgtttcgtttcgtttcgttttattatttaacgtcactcggcggatcacgtggcccacgtgatctgcggcctcccagggggcatctggacgtgctacctaaacaaaactgcctaggaactagctagatacaggtttgaagcagcaactatggacaatatatgttggaaatgagcggaagaagcacccggcgctgccctggctaggtcttcgagggcagatgcccgtttcgactacctatagattggggggaggggccggaccctttatccaggtagatgtgtggactgtcgcactatcaagcgctccggcgggcccagttcgggcatatatccttgaagaaggatgattcttgcacgatgcggctgaattcttcagccccggcagctgtacttaagagccagtctattgtttttgacgggccgtcccttatacatctccatctatctttccagcgctttctggtgtatgggcagaagaagaagtgcactggggtcttggtcctaccacaagagcagctctccaggtagtctgagtggttgaagcactggtggtatgccgtaaagtctccgtggcctgtacgggcggcgacgagtcggccaagtacccaccggggcagcttgtgctcgcgggagcggctttcttttgtatagggtctgatattcagggctttgtaggtttcaggcgccttattagcatatgctgtatatgtctctgtacagagccactgttttgcctcccgtcataggtatgctggggagggggggatgtcggggctgtatatagaagaccctagcttagcgagcttgtctgccagctcattcccagcaattccagagtggcctggaatccagcggacctgaaggggcttccgttgcatggttaggattgaagggctttccatctactgggcggctatttgggcaattgggtgtttagtatcaaggctcatgtatctcactgctgccctctggaggatgctgttgagtagagcttctgggtctggtaggtctgcttcgcggaggagtgctgcagtaggggtggtcttgtaggctgggataatagccagggctgctgtgcggaagagagaaagcagggagttaactacccctttttgttgtttgcctgtatagaagacttctgccccgtacagagctgttggaagaacacactgtataactgctgcctgcatggaggccactgggcagccgcgctgggtattgctaagtctctttaggtgctaggcgagttgtttcccgcggctaaagaccaaattaatgtgggctttaaaagtaagctttgtatccagaagaactcctaactactgtgtatatagggatggtgtaatctcccctataccaggtagagtaactgtggggagatgctgctgctgctttctagagaagtgttgtatctctgttttctctattgagaaagggaggcctgtctctgtccctagagcagtaatttgcttgtaggcctctaccagttgttatgagctctcttccagggtattcccagttaataatatgcctatatcatctgcatagcagaaggagccctctaagatagagactattcttgctgcatatagcaggaagagtattggggataggggggatccctgggggagtccgcctttaattggtgctgtggcagtgccttctttgatatgaacagatacagagcggccagtaagccagtccttaagtagctggagtaagcctttatgccatccttgtaggcgtaagtaagaaaggagctattggtgtattacagcgtcaaatgcccctttcacatctagtaggagtagtgaagcatcttttccctgttgaaaggcctcctctaccctgtgaacaagaacctggaccaggtcaatggcagagcatcctggcagggccccgaagtggcagggggctagcacatctgcctgaattgctcttacagctatctgctgtgctaggaggcactctaggcctttacctagggtagagaggaggctaattggccgccaggcattgagttgggtatagcccctctttcctggtttcggtaacattattacctttgctgacttcaggctcagtggaaagcagccttcctccatacacctgtagtacagttgtgtgattgtatctcctagtacgggctagagctccctccaagcagtggtggcaagtctgtcctccccgggggcagacaggggtggggcacagagagcagcccagcagtgctcttttgttggcaggtgtagtgagcccaggggcttgtttaggggtccctcttctgtctgatttggaagcagggcccccttctctaagaggtgattaaggaaggcgtctgccttgccctgtggggtagtaacctgtgccccttgtatattcaggggaggagcagtgagctggtctggatgttgtatctatttagcaagtttgaatgcatctataggtgctgtggcttgttcaattcgctgcttccagtattcagcctttgcctgtacaatggccttctggagctgtttatagttggggttttgttgctgtcttgtttggtgtagtatgtctgttagttctggagtccaccatggggtcctggggagtctgcaagtattgtatcttgatgcgccttgtattgcaagctgggatgtctggaccagttgtttggctagtaggtcaattggtagggttgggtcaggcgggcttgccagggctctggctttctcccagttggtggatccaagcttgtatataggcgggggctcttcttgttccagtattattccaattgttgcatggtcacttggagtctttagatggtcttctactagggcccttagtggtaggttagagaagacaaggtctagggtgtttggtccacgggtgggggtgcctggctcgaggcgaagttccagctcatgggcatcaagccagtctaataatcctgttgcgccaggtgtgatagcatgagactcagtatctggctgccagaatgggtgccgggtattgaagtctcctgctaggatggtgttctctgggggtgcatatcctaggagtgtggaaagtgtagagggtgttgagccagcaccagcaggggcaactgggtcattaggggggcggtagatattgataatagtaaggcctgccgtgtagattgtggtgatgtctggtgagattggttctgggagggaatgggctgggagatccctttgtacatatgttagagtcctgggtctggcagtccatcgggtcgggggactgaacagctgatattgtgggtgggtcttggttaggtgctttgctgtatttgtccaaggttcttggacaagaatgatatctgcttcaaaggagagtagcaggtcatgtgcagtgcccccccttcctatattagcttgtagtattttcatagttcaggggaggtcagggtttggtttaagagctcctgggtgagctgtcttgtaggctggtttgtagtatgggtattatctgtttgttgtttagagctttcttctgctttcttctgctcctgttggaaggcaagccggcctgccttgcagatagcagctagagcatcttttgagaggcgggtgacagtgttcctctggatgtggggtctggctgggtatttttggaagtccgctgcatgcgggccgcagcagttgatacactgtacatggcagttgtattcctgttttaaggatccgcaggagatacagtatttgctggagcagcaggctcgtatatcatggaagcggtggcatcgggtgcattgcaaaggcctttgcttggggcgggtaggccttgataggctggacaggccaaagagttgcaaggggtgttgtagcctttttggaaaggctatgactgctgtgatagagtccctctctactgggtgctttgagagtttggccatgagtggtttaatactagtaatgcactctgctttattgctgatatctgtaattgtagtatctatccatccatccagggaccagagttgtttcgggatccgggggacaataacctggtgatactctgttggtatttcaaagtatccatccccagctaggcttgcagccttctctgatagtaagaagaccttgccttgttcagttgtagtgattgtgtatcctgttgatattacttgcacctgtgcaatcctgtccggaactttccctgcaagggtgacccggatgccatgtggtctaatagcccggaggctagaggaggccgggaggcacaggaagatgcggtggtcagtcttgtttggctgcttcagctttcgttgtgctggttgcttggcttgcgtacggtgttctggggcaatagtttgccagttcccctgaccagctcttggggctgtcagggatgcccaggttgtaggctgcgaggttcgcctatttagggggccttcgcaagcttcaggagtgggaggttggtttgggctgttctatctgcctggatggctgagggggtgcagctgttgtcataagaggaatcagctgcggggagtcctgttttgttaggaaaacaaatttggttgcaagcccccggccctggtttcttgggcggccttgtaaagaggacacagttaaatctagagctttaaaaagagaggtttttgttgttccccatttttaaaaagggcttgttgggtcgtttgtacccatgctccctttaaaaaaaaaggggttttggcaaaaatgataacaggccccgatcttgaggggcattttttgggggaaaaaaaagcccttttttaaggaattcccggaaaggggggttt

SEQ ID NO: 5625 - DNA, 11177 bp, Emericella nidulans
aatgtaaagccgagtttccgagcttgagatatcgagccagaatctcacgcagtagaattcgctggacgctagtagaatcgctgagcttccagaagcgatagggtagtgacaggtgtctcgggaagatgagcccggaaccatcacatggtgcaaagtatcctacttgagctaggccccttgaatacggccttccagaagacgcgtataggttgcatccattgaagtcattgaaattaggttgcgggctctgcatgtctcacgctggaatgccattcctccacgtttgcggtgggctcactggtctggctgtcttctccgctaaaaatagcttgtcgcgctagtccctatgcggaaagacactcaccgcccgtgatgccgtggccgtgggccgtggcattgaatcattgataccgtaattacgacgccgccaacagggtctaaggcgctaccgaagggttcttaacagggtcttacagggtccgtacgctggttgtcggggtcacagcctccaccaagagtatcaacagattgaactcctcagtccgcatgcagtagcaaatcgatcgagccactttctttctccgcttcctttatccaacttggcttcttccccatcttctcttcagctctatcctagccttttcttctcttgcgagatcgaaatcgcggcattacgttcccctctcacccgctgaacgatcggccgaaagtcagtgcgtgcgtgctttataaggaagtcgaactatttctttcctggccaatatattagcatttagcatataaactacggtaatcacctgcgaaacctaatcagcagcgaccatttccgacacctgtttatctctcctgtcgcctgttcctgacatctcgaactttcatcgtcatccttcactttagaaccgtggttcttgcgtgacctcggtgggttcaaccgacctggcgtttcagatggttccagcccgttgctaacttcggacaggaatttcgtctcctctcctgcgcccctcgtttcgacgatcttgttctttcctccatcaaagccgtcttctcctttccttacatgaaacttagcatcagtcaacaccgcgggatttgagagtcgagattgacgataggtccaaagcaaccacccactacggtggtcatcgaataccgatagccgatacggcggccgatcataagcatacttcatgggcgaccggtcagaacagtacggcgatatcccgccgatttcctctcaacatcgaatgcatggatacgggaacaacggcgagcccgcggcgatgccaggagacggacagcagaactggggatctggtcctggcattgcgcacacgcattcaatgcggacggcctcgaccgcaaccccggggatggataatttagggccttcggcgtagggaggagggattagcggtatcgcccttggcgttgccaacacccatgaccgtcagagtggcattgacgctttcagggatgcagacgcgacactcggctatatccccgctgaacgaggttatcatactaccggcgcagataatccgtatgtgccttcgccgccgagcgttgggcctgggccggacgaaagctcggaggggctgcgatctcatgagacttttggctcgagcgcggccttgagcgctgcgggtgcaccggcagggaactggacaccaccgagcggatcccgtcacagttttctcgatggatcatatcagggtgtagcgtcgggaccgtaccagcgacattctgcctacagctcgcaggactatcctgctgacatcaacccggatgatattcttgacgatggagatgatggttttgcggcagccccgtccaacaaacctaacgcagctggaggagcagccactggcggtgcggctgggggtcttttaggagaattctttggtgcaaagaaggcagccgatgcttcttatgatcctgttcccggcgcaggcctgccatctgtcgaaaagtatgctaaacctagaccctccggtgcgagccgaaaacgtggctggattatagggggcatattggctttcattgttattggagctattgtcggaggcgctgttggcggcacgttgggcaatcgcaggtctgagaccgcatcagaatcgtccgaagtatctgcagatgatgacacggagaccaacggtgatctcgacaagaactcggacgaaatcaagtctcttatggccatggaagggttgcacaaggtgttcccaggcatggattacacaccctggggcgtccaacacccggagtgtgacaaatggccaccatcccagaacaatgtcacccgtgatatggcagtgctctcgcgactaaccaacaccgtccgcctttacggcacagactgcaaccagaccgaaatggtcctccacgccatcgaccgcctcgaacttacagatatgaaactttggctcggcgtttggattgacacaaacactaccaccaacgaacgccagctctcccagctctacgacattcttgacaaacgctccgatcactctgtctttaaaggcgctatcatcggcaacgaagctctttaccgcgcaggttccacaaaggaagaagcgcgcaagaacatcatcgactatatgcgccaagtccgcaagcactttaacgaccacaacatcgacataaaagtcgcgacctccgacctcggcgataactgggacgaaacactcgcagatgccacggatgtcgtcatgtcgaacgtccaccccttctttggaggcgtggaggtcagcaaggcagcgggttggacctggagtttttggaactcacataacgctccacttacacaggggacgaacaaaggcaatatcattgccgaggttggctggcccagcggtggaggaaacgattgcggcgacggcgccaactgcaaggatgatacctctggtgctgtggcgggggtcaagcagatgaaccagtttatggcagactgggtctgcccggcgctggagaatgggacagattatttctggtacgtttcatccatccacctaccgtgcatcccgtcaatccttggagtcattagtactgacaggaattacaggttcgaggcctttgacgagccctggaaagtgaaattcaacaaaggtgacgagcagtgggaagacaaatggggtctcatggaccctggtcgcaacttgaagcctgggatcgaaatcccggattgtggtggcaagacggctgcatagcactttcgcgtctttgcagatgtctttctgcttcgggcaaatgcgatccattatcatggcatctttcttttatgatcactgtatcttcccgtgtgtcatttttttctgtatacatgattctttaacgtacaaatgactgatgatttgggtgctgctctccctctgtgtgtctatttgattattcctatatggcgattgtgttgctctcatttctcggaccgtggattgcttgttgactatttgtgaccggttgcggaatttcttctgtattgtcttcgtctgctcggagcgtattgcactgacctccattgttggttgcgcgcttggcttgccaatgtatatagtataatacacagctccactcgattcgggtgttctagtacaaccggtgttgtttcaatctgatggtttcgggtccaatcggtcgaacgggctgttgaatcgagctgggtccctcatgcctgtcacagtgcatcgtttggcacgacgtatgggagtggctggctgcggcggacacaggtaatatatagcactcctcgccttacctgggtaacaacaatccctgaccggcaggtcctgtagccacgtcatggtttatgataacaaagctctcgagatattatgttcaccaaacctacgctgtagtcctatccctcagctcccccctcctgaattctactggaaaccttatcttgcttctcggctccagaacgcgggaaataaatcctcatcccccagaacgccgtctcaagctccgcaaactccttcagtctgactgactccctcctctccacaaaccgcctcacaacatccgactcgatatcctctagcggcccgccgaccacaatcgccggatcgtgcgcaagaaggagctcaatatgacgccgttctgccccaggacaaaaaaggagggttttcggcgtcactttctggaaggcgccggggtgcgtgaggacggttatctttagctcgttgagtagagtttcgtcgtgggtgttgaagacgggatcttgcgcgtaagctctcattccggggttggggttctgcatcgaggtgctttctcctagcagtcattgagaagttaggggtttgcgttcaagtataggtccaggggcaggggaacgaaccaatccattccaggatactcgccaatgcagcgagctggtacattgagacggcgcgacgatcgacccaaccgccgcgcagaaaaccactgggacttcccagaccgatgcagataatcgagatgccattcttgctctgattttcgtctttatccttgacctctttttcgccgtcaccgtcgctgttgctgctgcttccacgctccgccagcaaggagggcaccccgcgcctgaggccctcaacaacacaatcccaggtcactgactcctcccatcgctgtttatacaatccaagctgccgctggaggtcggacagtgtggtcttttgtggtgcttcggcggggacaagttcctcggctatttcttctttcgcggcatctttctctagaccattgcggttcccagtcgagctcgagcctgaattcgggtttacgctcggctgtcggatgcggcgagcgtgtttgttcgttgtgacgtgcgtccagccggagtcgtctgtgacttggaggcgcttgttctgcgagggggacggttttttgcggcgggtgtggggcatattgtctccctcttccagaaggagacagtagacttgggaagtaggatgggtgggattgagcgcgattggtttagggaccgtaaggtggcggcggatgcatgctgttggccgtgggcggtgatgtataggagaggttgtgtgcctgtggtgagcgttggcgagtgtgatgtttttgcttgatagtgataagctcgcaggcttgtggggaaggcggctagcgaggggccgctattagagggatacgagacaactccagaccatcgttcatgctgctttctgaagtcgcagacgagccaattctcatttaacttttgatattaatccagatctggtgctgacgctcatttggtgtacctttcgttcgccaatactacaccactcacatcgcctctgtaagcgcccggtctgatctccgtctatttcttagtcccccaatgggcgcttgcagcaggctttccttgaccaatcagagctctccaagcaggtctgggaggtgatgcgcgtgcatgctaggcctcttagactcttctctttggccaatctccctctcgttctggcacttcgacctccaaggcgtgcaaccaatggctttatcgccgaccacctgcttgcaaccagccaagcacacctcctcagcatttcgaaccgcagtgcggtgccccttgtcgtcggctgcaggcctgtcacatcgtgatctctgctctcactcgtccagcgctcactgcagtcccccgctaagcttggcttcgaaggcccatcagacaatggcgacggtgcctcaaaagcgcggccagcccgtctcctctgggctcgtctccgttttgtcttgtccttgaccttctgccgtctgcattgtccgaagcttgtttcgtttcgggtcgaggatgatctgtatcgctcgcatcgagtgagctctttctcgtctggttattctaggcaaagcaacgtacagtgtcctggtctcttgaggtcttgaccgaagctcagtcgactcttctcggctcttggtactgctatagaactcgcaatatgttaatgtcaacgtcgccgtcaccatggctcgccgcggccatgctttgcatcggcctggcgaatgctcacaccgttatcgtctatcctggatacagaggcaataacctacacacaactgggacggttgagggagctgacggtctcggtattgcgtggagcagcgacaacgagactttgatctatccatatggaatgcaatggtcctatccttgtatgtcatcactgcattatcttccatcgatctgatgacaatctgtgctgacacctctaggcggcggcatgcccacgtcagagaaccgaacgaaatggccggtgcaagggggcgccgtatccttccaaccaggctggtttcagggccattcccgagctcagatctatatcaacattgggctgggcactgtgccgccgaacatgagccacccgatgatcacgccctttgagatcgtcggcccagacaacgacccctaccccggcacaatctgtcttcctcaagtcaggctgccggccggaatcgaggtccaggtgggggataacgcgacgatccaggtgattgagctagctcagcatggagcggccctgtacaatgtaagtcatgcccgttctcttccctagtgctcgctagaagatctaatgcggcatttagtgcgcggacattaccttcgccgaacccgaggatgtcgctgaagtcaactccacaaactgcttcaattcgtcacacatctccttcgagacaatcttcacaacttcctccctagaaaatgccggactcgaagctgtcacagtgccgtctttcctcactgccgtcgttcccacgttcctaggcatcgcatacggccttctgatggcgtagttttacacctcaccacatcctcaccgccacgattgcacctatatttatacccacacttacatctacccagacgtacatacctcgctgactggttgactggtcaatcagcagtgtcaatttgactatgaacaaaatgagctcgcgtttcatgtcattggcttggctcgatgatatattggcgttggggataccgtatcgcagctcatcatcacccggactcaccgaaagctgctgtatacacttctgcacatgcttaataccttgatttaccatacattccttcactagtggaatctgatatcgacaatagtgtataccagcttgatggtattcgtttactccagcgcaatccccttaatgtgtgcggctcgcatactattcttacccgactttactcttctcgccttttccttattcatgactccgtccgctacggtatatgtatcataaagcaacctacgccactatggcaaaggggagacacccagcctatgctgacccgaactatcccaccaatactctgctggggtatatgggtaaagcagaaaatcgggtctcctgggcagaaccgtgcgcaattgctgccgctatgtatcgacttgttagtcgcggggaacgcattcccttcctgttccactgggtgctgattcctatgatacaatcactatggaactcgaaagcatcaaggatctggagcagttgaaggacatcagtcttgggttgggcgacgcgaagcagctggactctattagtttcctgcagaaggcttagattgggtctgaaatgttgttatggattcctcgtgggaggtaccctaataatagtagtatggtggctgaccacatgcgaatcccagctgttgtgcgtttttttttttttttagttcctgtttatcaactatgtgtaattttaagatgcttgcacgtctaggattctatagctacaatggagcgatcatcattgggaataagtcaaaacatgactttatactccatattgaaggcgagatctgaaaggattacttagagactttggagatctctagatacataatgaccagaagggctttatggagctgccagcgccgctgacttggttctccaagcaatgttgccaggccggggtttgggccggcaccagtaaaaaacaactgctgtttaataagccattgggacggcacagatttcctggctcattgtactgtcttatatagatgtcgtcagatgctgaatctcgcctgacggtgacccggaggactcgtttattaaactgagacgctgccaactaataatgctacggctccgccgcttctaggtactcagaatctacttcaaagacaaaaaggagcgagagtgtatacactagcagttatcagccattctggtaccgtcaaggcttcataccattccctccactccgcgctaattcttctttcaactggcctcgatacaataggtatattcaggccagaacccgctacagtcaccattcgacacgggattcaactcatacattgtttccaaggcaacaccatagtttgtcgccatatctgcgcaatatatacctgcacatctagatccttgaagccgctgcttgtcatgattgaaactgggagaactgaagacgtacttgcactgggcaaggaaacctttctgcgttggcccggcggtgtcgtaggggttatggggcaattttcggtacttgttggaggcgttgttatggcagaggttgatgttggcgttaactcggggtctggatagtaagtatcttcgtatccatcgcctcaaatgcagtaaaggtattcagcctcaggtttgagcagtcgtcttgatgctgggctatggaacatagcatagtgagcatgcagtagacggggtctgaaactctcttacattccatgcgtagaacgcgtcgagcgcgatattggcatcggcaggacagtgtcacaggtatctcctgtattgcatgagtgttggctgtttcaccgggattgacagcagatagttgctttccttagtttcgtatcattcataacaatcgttggtagagttcggcgctgcgttcagaagatccacatagtctggctccagagagtccttacccagaagaaactcatctgagagtaagcgcagtattgggtgttcttggtcaaaagtgcagttccaccacggtagcgagttccagtccgcaaagtggctagtctcaacctgtcccgcgaaccaccagcttgggatgtcgcccgagaataattcttgtatacgttgcagtccttcctcataccagcctagaggcagtttggttggcgtagggaggagtgtccagggcgttaaaatcgctggaggtaagtcatcgctgtcgataactgtcaaaagtgtcattttatatggaatacagaggtggcccgctggcttgtaaggcccattcattactgaatacgttatatagaccgattagttatcgtccctggtcttcaatccctcatcaggtatctcacgtcctacaactcaaattttcatgctgcatcgccttccaccagagctctgggtgcaaatcgtctcatacctggaagaggatggcacgtccctcataaagtgcgccgcatctgccgtcaatggcagcctatcttcgagcaactgatctaccgttctgttgaagtggagagtgagcaactgcagccaggtagcaggttactatctttctcacaattccaaactctcgtgtctgacgcaaaccggcgccgacgatgctttgtccgccgcctgcaatatacagttattatgccttaacaacttccaagctatgaggcgacgaagcttgagagttaccgtgagcagaatgcaatgcgagaggcaaataatcaggcctttggaaaacgcgtatcctcattattcgaattcctagcttcatggaaggagaacctggagcttaccctgctccttacagcctgttggagagacaagatgcttggaccagaaacagaagaaacagcgcacgccaagcgatggcaagttgagcttgatggagaccgggttattgctccataccgcgcgcgtttcccgccgatgaagctcccatactgcctcgggttacctgcattggccacccgtggtctgaaaccaagtatcaggggatttgcaatagcgccgtgctacagattgatgaacactgtgttggtttgcagcggcttcgtctgcacttggcaggctggctgaggccagatcatgtacaatatatgcgagagcgcagacaaggtaattgctcttttactactttcaagattatacatgccttgtgtgaacccgacttgtatcacacagttgtgacgtcgggtcttgtaaggctcccagcaaccctccgggcttttgaatgccttggtacccgtgaccatccctggtcaaatacccttcctgccctatatcttcggtccgccagcaaagttgatgagctctcgtcaagtttgcgcattctctcgtgcaatctacgggaactgaacctcggcgtcgtgtccttggatatggattttctctttccattagacgagggcggcaaccccttacctactgcatcttccctttactggccttaccttgaaacaatcatcctacacgcggttcccgtaaatctcccatctggtatgatttcccgccctctttctacgcagatgtcctgcaatctaacagatcttcctcacaggcgaatgactatttgactacgaacttgaagtggcgacgaggaaagtttccccgatccagccacaggcgacgagattttcgagagcctggggggcgggtacagtgtctcgaatgaacaccgagcatttccaccggctgtccatttcactgggctacgcgcgaggcggaggcctgtattgcaaacaatctccttcagcctcggcgacttgcccaagaccgagttcagtttcgatagtggcagaacacaaggtggtggtggctctatatgtctagtggcgagaagccacgtttgaggttcctgtctgaggcagcgtatcggcctgaccaacgggttgcggatgcgtgggggtttggtctcgatgatgtggttgtcgaagaggaccaggtaggagaatcgtatcatttggcggtgtccttagtttgaatcggattcatcgggatgagtagttgcccagtaattatgtgaggaggcaaatcatagttcagatgctacatacatgctttctgtgtcatatgggatgggcaacaatgtaattgcgcactgttctatacatttgtattcatgtgtgcagggaaaatatactcatttcttaacttatttcttaacttgagaggtatttttggagtaatagccagaaccaagctattagagggtccaacggatcgacgtcgattaggagcaggtgcccccaatatagcaatgagcctgac

SEQ ID NO: 5626 - DNA, 11345 bp, Emericella nidulans
acgcagggcaaggactgtaagactcgagattgactacttgggcaaatctaccgacgcgcttgagtatgtctgggcagtggaaggaatcatcggttttccacctatatgcttcgaccttcaggagtctagagggccctccgtgcgtggttcgctgtgccttgtgccttagccttagggcttgcgacccagtcaagggctcacagaatttaaataataatagtggcgacggttctctcttccttctccgtacggagcgaaaccttgggtcggaccgttaaagcctggtggatgggtctgactctggggcaaccgggccggctaccggaatggtctttagtacgacaagagcaaggagcatcagcataatagacgattcatggtgtataggatcgagagactcgaagattcgcctacgatccagtcgcgcggccatagtcggagtacttcgtggccgcgaactcgccacttccctagtgacaaaccttctagaatgtcctctcggttttccatgcagaccaagcctgcatctgggccagtcgttcctttgctgacaagtggtcggtgtgacaccgaaatgtgcggctggccagggaccggatcgtgcacgcccgctgcctcagcccgccgttgctgtgagatcccttgagttggactgtccaggaaaatacaacatacctcgaagtactgagtagtactcgtacgtgactagtgcggcgttgaaaagtattaccgaagttactagtcaggatgggggtttttgtttgatgttaccatcccgcgcagatcgggggaacggtgaagcggttgacctcgaaacaccacctccagccgtaaagagaagaaggccacggtctcatccgactgatcaacagaaacagtcccaatgaccctgtcatcttgttacattggaagttttacgtcattggtcacctcggtcctgaattcttaagtaacgtccagcacggatcttcgatggtaaagaaaacggtgccggccctgcaggatggcgtcacagctactgtatcggggcatctgcagcgcttagatgcctccagggctaggcactcgaccgtcggtcatggggtagaccgaactcccaccaatcctagactccccaagacacaagtcgggttggctcggggcacctcgattatccaacctacaactaagtctcatcttgatgttcagctcgcggttagactcccactgactgtcatggcgtaccagttcaattttcagcctctaccagtaccagatctgcacagggttatacggggtacggataatgccaacccctaaaggtcaagcgtacagcgatcggaattattcttttccttttctttcctttttttttcctttttttttttttttgttggagttcaatcagtgacacaaccacctgcgttcaatggccagtactccaccggttctcccggacaattaacaatagatacacaagatccaagtttttactgcagccaagttctttcctccgggggatcttcgtcccaggcctcgatagcttccgcagggtctcaggtagtcccgcttcgagggacgctaacaatacgccatgtctggatctggagattcttgtcttttatggacctgcgttccgctagaataatatccggcggtcgaagctaggaagactgcattcatacctgattctaccaataacgttaacaagaacatatcttccaaccattcacccggccgttcaaggggcaataatgtcattattaattgcctgatatggaactgcccaccagtgaagcgagtcagcagcgtttggagttgacggtggacactccggagattctcagccaacggaataagtccgctttgtatgtgctgaccctaagtgcagtattccgtttcccgtgtcggcattctcagcctatctaatcgttatcacggcgagtcagtacctgcccggcttctggacgaaccaaatttactattcgaccgtgccaccgacggcaattcctcatcagcgtactgggtaggtgagacctacttggcctacctttgaagaagacagcattttattggggaggcgccggtaaaatcccgcccactgccgctcgccgcagcctcacaaatgctactaggtaccattatattcgaccattgtaatcgctactcagtcaaccatttcgtcagtaaaggtttgctctatctactcgcaaagaattgcgatctcaaggattcttctaaggcaaataccgacagcaattgggacaagcccaagcgcaccacggcacatattcggtgccatcccatcaataacatccgtcgtaaagtcttcgctgaaagagaccactcggttgagtcgcgcaaccttcagcaagatatcatcgccattatttgcaccgtcatgctcgttaagtgaaagcccgagccggcgtgtccgcgtgtgtctgcctgatattcaccctcgacctttttgatcaatcgcgcacagaatttacggacttagcgacttcggctctgcttagcttgccccggcgtttttgccatttcactcggtcagtcctgtgccgctaggctggcgcgcttatggttaaggtgggtgaatacgcactcggtttgacatatttgaaagcaatatcaaatcccgcaggttcctccatatcattcagaatgtactcgtcgcatccatggacttgatccagcgagctcttgacaatcatgagaaaccgcgtataccagcccgtgatcttctgggtgtgccattcgatggcatcgtcttcagtacaatggcccctgattgacgcgcagatagtcagcgccgcagaaagcccgccgttcatgacgaggtgaacgccggaggagaatagcgggtcgacaaagcaccccgcgtatagatatgcactataggaccaatctgatgtagttcgcaggttgttggattgcagttgcccaccgccgagaaggtcggcgaggaccggtgttttcttaagcattttgaggtagaagtctagcgtcgaggtggactcacatgcctttttcttggccccgacccggttttgcctgatagcgatccctacggaccatgttccgtcgtgcagagggaataccatgcccagccacttccatctatgctcgttagtcaagtcagtttcgagttcaagggttcgcgtaccctcaagtgcctcagcgaatgcatctcccactccagggccgtacgtcttggctccagtctaataaccccaggttgctatactgcgtagccccggattgtggactcggttttttagatacttggtgcttaccaacccagcccgtctagatgcatcgaccagatattcaaaatagatcatgcctaaatcagtcgaaccattatctttccgcgtccacttggcagaaactggccgaccatttgaggtattgtactgaatatcctctctccacaccatcaaaacctttgcacgctcttgcgggcatgcttgaagatgagatcgtctgcttcggaccgaacgacgttccagctgtggtggcccgcgccattagcagccaggaagtccgcgtctgaagatggtcggcagaagaagcatgctattagccttcttacatacatccaggctttcgggagttgagcttgaaactagctctcgttttgcatggaacgcacaattagtcttcaaagaaaggctggaacaaaatctgcatgtttcaccttgcgtatgaatccgtaactgtcaaactcatcgtatagatcaatgaagtcgaggtagtagcggacagacggcaaggggctctttcttatatgatacctgtgaagtaatagctgagcatgccgagctcaccaagataatgaagcgggtactaggtgcttacctaggaaagatatctgcctcaagcagaacgacgtctatgtcctctctggcaagcacagaggcagcatacgagcctgccgaaccgccgccaatgacaagcacaagtgcatttttcgggaatagacatgacgtgaggcggctcagacgatgatgaaaggtatctagaggttctgaacaggaagaaacaattctggcggaccaacccaaagtcactctgggcgggggctctgtttgatagtagcgtcccaacaactcgcccattcaggaaaggcagcggccttggatgcagaactagcagggatgcaatgcgattaccagagtaccgccgttggaacctggttagaggcgtcggctgagcgtctgctggaggcggggtcttccacacttggcccttccaagagagaggcaaccagacaaaggcttattgcgttgtttcttgttactggatgtggttgtagttgcggcaacagtctctcgtaccgagtgcgcgagctcacgtgtggggtcgttcttctccctcgaatataacgcggtaataaaaagacgaagaggatatttaatgtggaatcagagaacatgaggggtcatctagtccctcgtagccgacttagtgaccttggctgggtcgacaacgatggtacaatattggaggacttgaggacgatgattgcaactgaatctccatcctgaattttgacatataccataaaaaggcatccatgaggcccttccgaggtggaaagaatcaaacttccagcggcgccagtgtgcatagcagtagccctagaacatttagagacagacttccacgttgcactgaggagcaaaaaaagagatggagaaaaataaaaaaagatgtggacacgccgggaatcgaacccgggacctctcccatgccaatggagcgttatacccctaaaccacacgcccttactatgcttagtcattttcttcttaagtatatggctgaatacatatacagttcaatatagcagaagcatcaacttgtctatatggttacttcgcctacggaactgaaatgtatggtagtaaacattgctatagtccatagtcagtgcttgaagattgatctgtattacagcgagctaatgggtatagttggcgagtcaaggtattgctttcagcgcgagttgatagattgatattcaggagacagaaaatcagaatataacccattgtccaaccaggtagccgtccagtaggtaatattacatctagcaggtattagaaatgccatctctgcggatttattgagtgtatatccaccattaccatgcgggtgttgtgcgaaactggctctcaaacagatagacaggtgaatgcctctcatgaagggcccactgcctgctcgcttgagtaacagcttctataaagcgcaaaaagtctgctagctctttgtaagtcgagtgctttttccctaaaaaaaaaaaattaatgttcaatggttgccctatgtgaggtggtgggcatgcatccacctttgacgctcgcaatgtctcaatcaggcaactgtacgtgattgcgtcaatagcttcacgtacgaatccaggggtgctatgccaatgcacaggacgacgatttaatattgaatcccggtccttgagaaggattttcgaagtatgaaccgacaactgccaatattccggaagggtcctacccagtaaatagtattaatccgcccctggacgcagaaacaaaaagccgggcctccgcgatcatccaaaagaactatatcgtagctccggacttcgtcagattcatgcgctctgaatatctgcttcatgtcgcgcgattatgtttgctgagctctactcaaatcgccgaaagcaggcggcgctagccccttcaaaatgccccccgcccaagtcgtttttagcctgtaaaaccttgcctgctggcctccgcgtctcctccgtccttcaactcccttccatcatccggagcgtcgctccaccatccatcaccatctcgtacgcgtctttctgtcgcacttggcccaaatgaattctcgcgagcactctgatatgcctccggcaccctcctacccgtcgcccaatgcggcgcaaatgggtcagggtacgatgcagtactacacaaaccgtcagttaaccaccgacgagctcctatccgcagagctttcgcgcgaaaactctgggcccggcatcaatgacggctcgagtaatggcgttcatcacggccaatcgatggttttgggctcgtcgaacgccacgggcgctgacatcggccgtccgccttctccggatcagcaccaacaacagcagcacatgctttcattcccgccgagccaacaggtgggcgttgatccgaaccatgatttaagctatggagaccacatgtgccaggcgaaacggacgaagatctcaagggcttgcgatgagtgcaggcgcaagaaggtacgtgccttctccattgtttttattccttccttgacgcgacagaccgtgtataatctaacattatttccctcacaggtccgctgcgatgcaagctccgaatctggtgtcgagacatgttcaaattgccgccggctgggcgtcgtttgtcaattcagccgtgtcccaatgaagcgtggtccgagcaaagggtaggagagtgttgtccccttcgggatcagtacgcttacacggagatatagatacattaaggaacttgcagaacgattgcataccctcgagagtcagatgcagcctgctatggtccatgccgacatgccgtaccagccgatgaacgaagcgccgtccccccgcgcgtaccaggacttttcgtcgccaatggataccggggccatcaaccgcaagagaacatattctgtatttgacgggctgccgagctcgtctattgcgcaaccacaattcaactcgcgccttcaaaatgcatttggtcagcctttaatgcctccatctcatggacccagccactgactccactagatgcgggtgaaaacgcgacagatcctttcaacccggcggtcgtcgctggttcagcgccgaaacctggtaacctcttctgggctggcaatgatagcgatcttcctgccggacttgacattcccgatatgccaaagcacgacgaagatatgacaccgttgagtgtcgacgaaggtgctctcaatgcgtaagctgctttctatccactagacaatcatgcgtggttctgacagcaaatagttactatgagaaggttcactcgatccttcccatactcccaaacacgaaggacagattactggggcttcttcatcaatgcagtcgcgaggtgcaggagatattcctgtacagcctatataccttgacgcgagtcgacatcgatcgcctggccggcacgtttgagagggttacatcgtatgacaatgcgcaagaccttctgctatattatactcgacagccggccctagtgcgatcgacaggcgttaacctaatatggctacagagcatactactcatgatcctcgattgcgattcgcgaggacctgataatttcgtgctgaaggatggcatcccaaagcagacattgatccaatctgccaccaagctcggcgcggatttggcgaaaagcctcggccaattgaaggccaaacggactacggatcctgatgttgactcggaagcgaacctcgctaggcgtagttgggtagctttggcaatcctgacacgctggtatgctgttagtgtcgctgacacaagtgttctcggaacgcatgagatcggtggtcgtgaggatgaaagagttgtcggtacagtggcagcagggattgcgtgtacgtgcaatattttcgttttctttgcccgcaatatcatgctaactcacgacagcatattccagctttttaagtgaaatcctcactctagctgcagctgaacctaatgtctgccagtccaacactggcattgggcgggtaatctctgcgaatttggcagcttcattggaacgactttctggacttgatgattttcgaggcacttccgaagatggctcctatggtttcgtcgagagtctgcagaatcagttgtactggacgaccagactcctaatcaaacgacacatcttcgtctacagcccctacgaaatcatattcagtgctgaagaggtcatcaatgagttacacaaggcgacgacacagtctcgtcaatctacccccttcgatcttcacagtctggctttggcaacgatgacacttctagaagcgtccgttctcccggagcatgcgaatgaatgctgggatgctctaagtaaagttgaggagattctcgacctccgccaaaagcgcgctctgcaacgcacagaatttggtgatatcttccacaccgaaagctgggatgcgaagatccgtctcttcctcgaatggaggcgcacgaaatcgcaagaaactcagctccacgatccgaaccttggcaaagccgagtctgcaccgccccctgttgttggcccgaacgaacagcgctccctccagcatcttgcggaccttgctgtcggtgctgagggctctgtagcggcaaatgcatcgccgccacctccctccgccattccgtcgacggagaatcatcacatgcctgctgcatcgccaaatcttgcttcggccccaccgccacagggccgcatagtggtcgatttcaccctcctgacgaaggagggatatctcaacgttttcgccgggttgatctatcgacggtctcggtaggcgtccgcttagttgcgggtaaaattggtacctcgctcatcttgtcttcaccctctccagcagagaaaggttgtcacttctctcgatattttcgaaacgtccatttttcttctaagtctgtagaaaacaaaggatcgatctcctcttcttgcaaactatgtatcacgctgaactctgtactctagctattcatcctgattttacacgagctcctcgattatattcttactccgtccttctaaaatattctaggtatcattaccacaatctgaaattggaatgatgcaatttctttcaaatctggtcattttatatcagttcaatcatctagcttttgtcttgcgcataccgccataaatgaatcaaatccgtggcatagcaattgaaaaaaaaaaaaataatgtgtttagaccacccatttccccgatcacaatgatatggtactgaaataaatcaaccttataagcatgagccagcaaaagtcaggacaacagaaaatgcgaggccggctagtggataatctgtttaccattctcttctctcacccagataataccgctcggcaataccttcaatatcttcacaaagctggaggaagttgggatcctcaaggtgcgcacagagccacgcttgtaggctcgcagttcggtctgcagcgggctctgacgtgtatttggccaagtttgctggtgctgggaggcctacattttcgaaagggactacgggagtagaagttgtcttcgccgtagctgtagtagttgtggtttgttgatcagggctcttagtcaggtcttcgggaggtgctgagggtagtacggtatggtctttcttggggggttttctccctttcgcagcgcgtttggttgaagccgctttcttggttttggggggtgatgatgaggcctcggcggtacctggttgtatagtgcagcggttagtgggatgttcgagtatacatgaagagtcctattacctgtcccgggatgcttgggagagggtttctctgctgctcctggagatgagcgaccccgtttggctgctcgactggagaaaggtagcactctctttggtggcaagtctagatctttgaagcatgtggatgtgctgagccggttgcactcacccgtagcttggctagggctagctggcggtatgttgtctacctcattaacagagctggctatggaagtacatggtcttttaaatggatcggcgtctgtgttcgagggctgaacattgggccttgaggatgtggatccgaagggcgtcctggagatgccacccagagtgctgatttggcggcttgtgctactgattgtcgtagagcctgacaacgaggtcggaaacactgcatctgtagtccgcatgtacttagtctgaagaccttcctagttataagtttggagcgtacctgaagggtgtgcagttgtgctggatgtggtagctgctcggtacggtagtgccatgccaataactgacgtggaattctcagttacggtggaagggcagtgctgtgaccgtgaaacaggatcaaattgcccaaggttcaagagcgatgaagttggtccgctcattggccgcacagagctaacatttgactccgcaaaaggacagttgatgtcgcttaaggtagccagtacagaatagaaatcacggtcagaggagaatttgacttggaaacgtcgaacctggattatgtgagttaaacattcagttcgggcttggacaatgaacgaacgtatccaggtccttggggatatttgactgcaagacagggaagttttacgacaacggcaaaagctggccgcctcgaactgtcttgcgatcgtctttgttcttcagattcctttaccaagtctgttatgcctacctcctcctttcgtttgggtttagcagagagatatatatatgcatattgtaatagctccaacttcccagcgtctcccagccattatgagcaaccctaaacagtactctcgtagaggacagcgccgcatagctctcgaataccccgaatagatctccattgccaaaaacatggctccaagtcaatggtcctctgtggttgatagatagggtggtgtaggagaatttcgcgagctggaaacgggcaagcgttgtgggctcatgaggttgctgggagaaggtagatcgatgcattgaaggaactgtttccagtgactagaatgaagatggatgatctgacgatgttcctgatgaaattgttatccaaggtgtatggcagaaacaatcaagtcgaactggtccaggcaggtgacctgggccattgggtgcaccctccgctagagcagcatcatggcgctgtacataagggaacctgaattccagataacagagttttacagcagtacgacagttattttttttccccacaggggacggcggtttaagaataattgtcattaaaaaactatacttcgtattgattgccttatgtagactgttcgccttattgcctcaggcaaacaaagacactagcctagaatttgtatttccgggagatacgataatccgatacgcgcctgagggccagcctagtagcagcgcggactttttgcctggaaatgccaggaccgatcgatcacagggtcaagctgcttgccggcatccaagcaattgaactctctatttggaaaatttgtcgccgtcgcctaacgagccatattatacgcgcccgtgatattcctcaagcttcacgtgcaaaccttccctttggtcttcgtggccgcaatcgcaacctcgaccttgacttgcgatagctt

SEQ ID NO: 5627 - DNA, 6911 bp, Emericella nidulans
tcagcggcgagcctagtctgagactcctgcgtggcgatcgcatgcgcatgcaaggggacgcacaggatggatgtgatttctggcggcgaaaggttatcctctaacaggtcggagagggcctccgcgtccagcattttgatatccggtagaccggggatcatggtatcgtcgtggtcgtagcactctccagctacgatgtcttcttccgagttgtcgtcgtcgtcttcctcgtccaggacccaatccttaggtggtgaccacaaacagtcttctgggaagaagaaatggttatcccagtaatcctgatcgtcgtgttcgtatactatagggtctggtgagtagtcaaggaggtcctgggcgtatttgacttgactgcgtgcccagtaaggacgatgatgggggtcggcaaagccgccaggtttagagaaaccagtgtgcactggatgcttgaattcagccattctgccgtcaagtgatatgggaatagcagcaagatgggagatcaaaaataaagactgaaataaaatgagataatatgagggagattgctaggatattatagatgtcatcgacggataggcagagatgtagactcaaataatgaaagtcaacagtcaacgtgacacaacgctacacaagaaggggggacatcgcctcttttctctcccagctgggaatgagcagggaccgccatgcaaggcaagagtcatatctcccagtcagaatcggcaagattgagagccaggcgcgctgagttggttcaagaacgtggggagaggctgggtgggggggcgcgaagctagcaagccaaaggctgcatacagttgtcgcagcatcgtgtctgacggcaccaaatgagaatgagggatagggaagatccggggaccaggagcagaaaaagaaaaccagagcgaaacatatagccaatacgaagcgaaactcaaaaagggccagagtgatgtgcaatcgggcagaagccagaaacgacggggtcgaagagcagaaagatccacgaaccttgcaaactgcccacctgtgagagctgacgctgcgcagcaatataggcagagttattgcagccggctgcaggcgatgataatgtctagtcaaaagcggacggcggtcgtctaaatgttactggaagatgtgcagagtgagactggagtcactggactgtacagagctggagcaagtcgaagatggagctagagctagcggagatagactagccgtttatggaaaagcgcagcgccgctttaaaagtcttacacttctctggcaatcccactccagttttctctccgtctgtctgcacaagacgaaacctggaataactcaacgagtcatcatatgatcgcccagctgtcatgatcggcccttctgcgctcgggaccctgacttgaaaagaaaaaagaaattacgacagccgagctaagcgtcgtattactcagagaatgagtaccgatgactgttgtcctcgcccggagcattcctcgcccaataatgaagcccgtcgcatcgctcttgctcccactgcttgcacgagcccaacaagacagggcgacacgattgcgcatctctggtatcgggtgttggatgcggagtcagtggtggtgagccatttttctcaatcgtcaagccgtatggtttctttttctcttttccttcctgccttgcttccttgctctaaggctctattatgattgtccgagccgtgagtcgccagtgagtcgccagtggctcgccggtggttcgccctggctaggggctctggccctgccgtctcccgttctcccgccatgccgagggtcacgtcggttctttctcagtctggaatagtctgaactggcgtcgagatgtcagattgccatgacacacaatggagcatggactcggcatccaagagacttgcgttcgcttcctgtaaggtctgagctgggaaattggggacacattgggccatgctacgtgttgctgacgggctttccagaaacttgctctgctgagtactgatcaccaaccagtcatcagacccgcagccccagttcgttggcagtctcatgcctgcagccagtctaggatcacgttctgcactatgcaaggccgttcaaggattgcctctgggataatgcgggacgtcatccgacgggataagccttatttgcagtcagctgatgcccggcttcgttaagccatcttgcagtagtaatcaagccccaggggctcatagaagccatccggatcggtaaagacaaatgatgctgttaaagttcgacggtccaggtggattcacatcgccagtcccccttaaatgagctctttgatctgtgacagcgtgcgcggggactggatcctcgaccctgcaagcccggacatttgttgtcactccgctaatatttcccgtttcggcctttctgggtgcacgtgggctcaaggaagtcggcggttcgttacatactcgggacgcgcttagagactacacgaaagcgctaggccccagttgtagtaccttccagatgcagtaagatgtgttgggtatgggagatccaggctccatctgtgctagttgttttgggacccagctatgaactgaaacgtcgtctgtgtctggcgtttcgctcggtcagcccgaacactgcggcacggctaaattggaaaactacccactagactaaacagtccgcttcccgcgactctcaaaaggtaatgataaactcgtgatgatcaacgccgcatatattccagcacagataaacaacggcactgtcgtctggacattcgcaaagctcccgaccaaaacacccacgatcccacccactctgttgaggactacacagagcccataccccgtcgctcgatgagaactaggtaaaatctctggcgtataagcgtatattgtcccgtagtagatgttagatgccgccgtgatggccgctgagacccccacgttctgcgctggcgtcttgatctgggtatagccaaactgcagcgctgtggtgacggcggcgccgatagctagggttcgtcggcgcccaattagccggagctcaacgaggacggccgcaatcacgggcccaatcaagcctgctacctggttgatggcgtagttccgccaagtagtgtagttggagttgtcgccggtgtctgcgccgcgggattggaggtagtatggcagaaagacactgtacagcggcgacacagttccaatgagcagccagttgatgatgatcattacggtcgaatatgtcaacttctttgtactaaacagacccggtgaaatggcttgccaggcgcagagctgaaaagacggatttctctgtgccctgcacacggccttgggatgacagctcctctagggtaagactaaatggacggttatatttcttggataggttggaaagaatctcaatcagctcatcgtcacgattctggctcactagccacttgggtgtctctgccatgcggatcagaacaaggcgcaagatactcgcaacaagtacgagaccgccgcaggtaatatggaggtatctccagcccatgttagcggcgcgggtgcattcggcaacagtagcatcaggatggcagctataattgctcatgaaggcccacgccagtaagccggtaattgtgtatccaacggcccaccaaacggccaaaaaggtcacgagccaggagtgagataccggaagaaactccagaaagttggttgcatccaagacataattcccgcctgctccagctgagtatattgcaaccctgaccgattagcccattaacaagaagaaagggatgtgaataacacacatggcgcagaaggagacgtagtttggcattccgccagcaatgagcacaaatgtggcgcaaatgaagaggcttgagttgaacgccagcttacgcccgatgacatcggcagagaagccccaaacagcagcgccgactagaagaccgatctgcgatgcaagagccactccagcgatatgcttgcttggattgccgaactcctgcgtcacagctggctgagcgatggactggcagacgacgagcagctaaggatgtcaacattcaagagtatcaatcagtcgttagtgagaggtataccgagtcgaccgcgtatccgaaaccattgagaaagaacagtttccactggaaaggagtcattcctatctcatcgtttgcactgttgaccgacgccatcttcttggccaaaacctcatctacggttgccagctctttctgtaagctggtatcctcaccccctgttggcggatgattcccccccacccttgactctgtagtaaaaggatttttgataagaaacgacatggcaaatgaggcgatcgggatagagaaaatgagatctgtaacagataagtctcaggaaccatcagtattaccctggtatgacgaatctgatcctagcaatgagtgatcgaacgtgctttcatgtggcgatgaggtgatgttacttcctgataaacagaactaaacagctaagtataaaatattcgaagcttctaatcccggtccagcataagcgtaatctgaaaaggagattgaagccgagaaagcctcgactatttttaacagagggaggagcgatgagtgcaacccgccagtccttagcggtgaggtataccataatgtcaagtacaagacactgcggaagaactgcccgaaaccaggtgacagaacctaaaagcatacccatcttatatgctcacatgccttcaaaaggttccaggaaacgcatttagacctatcgtgctcgtcgaacagaggagaactttggaagggaactagaaggctggacgatcttcatcccacctaaatcgtgatggccaggccgtcgaaacagtatgcgggaacactaaatctatatctttagtaaatcgagttacctcgacctgcagcatgaccagtgctcaaactggcttcgcagagaaggtcgtcagcgcatcaatcttccggtacaagaaactcagtccggagcatcgtgctggtagccgctgggtagggccactccatctttgagggtcgggctgacaccaatttaaggaggtcttctgttatcgaaaaaagtgaaaaaaaaaagggctggaaggtcagctcatattttcgagagaaggattgtagcacttcgcccttgattggtctcaagagctaacatcctcagcataacattcgaacaaagtagattgattcatcgccatgtatcatcctaggacgtataggttaaggccttccacgcgggacatatttgagatcgatgttcgtggtatgcgctcttcgcacatccactgatgtctttgcagagctccattccaatattttcatttgaagtgagcctcctacacaatgctcaggttggtgagagcactgggaaatgtttcattcagagcggctcatggtcgagaagcttccgatatggtggtgacacgatttcgccagtcagagtacccctttcagcttgggatgcatagtttagtgactctatacagcagttgatgtagtttcgatctgattagtattattaatggttgctgtcggagtagattgctgtgggcggaatagcgtcatagctcgtgcaccccaccttctcttctcttccactcgtgggcttttctccaactggcctgcaacctcaaaacccctcactatcccttcatgctgggaaaacgctctctcttctctcccgtcttcctcagggtcctcaaccccagattttccgtcctgccaagttcgtcattcatgtctaactcattaggggttccccgcttgagcagttgcagctgaccgtgtcatagctagtagatctctcgcgacaatggcgaccgatacatccacctacaagctcaaccgtgagttttactttccatgttgctctcacagactccccaactgacaatggcatttttacctcctagataccatgcttcgggtcaaagaccccaagagatcgggtaagttcaatccggaattgcattgcttggcgtacgtaacaagccggacctatcatctagttgagttctacaagttccttggcctgaaccaagtccaacagctcgacttcccggacaacaagttctccctctactttctcgcctacaacgggccccagtccctccagggcgaccgtcactggacagaccgcaacgccgttctcgaactcacccacaactacggcaccgagaacgaccccaactacagcatcaccaacggaaacaccgagccgcaccggggctacggccacatcgccatctccgttgacaacatcgaggcagcctgccagcggctcgaggatgccgggtacgcgtttcagaagaagcttaccgagggtcgcatgaggcacattgcttttgttaaagatcccgatggctactgggttgagatcatcaagcgcagagacgaggctatgagtacgtctacggatccggcgacctacaggctgaaccataccatgctccgcgtaaaggacgccgaggccagtctcaagtattaccaggaagtcttgggtatgacgcttgtaaggacgatcgagaataaggaggctgcgttcaacctctacttcttgggatacccggcgtcgaacccgcaggcgactgagggcgccaataatccggttgccgagtgggaggggctgcttgagttgacgtggaactatggcactgagaagcaggagggcaaggtctaccacaacgggaacgacgagccgcagggattcggccatatatgtatgttgactactcatcttgcactcaatatcggctctaacatatataggtgtctccgtggacaatttgaacgcggcctgcgagcggttccagtctttgaaagtgaacttgaagaagccgttgacggatggcccatgaagaacgtcgggttctttttagaccagacggatactggatcga

SEQ ID NO: 5628 - DNA, 14930 bp, Emericella nidulans
  unsure (1)..(14930): unsure at all n locations
aaggttcgggcgcagcggggtaacgcctgtaagagtaagcacctgttatcatgtactgaaagagacgccaataaactgttggcaacataccaatggcgctcttagcaagacgcgaagccattgtagcgatagtcagacctttacaggatgtgatggatgaacggaattgaggagatcgatagtcgggatgccggcttgtggcaagcccgctagtcccaatacggtaatggtgtggttgccggaaaaacctctaccgaggaagtgcccgaaaaatggtaagaatcgagataaggaattcaccagcaagagcattttttttgtcctttctcgagtcggaaacggcaattcgcgctatcagccaggatgcctgcaattatcgataactcaattgcctccaagaagcgaaagggctccaaagaaagcggtgttccgtcctccaaacgtcgagccgttgcggaaaatgcgagcgcagagtcaatggccaagatccagcaactggaagaccagatatctgagtccagaaaaaattacaacaatattgcaacgcttctatctatgctcagcgaagatggaacaagtgtgaaaccgaacctagcagtcgctgtgtcgctgtgtcgagttttcagcagattaatcgccggtggaaatttgacagtaggggagcgcgccccagagaatgagaaaatcgtcgtggcctggctgaaagagcgctgccgggaataccagcggttgctggagtcattcatgcgtgaaagtgatgcctcgtctcaggtaagttgcgcattttgtaaagtacgccaaactcagggctaacctcagcagataactgccctaaccttagccatgcgcctcctcaacgaacgtgctacgcatataccaggtgacgatactcaagcgtggacatcaggactcttccgcaacatctttgaagccgtagtagaggcgaaagatgggcaggctttgcggtctgagtttctcgagaagttcttgaaaccatacgaggacgtgacatactatacattcatgcaagttgggtacgtccactcacataatttaacacctcatactccgatgtgctaacacctccaatagtgaatacgcgtcaactcctcgcagcaccgagattctggaaaccctcgttacaattctctcaacctgcgacaccgtcccgggccccgagcacaaattctcaaacttctacagcaaagtgagcaataaaaacaagaagctcgtctccgtaaattcatacaaaaagcgtgcacaagatgcctggctctccatcctccgcaacgatctctcccaaccgctccgcaaaacccttcttcgcatcatggttcaccacatcgagccctggttcaaccgcccagaatacctgatggacttcctcacagactcttataacgtcggcggcgctacctcactgctcgccctatccggcctcttctacctcatccaggagaaaaaccttgactacccgcaattctacccaaagctctactccctcctcgacgccgacctcctccattccaaacaccgttctcgcttcttccgcctcctaaataccttccttgcgtctacccatcttcctgcaacgcttgtcgccagtttcatcaagcggctttccagactagcgctcaatgcanccaccagcggccgtcgttgccattgtcccttttatctataacctctttaaaaatcaccccacttgtacattcatgcttcaccgcgttattcgagacaaagagttccaggccgagctggaagcagaaggcatggatgacccttttgaccccgaggagtctgacccagatcagaccggcgcgatcgaaagtagcttgtgggagattgagagcttgcaatctcattatcatccgaacgtagcttctatcgcgcggatcatatctgagcagttcacgaagcatagttacaatctggaggatttcttagattatacctatcaaggtatgttgcaggcggaattgggtacgggggagaagccgctgaagaagattcctgttgtggagtatcaaataccaaagcggatatttactgatcgtatgttggaagaggatggcggcgtggattcggccccaggtagtcttctgcggagtttgtgggatttctcatgacatggtgttctcttttccactgtttgatttctcttagctaaataataccagagcttttcccagccagtgccaataaacgattgttcgaataacattctagctacccaatatctccgccaatctcaccttgacaggtaaacaattctagctaatgtaacaaagatcacaaacacaatgccaccttgatgcttcagtaccacgctacacactctctcatgcggaagcaggccggagtgaccgactgtgatcctccctgtttccatcaatcgtccgaaatccgtaaattcttggacattgagtagtattcgagctatacgttgtcaaaggccgagatcctctgttcgaaacagaggattcgcgccactggcggtacagaaacggagaaaccgcgaccagaccaacagactggttaataaaatgttgagaccacatttgctcagcccgttctgctctatcgtcccctgggtgatagtcgcagtagacatctagggcaaacacaccacgtttcatgtcgtcaaaaaggtcgtcactgactttgaccgggattgcttcaatctcggcgcgcattttctcaagaatgtggcgggctttgcgtcgccttcgtcttcgttgtatatcaacctcctcctccattctctgaaggacatggatgatctccttctccgacgaagctctggttatggcgagctctgtcttctgtgtgagttcatggagatgagaggcaatagcgcgaaacaaactatcgacgttgtataaagcgtccatgacccgagacgacagcaccgcagcaaatgagcggtggtataatcgatcccaaaatgccatccaattgtagagtccaatgcgggatttgcgtaatctcgttagctctagagtcgcaattacatggcgacatgcgtctagggtatgcagcgcctcgagtcgggtcatttccacggattcttgggcaatcagtggattggcaatggatatgtgcggctctaactccccgtctgggtccggatgcactccagtatccaaagaacgatagtaacgcggctgcgatccgtttgttgacgtggttgctgaacgtgctcgctctgctccaaccatcatccgggatgaggcttctccagccgtcggtgaggctggtgaagtttcttcgcgcatattaaaatgtaccaatgtcatacggtgttgaaagaaaagggttcgagatggagttaatgtgtgtatcgtacggagtaagtgaagacgcaagaggtatagataaacgagtgtaggtgcaacgagtgacttctcaaagcggattatatcatttgtaagtaggtataaaatgataatctcagcgatatggcctggccaaaggagtgcatggctgcgtcaaggagcaacactggaagtcgtggtatggacgaggttagagggtggtaagttttacggcggaaggagcaagggctcaactgacaaatccagaggcaagaggagccggaaatggccggaaccccgttggtgtctctcaaacatggtgaggccgatgtcacttccgcattcggcagtattcccaaacccacagcgaagagccagtgtgtttttagtctgtgagaaattgacggaatcacaatccatggatgtgaaacgaaagaattaaattccctcagttatggaatgtattgcctgtattgtggccacaatttttgggcattccttaagtccataccatccattgcttaggtttgttgacaagaatgctgtgtatctcgaagactcccttctgtttctcccaaacgtaaataagactcggatacaccttgtagatacctttcattcttctcgctgctctcaacactcaacgcaaactataatctagctcgcgcccacaacagcgagataaggaacggctgacgaggaatcatcggccacatccagctcttccccaattaacactatcaagtggacatcgttcctgccagcgtgggggaaacaacctgcctcaatttcgttgatagcgtacctgaagcacagcttctccctttctcctctacactcgcccttcagcacattccatcatcagctacactcttactttttctctcataaattcactttgctgctctacatcatttactcccttattcatttcagccacggtgcttcgaaatgcatcccctcaggcctcttctcgcaacctgggcgtgtttagcccaggtcagtttcgcagcagtatcattcacaaagtggccaacgaccattcataccggaaagccagccactgtttattggaagggtgattcggatactgtataatcgcaataccgccttccatggactctgctaacacatctcagcctgtcacgattacactgcgacaagggcccgccggcaaccttagaactctcaaagtcctcacgcatgacgcacagggaggctccttcacatgggttcccgacgagtccctcgcccccggctcagactatgccttgcagattgaacaggatggcagcattaactactctggccttgtgactctcgttgaccaatctgggaaaaagccacaaccatcagcttccaaacacacacctgtttcctctccgctcggcggtgcgagaactagtgtccagaaaggtaacaatggctatattcctactctgaatagttcgtctgcccgggtcaacatgacgtcgggtaaaagcacagcacacaaaacatccaacgacggcgttaccttccgatacatttctgcagagatgatcctggcagccatggctgctgtcgtttattttgccgcttaagatcagggataacaaacacagaccctgtttctatatcccatatcagtccagtcatttcaaagacgtcggccagttaaggaggtgggaaagcattcggtactgtgcttgtgtatatatcaaagctgggcgctatctatacggagttgcggccagtctctgggttcaatcgttgacgaaaaacaattgtcatactgcttttcaggggtcatgtgcttatggctggcagtcattctattcattttgcttgcttgtttcgcaccttttgcttttcgctaggtaattatctgcttaagcatgttggtcaaaagcaaggagcggatcaaggtcgcgtgttatcctcgttagtattcagttttatcaaggaaatgaaattgagtattactcattgaagggccaaaacatcaggacgcgtgggaagctttgtattgagaactagacttgttagggtagaagtttgggactggttcccagaccttggacccaaacccatacagcctttagcgcccgcctaacagcggccccagacacttaattattataggctgtctggtataattggactatatgcaattacagattattcagatttgtgctacagcttaatatgaccgcacttctggctattcctatttctttttctcctgaaccctccttcacctttaccagcaaccaccattacttattgtttcagtatagattgatgattgcctagaatttggacagccttaatccctacttgctaaagattcattaatttaagtgagtaatcctgttcggctttcttcctgtgccctgtcctgcccaccgcaacaggatgtctcggcgagattgaccaatgtatcgtaagcgcgatgctaatacctaacatcatctcagcagcagctaagacaaaacaaatactcttaccgcaggtcttctctttctttttgtcaagctctcgtcttattacggtatggattaagtctccctgattttcgcaacgctgcatcccatgttgcctatttttcttgcatccataccggcgaacttttcatgtcgaacctgccgcatttcctggagcgcgaccgctagaggtgccattgtcatccccaggaaagcgcctgttcgccaatttatcgtctctcattttgcatcccatcacactactccaaggccaatcccataatctacatcttatttcccaacatgccgagcatagttcgatttggtcggcccaagaagtcatctaaaccagagactgagaatgctaactccactccccatgtatcagctacaccgaattcgttccgagctcctcgtatcagtttgccccatgtcgatgcagagctgaacatggcacagcacaatgggttgtttgaggtcgaccctcccgagcgacaaaaaggcacggaggccgcagagaccataatgggttagtgtaatctattctttttcatttgcatttcgaatatcgcattagactgactggtttgtttccttatgacagatagcacaagtccgcctccgagctacatcagtaatgcgtcagcaaaccccatgaacggcgatgcaactggagcagaatggtcctccgccgttggtcacgcagctacgggcaagtccggtcgtgtcatacacaatttacaagaggatatcgcgcggttgactcgcgaatgcagcgtttaccggtctcgcgcagaggaaacgcagcggatgaacgaagccttcaaaactcaagtacaaaacatgaccgatcgtctccggaaccttgaacactcgaacgaaatgaacctacattcactctcgcggaaagaaaaaaagattgaggaactgcgcgctgagctgaagggcgaacgggacaggcggcagcaagcggatgacgagaaagccagattccgccaattgatggatgaagcgcaggacggtttccatcaaaaatgtgctgaacttcaagaaatcgctcatcatgcccaaactcagtacgatgtgctcgtgaaatcagggcagcgcgaacgggcggaccaacaacggaggctgaaaaatatacgagacgaattcattgcattgagggaagcgcacaatcaaacaaattcacaattaagtcagttggacgccatcatggctcagaaagatcaagagattgaacgcggacgcgccaactttgacgctctatttaaggagtacgaggcctacaagcgagcgcatgacgaagaggtgcgagacttaataaaacaaacccggcaaggcgaggcgaagttcaacgctacacttgcgtctttgaaggaaaccgaaagccagatgaaatgggttgtacaggttaaacgcgaggtcaaggacgccgaatgaattcttgcgaaaatacggcacccacccctttttaaccaaacggagctctgcatggccaagtggccgatatcgacttagtgtttggtaggttgagcgtaccttaccaattcagcgtccaccggagcatataacggcgaactagaatctcccgcggttgcagatccaagcccgggagactgtacattatcaatggtctgccgtgtctctattcgtttctgttgtgaagatacttggcatggtttggagtttttggacttcatgataccctggggatactatagacggggtgtttgtctcgctattcagctacgatacatttttaacgcttagagcttaatagatattcattctaaaatgatttaacttagagccggacgtcctcaagcgtcactgaattgaccctgctataagaacctcactttcccattgggcagtggccagcgagtgaaccatgaatgtcgatatcaggtcggccatggcgaaggtgactcgcttgctaccgggtgaatgctcagctctgtatcgcgtggtctttctttctgatctcttgactatcgaaaggttgcggaattttcatgtttgtttggatgccttcactctacaatcagtcttccatttattcagaactggatacactgtccgagctggacaattgcaggttggaaattcattgtgttctgtgacattgccatggtgaccagagtctggggtatcttccttttacgattctttctctactcaatctctcttcacctgtctataccctcaccatccttccaagccctatttccctgaatagtagatgttcccatcgtttctcatgatctcgaatatcctcttgccagcgagctaactgcgtttctctgcgtatagggtcacacgttgctaagcccataagcgtctgtggctcaaatgccccaagctctttaaagaatgacgttcccaaggagaagcaggatacacggctataaatttgaatcataagtacagtcgtcatcatgctgaaacaactcaaaccccgcctgcttgaccttgtcggcccttgggactacagtacaatacttgaagagcgcgctatcggcgagttggagagtgttactaagtccgaaaccgtgcaatctagtaccgagacaaagagccgcaagtattatcggaccatgacccagaaggcggcaaagcctggtcaaaaggcaaagagcagaacttcctcactagccaaaatacaagctacacttgaggacgcctggggaatatcatcacaaaagaagccagtaaacaagttacaaaatgtggatattccttcaggcaaaggcccaagaatcccggccaccgcggatacaaagagtagattggaatacgaggaactgcagagacatgctttgatagagacgttgggatcttcatcgtggcattaaagccgatatttaaagcggctgaggctttccctggtattgtcacatttgaactccagtttggccttgccctaattccacttatgccgaggaccagaaacacgagtatgatatcctcaacagaatggtcagaaatcttccaaccccgtaatgggacgccaaagccgaccaccaagttcgtcaacaggctcacggcttgtggctccgaaattgaccatatcatcgaccttcgaaagccaaaggcacaaggaaaatctcgaatttttgaagaagaatatgcgagtataatatctgctatgaatttcattgtcgctctaacacagacgggctgctccttatcgtcattgacgagcagggaggtttttccattcagaacccgaagtcatctctaggagcggtaagtatacactttcctcatagggtctgggacgcaaggacgatcattgagtcggccactcaatatcgtcccggctctcggccggaaatagacggactagcaaggcacctcgctgatcacctatgggttccagcgagccaaaaatatatgcatatatacgtcgctgccaaggggaagcagtatgattattgagaaggcggtcatgaaacgttggaccaggcagcgattccttcatccgggcgaaggcacgcgcaatgtgagccaggatatttttcttcaagtgacataagtgcaggacttgttccctggtatcaaaatgttgcagggaattcagcacgtaagagctcgctacaccaactctgaggaaatggtccagagggggaaggcgtggtatgagctggtatgagctctctctcatcagcccaacgattgagatcatccttgagactaatgaatccctcgaagtcggggaaagaactgaagaatggtgcagtgccgattttctcggggatattgaattgtccccagggcaggagtgtatccctcacaaaagcgttgttgcgacagcaattagtgccgttgctgtggctcagatgctgcaggtgatcatcacaagcaggagtactggtagtgaacatgctgctaaggaagtctctgagcatgaaagaaaaactgcgcctgcagcttgtagttatcctttgctgtagtgaacagccactggggttattcagcgaacaccattcttcttccatatcctagactaatacagcagctctgtgccacgggccaggaggcaacaacagtagagtacttttggacttgagcaccgtcattctgctaccctagcagtgtatcagatggctggacatgatgtttggctccattgtgacgcgggaggccaagtgtgggatacatagccattgctggttgcctaatgagcagatatgctactattctaccatttgcacgcaatatcctagacattctagtacggtagagcctggcgacaatcaaaatcaaacggattcataagccagagtaaacttgcaaatctagtctggattcagaaaaatgctaagagatcactagtgtggaatatatcctctaatcatctagcctagtaagcaataacgattttgaccagacagttcccgcaatgttattcatcttcagtcatcgtcctctgcatcctcaatccccctcaaccaagcgcccctcgcatcaacagcagccttcctaacatcccgcttcggatcatcaaggacaactttcagtgcgcgcagaacctggctccgaactggcaaaagcggcgacaatttaccggctttcgcaacggcaggggcattttccgcattacgaggctgggcgagtaagaagagacatctaagcgcgtcgacccggaggcggggtgcgtttacagccgctccttcaccagtcttttcagaggcagatgcagcaggtaatggcttgtgctcagctgtcttgaggagtcgagtgactaggctctggacatgcccgcactcttcaatgacgccgaccccattctcgcgaatgatgaccgataaggtctggagtgtcgcggcgcggacggcgaaagagtcgcgtgttgctgtttggaggtcaagggattgcaggaggaggggtagcagggttgggagctcacgcatatcaagagcgggagggatagtcgagagaattccagagagggctgttaagtgggcgggtttcatgtaggctttgtcttgctctgctgccatcatggtggttccgctgctgttaatgttaatctcccggattttggtggaaatgagggggaccaaggtagtgaagacacgttggttggagaggaggcggatattcgcgccgtttatgggggagagaacgtcatcatcctttagaaggatagcaaagccacgggaggcagttgtgcttgtttgttcagacggtgaggagaggaggtggagaagggaggtaaggatctgggtcgttgttggagcgaggcggagaatgagcgctttggaaagccagaaaactgttctgacggcttctggtgttggctctaaagcggtcgtagtgtccgtgaaaaggaaggaatttagtaatgtgtttgcgatttcaagctcggatttgggaaggaatttgttcacgagaagagcaatgtggcgaaggatggcgagttggatttggggcgaggtttcagctatggagagcttcacaaggtatgagagaaggtcggccatgttgggggtgctgtgggggagtttcgagtccactggcagaccagctaaaaggtaggtcgacagaatcatcgtacgtcgctgatcttcagatggcgactgcgcaaatgggacaggctggaagtcctcgggtaaagcgaacagggcgtagatgttctttgtaacttcatcttgctttagtcttgggagagacctaacaatgaggttgcagagccgtcctaggacatcgagaaccgtggtatcacctaggatgttattcttcgctttacctaaagctgttgcagcagcattccggcacatagctaccactattttatcatagtacatctccaaaccaggttctccatccagtcgcctctggttcataacataaaagatggtcatgagaatggcccttggataggccacagagcctggctgttccttttgcagcagtagcgacaacttagttagcaaccggcgtaccagtgtctcaaagatagctttttcgacgcttatttgagccagggtttctagggtaggtaggtagctggtatccgttccttcgtcggaatcgggaagcgtagcgacgaaggccgggaaggtgatatccattatcagccgcggttgatgctttgaaacctcagcaagagcagctattgcttcccttttcaagtcatcgcggcctactggctcttccgtcagaagaatctcgtcaaggtattgcacaaacaggccaatctcagactcgtgaaagtaatcgcgcaggactgacagacgtaggaatcctttcaaagcagaaacgcggaaagagacctcttctttgaccgtactcatcaaagcctgaccaaatatctcggaaaactgatctttgaattctagcagaggattttcggcagatgtttccgggttccgcgttgtccattctccaaaaacagatatcgcagactcaaaaagcaatgtcaatgtttccaaaagagcccgctgttttgtgatcccatcggctccctggtagagggttaagaggggtgcaatgacaacttgcgcgaccagagtgaaggaaggtgcagaggcctccgaaacggcctttaaaatcttctgcgcgggcttggcttgcttctgctgaggttctcttaattgctcgttacactctttggttatgggacgtaggtactgagcgagaggcaactggtcgtgtatctgcattacgccctcagatagacgccttgctatatcgtgtaacgccttgagagagaggtcggagagaagttcttcttgggcattgaggacctcaaacttaagcgtctcccatatcgtgattgaatacgtagacacggtatcgggattatatgaattgatacaggcaatcagggcattcagtgcgtctttctttgagcatgttagattatgtgcacggtggcgttaggttattattgcataccttaacgttctgagaagttgaatctagtttatccagtaaagccgggatagaatggggcgcgaagtgactcgtcgatgaaatgcagtcttgcaggcggtcctttaggtcttgtgcagtgatcccgtaaggatcgtttggcggcggcctgaacgtaataggaaagtagttgtagacagaatcaaacaacagcttcttaagtcagaatttgcctcaaaagcatcgtgattgaagaggcttacctctacgtgccttgagatatcccactcaaccatgatcactttaaggatagagaacaccaacataaggttgcgcggatccttttcacctgtcatgagatctaccatcccgacgagagaagtgtcgcccatattatgtaagactaacccgtcagtatacggaagacgccgaaaggaagccgcgacaaaccagatcggtgattggacatcaactcgttgagtagctgatacacctgaaatctctgagactgcgcacgagattgcaaggtattgaagttctcgaacagcctgtattctgcaggtcagccctcatgattccaaacgcggcggggggatgcggcaatgcgatagagatagctaacactcacgctgtcgccaattcctcagccatctccttcgtgaacctgtctagtttctgcaacgtctcaagtccagtaaccgcgcctgcatctccgatccggtcacagaagaaagtcgtcaggacctggacctgttgtctcgtgaggaattttggaggaagcgccttgatcaccgcgctcaggtaggaaacggccttgccgcgaagtagtggatcttcgtcattgacgtattctcccagagattgcacgacttcaacgagggtcgtcttcttgttctcgatatctaaacaaccgcaactgttagcccatagtatcggcagttcatggaggggtctttgataccctgggcaattcgctcggcaatctgccgagcttcctgtttgtcatggtcgacgaccagcataaacgtctgcaaggctgacatcttttcaatcaaccctaacagcgacgcgcgagagcaattgacatacttatatgcatttttgtggtcctccaaatggcccttatcaatgctaatcacgtgctttatcccacttgaagggttctccgcggactcacgtggatggatccacccgccatggaggttgcgtcatggattgattcatcggatagagaaaccaacagctgaagattaaagtagttggcaaaatcgtcagctttttatattggacttaagatgcgacactatcaacaacagcactcgttctcttcctgttcttctattgcagtatctcaacagcgtggagcttgccatactttgcatatcgcaagcgtatcccggagccgttactcaacaagcctcgctcacgccacgcgcgaacgatagaggacctcgacggactcaaggagtggttgagcaaccagcagccgcttagaggagcagtgatggcacccccatcagaggataataagcggacagtgaccgtgaagggcggggcaataatgagcccactatatctgacgtcctgcccaagacccgcggtatcaacatctacgcatcactcacccgccagtttgaaaccgtcgaaaggcggctaaaggaccaaacacaaaatgtgacggttctggcacctcgtaatagtgctatccaagatcttccgcacaagccctgggagaatcccgatgattacgagaagttcggggaaatgaacgcgtatgagggagacaagggacaagatcgggcgaaacgtaacctggaacggtttgtttctgctcatgttgtggctcagagtccttggagggagggagaggaggcggaaacacttggaggagataagttgacgtggagaaaagacggggacagaatatatgtgagtactatgtagcgaacgacagcttttcagatgctaatagaggcttctcagatcgagccggaaagaatcagggtagagagcattgcagagcaggtttctaacggcgaggtatgggtaatcgatggggttatcaattaaacagactgattacggactgattatgaccttcctggcgtcacatatcggtatctatcaactggggctttgtttcccttgtatcaattttattcatcttgtaccaaatcggcgatccgatgtggctgcataattcttatcatctattactgcattcgagttggatagtgtagatcgaaccgcctaaaatcatggc

SEQ ID NO: 5629 - DNA, 8480 bp, Emericella nidulans
tataattaactaatttcttcaactttaatcttactgtaatattatttactaaatttataaatattctaactcttactctaaaaccccgggggtatatatatatatttaatattttattttgaatttctaaatcttgactctaatcctaataattatattaatatattcttttttttccccttttttcttaccttactctaaatctttactattttttttatttttatctctattcttactttttctataattcttatctgaattcttattctttccctgattattattcttccctgtataatctaatttaaaataaccctgacccttactctaatctaaacattaaattaattattttatatattaaatactgtaatactgatttgataatataaaactaatttctgatttcaaaatcttaattatttggttatatatatatttttcctttataaaaaaatcaactgatattaaatctaaatcttaaacaaatattttgtattttttcttatatcctgatcttgttatatctatataacccacacccaaatctgtatatttctatgtatattaatctttatactaaatattaattattttctaattatttataaatctgtttttaattacctgcaaataacttcctaactaattaattattatcccttctttaaatataaatttggtaatctttactttttctggcattctctaaccctgctttataatataatactaatctaaatataataactctgccctgcctctatatttatattataatataatccttactttttattctttcttaattatatttttaatattatttttattctatctctttttactaaactgtactttattcctccttatactcttattgaattctaaatactaaataccaatattttattaaactgtttttatataactttattatgctaatattgctgtttattctatattctactttaatattaattacttcctaattacttataaatccacttctaattactttgtaactacttgatttctgttgaaaaattaaaccttatcaatatctttaatcctctggctactatccatgcctgctcggcctgctcagcctgctcggcctgctcggcctgcttggcctggatgggcttggttggctgtattaacctggcctgggctctggctctggcaggctctgcatctgctgcggcgctgcctctgtgctggccgcggctctggttcctggctgccccggcttatgggtggttgactggcttggcctggtactgggcattggcctggttctgctgttatacaaatattctgcctgcttgtacctgccgaaaccacaatatactaaaccctgaccatgaaaatatgggcctgcctgaccccctgccatgctgcatgggatctgctgtggttggccctgtacgggctctgcctggcttggcatgggtgcagggcttgggtctgggctggccctggcttggatgggtgattggcggggctttggcctgtgtgctggctggtactggtctgctggttctgcattgccgggcctgctatcatactaatatccagcctacttggccatggactacaacaatctaaaccctgaccatggcctggctggactgccactggactcccactgtcatgctgactctggcccctgtgtctggtactggtctggttggcatgggctctgcctacctctcccgggctctgtatctggctctaattaatgtggactggggtctgcctgactctgctgtgctctactggtcctttctctggctggctttatatctgcctggttttataccggctctccctggcttgtcgggcttgggctctggctccccctgcctgactggctattggctgggctccggcctgtgctggactggatctgacttgcttggtctgtataaactgcaccatctaaaccctgaccatgatataacctggcttaatatgatctgacttggtatgggctggccctgcctgccgccatgaactgcaataattaaaaccttgaccatgacatgacctgccttgactgcctgcatctggccctggtatggcttggattgggggctttggcttgtatggatttgcctgcctgcctttgggctgggggctgggctggcttgtatgggttctgtatctgctactggctctggcttggtatctggctctgctcctgctggcctgcatgaatagctgccaactgtaataatcctaaccccaactataaaaataccttacctaaaaactactaaccctgctctgcctggctgactgccatgacctgtaataatctaaaccctgactatgcaattatggggcttgattgctgggctgggcctgctggtctgggctggctttgcacctgctggcttggccataataatctataccctatgggataatgcagcttggggctgtaatggatactaattactatactaactacttggccactacctggcaataacttggcaacaactcaacaactacctggcaaatacttaatatctacttcaatttctccgggcctggcggctctggcattgctggatatgctggatatgggctggtcttttcttatgggcttcctttggttgcatatctggtactatatctgcctgtctggctatgactgtataatgttaaccctgaccattatttactggctcccacgcgtgcctggccaaccataatgctgctttgggcctgatacagttgcttgcttgaactgcaactctctggctctggtcctgatctgggtcgggctctggctggtatgggctcgaactggctctggttgtaatatctataatcccctaatatcaactacttgccaaatactggataactgcttgaatctacacgggctctggctgacccagattggccctgtattggctgcctctggcaataactgcaacaatctgaaccctgaccatggcattcccgacctggctgctgatatctgggctgtcattgggcgctggccctctgttgtgcctgtacgcctaattggcgctgaccgggtctgggctgcctctgcatctggggctctcaatctccgcttggcctgaccctccgggcttgtctggctccatggcgcgtatggctttggcgggctcgctgggctccggcttgggcttgctctggcactgacgggattggctggcctggcttgctcgcacgggccctaccagactctggctgggcctcgcctggcttgggcctgggctgccgacacattgggcggctctggctctggctcgtaaatgcttacgcgctttgggggctctgctgggatctgatcggctttggctggctctgtccgggctgtacggcctctgggatgttgggctctgatcctggctggcatacacttccaggctttggcagcctggccctgcctggctctgtacggctttggcaggctctgctgtgttctggcttggggctggctctgggctggcgctggcctgggctgcctggctctgctggccctgggatatgctgtatggcttgcctggctctcctttggcctttccgggctctgcctggccatgactgcaacaatccaaaccctgaccatatgaatatatgggctctggctggcttggcttggtatatgcttgcctgctgccctgcatatgcatcctgcctgcttgggctataaccccataatctaaatctggaccatgatataattctgcttggtaccacaaatctggctggcttgaaaccccaacaaaccaacccctgaccatgtgcctgcctgcatctatgacttgctgaccactgcatatgcctgcttgcctggctctgggccctgggtctaatggaataactgggcttggcctgtctctgcatctactgggctctgcctctatgctggcccggctctaatgcatgattggctgggctgttcttccttttctggccttcctttggcggtatatctggtatacatttacctagttggccatgaactgcctgctctgctggcctatatatggctctgcctggctgtatatctgcctggcttggtatgggctctgctgctgccgcatatgctgcctgcctgcttggccataacctataataaataaaaccctggttcttaaatatatatatctgggaatatatatatattggccccggctgtaatgctacttgattatgaatttgtccttggggtggctggatatatatataattattggggatcctaattcagtcctggcgctgcatgggctctgctcagctctgcttggctctgcttggctctgcttggctctgaataggatggatactggatcctggccggtgctgcctccaggttggttctgctctgtatggtcggcattggctgtgctggccgtgctggttttgcggctctgctgctctgctgtctttgctggcctggggcctgctgccatgcaaaatcctccctgctcaggttataaactgcaacaatcaaaaccctgaccatgacatgacccggcatgatgcccctgattcttactggtgatgctggctctggttccctgcatcgggctctgggtctggttggcttgggggctctgctgggcttggctggcctggctctgttgcctcttcctcctctggatggctgtgtatgggccgggctggctataaaccacaacaatgtaaaccctgaccatgatataaactgggaatgatattacctggcatgatattacctggcatgatattacctggcatgatattacctggcatgatattacctggcatcatattacctggcatgatattacctggcatcatattacctggcattatattacctggcattatattacctggcttggtatgggctgcccgtgcctgctgtggccatgaactgtaataactaaaacctgaccatgacatgacctgccttgattgcctgcattgggccctgtatctggctgggaactggcttagggtctgcctgcctgccttggtatgtgcttgcctactgctctatatatatatatcctgcctgcttggcctataacctaataatcctaaccctgactatgaccttgcctgcctattgcctgccaactactgcataaccctaaccctgactatgaccttgcctgcctattgcctgccaactactgcctttgctatgtactctgctggctctgcctgctgtactctggcctggttcctgttgcctacctctgctctgctgctgacctggccctgcctgcctctaatctgcctctgctcctgctgccctgcctctgtactggctgccctgcctgcctattagtggacttgctatctactctgccgccctctgcatatacttggcctctgtatctagctggccctggcactgataattattggctgtgctcctactgtgctgtgctgatctgccttgccctaattagccataacctgccatgatcttacatattgttggattagtactctgactgcaataatctaacccctgactattatataactggctttaactgctgactgacctgctctatatctggcctgtatctagcctatatctggctatatctatctatatctggcctatctgcctatatctggcctatctacctatatctggcctatctgcctgtatctagcttatatgctctaccttggatatactctgcctgtctactactagctgtgctgccagctttgtatctgcctgctattattaggcttgcctgctactctgtatatatatcctgctagcttagctaatatccctaataatctaatcctgattatgctattattctgctacttctcctaatcacgtctaattactataatattaataccttgatataatctctctactagttctgtattagttggtataaccttctactaagcttttatatatatatctatctcctcagtgtgctggaatatgttggctggctatcctgcaacaaccataccctgaccatgaaatatatctatgggctctgcctctgctgtgctggcttggggcttgcgctggcttggggcttgcgctggcttggggcttgcgctggcttgccctgggctactgacccatcttgggctctgcccctgactgctatgatgcttatatgctttggctgcctctggtgcgcttgctgtgcttagcttggcctggcttgggcactaactcagtccagctggctgatctatacccaaactatgtcctatctgctggcaactggcaacaactataccctgaccctgaaaaataccctgcactaatctgctatattagctggtaatataaatatataatactaactactttgctaatcctggataatctgctgtagattgaccctatactagatattctatatagccaactcctggctggcctgtataaatctgctagtttagttatatataaatatactaaatttgctgttcctgccacctgacaaattattccttgggttagctgatatattaataatgggggaccaacttggtcctggcttgctttgtattagcctggcttggcgctctgctggctattatacaactatcaaaatcctgaccatgaaatcatgggctgtactaatcttgccaacttatactgttatatatatttatactttatactaactactggtaaatactggataatcagctttggattaatcctgtacttgctactttatatatctggcctgacttactgccgccctgtatatactgatataatatatatattgggcttgcgtgcgctcggactggctctggtggtaatattaacaatcccttgttattaactacttggcaaatacttgataactgcctgactgatactggctctggcgggctctggtaataactgcaataatccaaaccctggccatggcattactgacctggctgcagatatctggcctgattagcactggcccttacttgtactggtatgcctggctggctctgactgggcctgggctgcttctgtatctggcagctcttgctccctgctgggcctgaccctctgggcttgtctggctctgctggtgataattatcctgctcaggatctgacaattaatataattaaaccctaatcctgtgtcatgggcacagctagtaactagtaaataatatatatagattaggaaatatattgggttggttgggctgggtgacagaattatatatctgcaatagtataacacgtgggaaatatataatatgatgggaaggatgattggactcagatctgggtaactcctgctggctggctcggctggcctggtactagccatgatatattagatcctacaagttggcctgcgaactgcaattattaatacccagaccatggaacaggtactggggctataggtgggcttggtcccggcgctgccccagcatggcaatgtggtgggctcaggataggttccctgccagcatgagccaggtgccactttgacagggcataggttgggcactttgctattgctgccctgctagctaccagtgcttgactggagctctatgtgtgctacatggcatgcactgtggttggcttgatgggctcggcccaggcacggtgccagccctccactgcctctgatgttttgctggcgctcctctggcattaaaccctaatcctggtgcatggctggtgcttccccggcgcggccccgggaatgctcctggcctgcttgtcccgggcgcatagccagtatactgctggtgttgtgccttggctggctcccccccagtgctgccctggtgcgacgcgggctgtgtacctatgcaggttcttggctggcgccgcccgggcgttagccaggagttctgctggcgctcctctggcattatgctcatcagtcctggtgcatggctggtgcttccccggcgtcgccccgggaatgctcctggcctgcttgtcccgggcgcatagccagcgcactgctggtgttgtgcctttgctggctcccccccagtgctgctctggcgcggcccaggaatgctcctggcctgcttgtcctggctgcatagccagcgcactgctgctgttgtgccttttgtcgcttccccccagtgcttgcctgggcgacgcgggctgtgcacctatgccagcttttcgcttgccccacccgggcgttgccctggggttctcctggcgtggttttttcagattgggctgatctgattgcgccaactgcgcctcccagtgcatgcggaaatttgattggctgcttgttgccacgaacccggctctcctgtttggcactttagtgactgattcccggcctctggttttgcaaggacccggtttacaagcccttgtccggtcccggtcggtgttaaaaacctggaccccccttttgcccgcggaaggcctcctttttgtccccccactctgggggggggtctccctggggcgcccccccccctttt

SEQ ID NO: 5630 - DNA, 7591 bp, Emericella nidulans
ccgctgaccctatcttcatcttcctggtcgctttcattaacgaatcttctagccgcatcatcttcatcaattgccgagtgttgtcctgtctcggagtctggcccctcagagtgagtttcagtcttgctggttttcgtaaaatgaccaaggttaccctctgtcttagccaattcaatatcgttgacagtagtcgcgtttctgttcgaaggttgagggctggccattgcatccgccgagtctagagcggataccctgtcagaagccagaacttgcatgtcgtcagtgtataccgtcacaacgtcatcctcggctgtgtgcgttaatccgccatggtcttggacctgcggcacactatcggaattatcgagtcgagtctcttcttcgggtttgcttggcgcaggggtaaatgattcatcatagggttggtctggtggcagagtatccggtccgtttagttcagctacctccccggacccaggtaccgcagcagtccttggtttgacatggccgtctgactcagacccctcattagagcttggtgccacaggtgtcatagattgagccgcggccggagtattagctgcagatccgaagtatccgctgaggctatttggtgtagtagtaagcggagatggttgtgggagcccaggagaaggaaccgggtgtaggcgcggcgtatttgttgggaggtgggaagcctgacccgggttgataagctttgagggctctgaaacgctctgcgggatagcgttaggatggataaacagagcgttgtcgtttatctgatcaaaatgcttgtctgctgctgaagatgcggcatccgcctctaccataacggcatcggtgtctacagctggcgcgttatccggaacagctgccggggctggagcgatagtgctctctggagtatcctgaacgacagcttccacgccggtttccgtttctttctcgaggtcttcgtcaaagatagccatccagtcctccggtaaatctctgtctccagggctctcaggctcatcaactacacgccatgctgctccgtacgctgaatctcggtcgtttccgccctttcccatgtacgtagccatcttcttccacaaaagggtcatcagccgaatcagtgaagtgggacgagacccaagatccccctaagaacgccggggattgccataaggatgactctggcggcccgaatgcgtgcgcgccaccataagcagctggtgtgctaggagctgccgttacgttgtccgcgagcggaggcgtactgcgcgagaaatcaactttgactgtcgacaagagtttggagttacgccagatcttatatcatgtcagcacaatgccagccaacgggctatgctccagtaattcacctctagaaatgccgaggtctcaaaatgcacgtcccacgagacacttcgacccggtgtctgtgtcgccgcattggcatcattcttcgacaatttcgacccagttaagctcaggtacacagtgtcaccaatcccaatatgagttcgcgccacctcctccgccacatgaccgtgaaagaacacttttacctgtccgtttgatcggcgaaggcggaagtcgggttcggcgagaaggacactgagtgttctggtggacgacgaatacggccacaggagcgttacaacagagtggatagagctttgcgagagacggtcaacgtcaggggagagtcgcgcgattgggatggccgccgttgaacgcagtagttccgatactgggggttgatcgctgttgtccatggtcggcgccggcaatcagattgtgtctatcatggtgctgagttataggcgcggcatagtgcgagaatgagcttgtttgccggaaatctgaagggttaagatggtgagcaacctttgtcaagcagtctctaaagacgcgtttgggagcttgatgatcgcaagccgcccagagcttgttgttagcgacgtatcgcggttgtaatattacttgtatcttgtactcgcaggggggactaccgcgatatcttggtaattcagcgtttttaaaagctattcgactatcgatatgggctcactgaattattttaaggtatacgcctcctcggcaaggcatctataatccaaacccagtcattcggtgggatgatccctggcagtcaactatgctatggcggggcttgatatcatcaggtccgacatcgggagatacgcgggcccattttagtggcatcagagtcagtggaggtctccaaaatgacagaacactttctactcaatcatctacgctgagaggcgatgcccaggaaggatggcgttgtccaagcacatacaccggatagcggtcatcggcgctgggccagccggccttacttctgtgaagtacaccaccaagctccagccaaaacggttccacttacttatcagtcgctagatacctactggcagaaaaatgctttgatacggtagatgtctttgagcgaagaagtcacatggggggcgtgtggaactatagtcctggaacgctgaaggaggctgtttccacgccagtacctcaactcagtccggacgaagacatacaggaaccagtctggcttcctcgggatgcatccaggccgaaccaagagcctacttttatctccccaatatatgatactctggacacgaatctgccgaaggagttgatggcgttcggcgagaagcaatttccatccgatgtgcaggatttcccaaggcatttcacggtcaaagaatacgtgagggagtatggggaggatatcaagaaacatattcagtttgaaacccaggttctggatgttcaaaaggatagcagcacagagacttggtcagtgacaacacaaagcctccgcagcgggactacgacaactagttcctacgatgctgttgtggctgcaagtggccatttcgacgtcccatatctaccagaaatccggggcatcgtgagctggaataacgcctaccctggtgttattacacactccaagttctatgacgtgccagatcccttcaggaacaagaaggttgtggttgttggaagttccgcatccgggcttgatatcggcaaccagatcagtaaagtctgtaaaggaaaggtcctcgcatcacagcggacggatctttatgtgtcaccttccacagccatggacaaagcctattaccccgaaattgtggagttccttcctcctgctacacacgagagggctgttcgatttgcggacggaagggttgaagacaatattgacgctatcatcttctgcactggttttctttattctttcccttatctctcctctctcactcctcccatcattacacatggccgcagagtagagaacacctaccagcatcttttctacatccatgaccctacccttgttttcccagtcctgccccaaagaatcattcctttcccactctctgagaaccaggctgcagtattctcccgcgtctggtccggtcgcctcaagcttccgtctacagcagaaatgaaatcatgggaaaattcggctgtcgcccagaaaggcgatggtcctggatttcaccttatgccttacccactagacgccaattacctaaacatgctccatgattgggtatctacagccgaatcacgccccgggcttgtcaatgacggcaatggcaagccgtgcaatcgttgggggaggaaagaaaggtggatgcgagagatggttcctgagatgcgcaaagcatttttcagcaagggcgaagaacggcgtttggtcaagaccctggaagaacttgggtatgacttcaaccgatggcggactgagcaagaccacttcccatagacatgaacatagatgaagaccgtcaaaacatgagagtgcgccaagatagaagccgaacagcaaatatatataatagagacaatctacaaagcgtggttgaacgaagagtctcggctataacagtcagataaagctcggctcaaggcccgggtatgattatcgtcttgtctgagccggctatagcctccaaatatctgaattcgagaagatgtcaatgccgagtagagtccgaggcaggtttggtttggtttggttttattatttaacgtcactcggcggatcacggggcccacgtgatctgcggcctcccagggggcatctggacgtgctacctaaacagaactgcctaggaactagctagatacaggtttgaagcagcaacatggacaatatatgttggaaatgagcagaagaagcacccagtgctgccctggccaggtctttgagggcagatgcctgttttgactacctatagattggggggaggggccggaccctttatccaggtagatgtatggactgttgtactatcaagcactccagtgggcccagttcaggcatatatctttaaagaaggataattcttgcataatacagctaaattcttcagccctggcagctgtacttaagagccagtctaatatttttgacaggccatctcttatatatctctatctatctttccagtcctttctagtatatgggcagaagaagaagtatactagggtcttagtcctaccacaagagcagctctccaggtagtccaagtggttgaagtactagtagtatgctgtaaagtctctgtagcctgtatgggcagcaacaagtcagccaagtacccaacagggaagcttgtgctcgcaggtgtggctttcctttgtatagggtctgatatccagggtcttataggcttggggtgccttactagtatatactatatatatctctgtacaaagccactgttttgtctcctgttataggtatgcaggggatagggggatattagggctgtatatagaggacccaagctttgcaagcttatctgccagcttattcctagtaatcccagaatagcctgggatccagcagacttgaaggggcttctgtggcctggttaggattaagggagcttccaactactaggtagtaagctggccaaaggactctgatagtccatgcctatgcagggtgggcctatagcttgctagcagggaggctgctgctaggttgtctaggaggataactagctgtatagagtaacctacacatggttgtcccagggctgcgcgtaggccttctacagcacctatgatttccgcatcagacctctgtcctggggcccgcggggccatgtcccttggttaccaggatagggccaaagtagactgtatagccaaatcctgccccttggccagttcgcgagctgtccaagtatactgatatctgtaatggggcagggctatagtctttgttatctgttgggagcatgcataatggagggagaggcagctctattatagcgcgctctggcagggggctgaggaggagctgtaggatccttttaagcctggttttgggcctgcccacggtagtctctgcggctatttgggcaattgggtgtttagtgtcaaggctcatgtatctcactgctcctccggttgacaattatttaacgtcactcggcggatcacggggcccacgtgatctgcggcctcccagggggcatctggacgtgctgcctaaacagaactccctaaaaactagctagatacaggtttgaagcagcaactatggacaatatatgttggaaatgagcggaagaagcatccggcgctaccctggccaggtcttcgagggcagatgcccgttttgactacctatagattgggggggaggggccgtacccttttccaggtagaagaggtgcttacgagcgctgactttgatcagtgaccgattcccgatcatagaattgaaggtcctgatattatatcttcagtctgcatagagatttaatagccatcagtaggttcctttgatcgccaggagagatgttgatctctctataaccaacggatgactggagggtcgatcgaggtgctggacgattagtaaggaaagatcttgtacggttgacagcagacttcagagcagcaacatctatcttaacctatctttcatcattgcatgcttagaacaacgaacagcgcatccgagtcaagccgacaccgtctcgctagcaaatgcaatgcaggaaatttgagctgttctgggttaaccccagcttggaggcaggccagtctccctccgctctgaaccagcgcggggtatcggcgacatagattggagcagccaagccagcaaccctggggattatatagagaccacgctgactgtcatatatgtagggctcttcaattagcccatgcagtatcaacgtttgtccttattggtcgaatacttatggcatcacttcactgtggcttgagaatccagacaacatggagaagtcttgcagtttagtcataagctaatagcccctcccatccagacgcacagtgacgtgatctcacgtaagatcatcttgcttggcgtgtgggttttatgatgaaaatgtatcccagattacagcatttgctgatacaaacttcttgcttgctcggtttagaatccaatgagttcagcctcatatcatgtattgagcacaagcgaagtgattcagggctattcaataagctaataatctgaaaggaccaatcttgcaccatgaacgggtagtgaaacccatgaaatgaaaacctatgtaaatgcggtccaactaatgcaattagcacctaatcaccgttccaccccctctttcctcgatatgaacggacaggaaggctcaggcgagttaaatctatattatgttcattataacccactttaagtcgagggctgtgcggcaaccagagtcataaagcagccttatttagcgtgctctcaaatcctaatcacaaaaggcaggtgattcccaactagtcaaaaagtgtatggagagagtttgcatgaagatattaccaaataacagttataacttcccttgtaagtcttggcctcaacctctggacaaactgtttctcatatttaggcgctcttagtgcttaacttcgcaacaaacgttcagagtcagtcgcaatggccgacctcgaagcgtccatagaacacctacgggaggctgttgagcaaacagcagaaggtcaccctgaccgcgttgagtatttgaacgaccttgggagtcagcttgaagatcgatactcaaggacatgggcattggccgaccttgatgaggccatccaggtttggcgcgaagcagtccgcgcagcaccagtaaattaccctgagcacgccacgtacttggacaaactagcgggtcagcttggggttcggtactcaaagacaggggcgttagctgaccttgaagagtctatccaactcgaacgagaagctgtcaacaaaacaccagaagatcaccctgatcatgccatgttcttagacaatctaggaattcagcttagggtccgatattcaaggacaggaactttaaaagaccttgaagagtccatccaacttggacagaaagttgttaacacaacatcaaaagatcaccctgaccgtgccatgtttttgaacaaccttggagttcggcttagaaacaaatacttaaggacaggttcaatgaccgaccttgaagcgtccgtccaggtttggcaggaggcagtcaatcagcaacagaag

SEQ ID NO: 5631 - DNA, 11632 bp, Emericella nidulans
gcggactggctgttgtcctcttactcgcagtctgaagcagccaacttactggaagggttcttgggttatttgcgagatcttccaatcgtggcacgtactatttacgcgagtgaagtccactgcattcccgggtgatcaaaaatgtgtactctacgtacgtggaccgcataggtagagtacataggaacagcagttcgcgatctggcctgcgggcgcccgctgtccgggcacctgcactatcgtccttttctgggtttcattacaagaacctttgccttggctaggattcgtctgtaaccaactgctgtattatgccatggggctgagctgaggccagggccgggatgaaaacagggttcaagatggctgttgtaagacggcagatcacatatgtggcccatggggttggggcaggttgcaatcaagtgatcgactcccgtctgcttgtcacgaactacaaataatttggattgctggctggtgcttggcgccaacttgcactcatcaccgcagagggggcaaatgcaagggttggaccctggacatcgccttgaattcggcctggacattaccctgacccgactgatgtaatgcctgggatggcaactccacgaggatggaagagtagaccgctgtgagagcccgaacccaacacgacgcctgttctggtccctgaaacgaaaccaaggggaaggatagactgtcggtcataatgtattcatcgaactacgacatcgccgcgcaaacgttcacaaacggactgaaccataaccgccagattttatttttccatgattgatttgctttccactaaacacaagacaccggctttggatatgcaccccttagcgcttagcagccttctcctgagactccttgagcaccttcttgacgatcttctgctcctcgatcaggaaagcacgaacaatgcggtccttgacacagccggcgcagcgggaaccaccgtaggcacggctgacgttcttcttggggcgcgaaatttgggcgtattcgcgggggcggagggcggggatctgaataggaaaagttggtcagtctcgttgtctcttattacatgtggccgtttcgctatgttgaatccattcatcgatccccttgtttttttttttttttcttgtatatgaaatccagccagatccggggactcggtactcacaccggggagcttgatgccacagtcaccgcacttgggagcggtaccctgcttcttgaggtgctggtatcgcagctcgccgccgggggtcttgacgatgcggacgcggttggaccgtgtgttgtacctgtgcgaaatctaatcaatatctgtccaaataaaacctgacacaatatcgtagaaaatccaatccccaatctacgccaaacatcgcaaaattgtgctgtatagacggatacaactggggaaggcatttggtgggattttaaacgtacgggttccggcggcgctgagaagaaaaattcgatcagaattcattcattttttttatcgtaatgggcaaggacacataggaggaactcacgtattgcagtctgttgttggccatgttgactgtgcttgaacctctgaagggatggtcaagagattggcgtcgtcgtcggttgtcgtcgtgatcctcgtagaattctggcagtcgtctggatttgtgtgggtttctcagagccctcagaggccgcgctagcgctcatttggcgagcttgcgctaaacctaaactgggctagcgcgcttaagtcggagccgccacctcttttcgagctgcatcgcgagaaaggagcctgacgtgaagaaagaatcatcttccatcgttgtcgcgggaaggggaatcgtctaggagctgggtcttctttcattctcaggaaattgaatttacttttccgacgcgatacacttttcttttcattgacccgaccatcctgactgatgaattcgcggtcagcaggatcttttctctcgacttgagtcttgacgcgactgcacgtcaatcccggagaagagtatttctatcccatcaacgacagcgatggcatcgctgcctcctcctcctccaccaggatggggtgcggtcagcgccgccctcgatgcctttggcgccgcctccgccgggctaccagccgccagccgacccgaacgtcgcgaagtacgctcagaaaaagacagaatggctgcggacgcaacggaaccggttcggagagaagcgaaagggcggatttgtcgagacgcaaaaggctgatatgcccccggagcatctccgtaagatcgtgaaggatatcggcgatgtgtcacagaagaagttcacaaacgagaagcgcagctatctcggcgctctcaagtttatgccccatgctgtgctgaaactgttagagaacatgcctatgccttgggagtcaacgagagaggtgaaggttttgtaccatgttaatggctgtcttactcttgtaaatgaaacgcccagagttatcgagcctgtcttccatgctcagtgggcgacgatgtgggtgtgtatgcgacgagagaagagtgacagaagacatttcaagcgtatgcgatttcctccatttgacgacgaagaaccgccgctttcgtggtcggaaaatatcgaggatgttgagccgctagagccgatacagatggaacttgatgagtctgaagatagcccggtatacgaatggttttatgaccaccgaccactgcttgatacaccgcatgtgaacgggccgagttatagaaaatggaacttggatcttccgcagatggccacgctttaccggttaagtcaccagcttttgagtgatgttgttgaccagaactactttcatatgttcgacctgaacagcttcttgacagccaaagctctgaacgttgctattcccggtggacctcgctttgagcctctgtacaaggacattgatcctaacgacgaggactttagcgagttcaatgcgatagaccgcatcatcttccgcgcgccaattcgaactgagtatcgagttgcgttccccttcctctacaatacacttccgagaagcgtcaaggtctcttggtactctcaccctcaagttgtatatgtccggaccgacaatcaccctaaccttcctgctttctacttcgaccctgtcatcaaccctatctcttcccgctccgtcgcgcccaaaaacattacagtcagtcacgaggatgagatttttggacctgggggctacgaagatgacttcgagcttcccgctgaggtggagccattcttcgctgatgaagacctctacacgcccgaaactgcctctgctattgctttgtggtgggctcctcatccattcaacaagcgttccggcaaaatggtccgcgcgcaggacgttcctctagtcaagcactggtatctggaacactgccctcaaggtcaacctgtcaaagttcgcgtgtcttaccagaaacttctcaagacgtatgtcctcaacgaacttcaccggaagaaacccaaggcccaaaacaagcaggacctgctaaaaaccctgaagtcgacgaaattttttcagcagacaacgatagattgggttgaggccgggttgcaggtctgccgccagggcttcaacatgctgaaccttttaattcaccgcaagaacctgacctacctgcacttggattataacttcaacttgaagccggtcaagaccttgaccactaaagagcgcaagaagtcacgattcggaaacgctttccatctgatgcgagagattcttcgtctcaccaaactcatcgttgatgcacaagtccagtaccgcttgggaaatatagacgccttccagcttgctgatggtattctctacgccttcaatcacgtcgggcagctgacgggtatgtaccgctacaaatacaagctgatgcaccaaattcgatcgtgcaaggacttgaagcatctgatctactaccgcttcaactctggccctgttggtaagggccccggttgcggtttctgggctccagcatggcgtgtctggctattcttcatgcgtggtatcattcctttgcttgaaaggtggctcggaaacctgctttctcgccagtttgagggccgtcacagcaagggagttgccaagacagttaccaagcagcgtgtagagtctcacttcgatctggaacttcgcgcgtctgtcatggctgatttgatggacatgatgcccgagggtatcaagcagaacaaggtgaacacggtgcttcagcacctgtcagaagcatggaggtgttggaagagcaatattccttggaaggttcctggtctccctgcgcctatcgaaaacattattttgcgatatgtcaagagcaaggcggattggtggatctcggtggcgcactacaaccgtgagagaattcgtcgtggtgccacagtcgataagaccgtcgctaagaaaaatctgggccgtcttactcggttgtggctcaaggctgagcaggagcgtcagcataactacctcaaggacggtccgtatgtgtcgtctgaggaagctgtggcaatctataccacaatggtccactggctggaatctcgaaagttctcacctattccgttcccaagtgtctcttacaagcacgatactaagattctgattctcgctttggaacgtctgcgtgaatcctactctgtcaagggcaggttgaaccaaagtcagcgtgaagagctggcccttatcgagcaagcatacgattctccaggaacaacactggcacggatcaaacgattcctacttactcaacgagcatttaaggaagtcggaattgatatgaacgacaactacagcaacatcaaccctgtgtatgatgttgagcccattgagaagatcactgatgcataccttgatcagtatctctggtatcaagctgagcagcgtcatttgtttcccgcctggatcaagccgtctgattctgaagtccctcctctgctgacttacaagtgggcccaaggaatcaacaatctatccaacgtctgggaaactgccgatggtgagaccaacgtgatgatcgagacagagctatctaaggtctacgagaagattgatcttacgctgctgaaccggctcctgcgtttgattatggaccataatctggcggattatattacctcgaagaacaatgtacagctgagctacaaggatatgaatcataccaacagctatggtttgatccgtggtctccagttctctggcttcgtgttccagttctacggattgatgatcgatttgctcctccttggcttgcaaagagcaagcgaaatggctggtcctccccagagcccgaacgacttcctccagttcagagaccgagcaactgagacgagacacccgattcggttgtatactcgttacattgacaagatatgggtcttcttccgtttcaatgcagacgaatcgcgcgacttgattcaacgcttcctgaccgagaatcctgacccgaactttgagaatgtcatcggttacaagaacaagaagtgctggccgcgagactgtcggatgcgtttgatgcgccatgatgtcaacttgggccgtgctgtcttctgggatttgaagaatcgtctccctcgctccattaccaccattgaatgggacgacacctttgccagcgtttacagcaaagataaccctaatcttctgttttccatgtccggctttgaggttcggatccttcccaagtgccgcaatcttaatgaagagttctcggtgaaagatagcgtgtggtcgttggtggacaactccacgaaagagcgtacagcacacgccttcctacaagttacggaagaggatattcagaaattcaacaaccgaattcggcagattctgatgtcgtccggctcaaccacctttccaagatcgcaaacaagtggaatactgctctgattgccctctttacgtactaccgtgaagctgctgtgtccaccgtcaacctcctcgacaccattgtcaaatgtgagaccaagatccagactcgcgtcaagatcggtctgaactccaagatgccgtcccgtttccctccggccgtcttctataccccgaaggaactaggaggcctcggtatgatttcaggctcgcacatcctcattcctgccagcgacaagcgatggtccaagcaaaccgataccggaatcacccatttccgcgcgggtatgtcacatgacgaggaaactctaatccccaacatcttccgatacatcataccctgggaggccgaattcatcgactctcagcgcgtgtggatggaatactcgcagaagcggatggaggctcagcaacagaatcgtcgtcttaccctggaagatctcgaagacagctgggatcgcggtttgccccgtattaacactctattccagaaggaccgcagcactctcagcttcgacaagggtttccgtttgcgcgctgaattcaagcagtaccaactcatgaaaagcaatcctttctggtggactagtcagagacacgatggtaaattgtggaatctgaacgcttaccgtaccgatgttattcaggcactgggtggtgtagagactatccttgagcatactttgttcaaagcaacagctttcccgtcctgggagggtctattctgggagaaagcttgtcttgccaacggcacccagttgttgcgatacgatggcaccaaggtcaatgtcgaggatgtcaaggagggagatctccttctcggtcctgacggtggacctcgccgagctttcaacgttgtcagcggcaaagatcgtctctaccgtataaaaatcgacggggacaaggaagatctcgtcgttaccgcgaaccatatcctggtccttcatcgagcgaaagcaatgaacaccagtgtgtgcttcgatcggtcaaaagagcagcaaggtggcgctggcgaacaactggatatatctgaagtatcagcagcagagcgctacgacactgtagaaatgactgccgctgaatttgctgcactacacccgcaggaacgaagttggtatcgagccatcagatgtcctggtttcgaattgcctgagcaagatgtgccagtgaatccgtatttcctcggcttgtggctgggtgatgaaagccgcaatcaatcggcaatctattcgaatcatgaagaagcactccgtgagttcctcgtcagtcatgctgctgaattggacatgcatcttgtctaccatggtcaatcggcatacagcaccgtctgtaacaaagacagaccaaccaataaacggattgggcctgcgaatcaaactcaaacagtgcgtcctacgattcgtcaaactcgacggaccattcgccagcagcggctcgccgcggagcatgccgctgcagagtacaccacacagcgtgagacagctagcttaactccccttctcgagtcgcccacgagtgacaaacacggccttctttctagcgtcgagactcctgggagactgtccgattctgtgacaaccgagctcccaatgtccagatctgcatctgccatgagatctattcgaactgcatccggactgtccgaatttaatgatgtgacgaacgtgtccgcttccatgccagatatccaaaactccggtattaagaaccagggaagaattgcaaaggtgacccgacagcaggattccaagggagaagtcgacttccgacagcaatattctcaagcaatcaaagatgacctggagttgcttgaaacagatattgaagatgatgttgccagctctgacgaaattgaggatgtttgcgtggtaggctcggaaaatgaactgattggaagtgaaaaacaagaccagtccggtcgccgtcgccaaatccatcgtctacgaactggtcatcgaggatatggcgatctaagtgatgacgaacaagagcaactcttggattctgtcgtcgagcgttatgctggggattctcgtctgaatacactccagcaggaacttagcaagatgggtatactcaatcctgaaacaggacctatcaacgacaagaagcgtattccacaagtctttatgcaaaactcgcgttccgttcgcctttctgtgttagcaggacttcttgatagtgacggatggtatatttacccagaaaacatgttcggtttcgcgcagagtgagctctgtcataaggagctgttctgggacgttgttacgctagcaagatctttgggattcggcgtttggacaaagaagcgcatgatgccggacccaacaggaaagaggatgtcaccaatgctggtcgcccagatatccggagacttggctgaaatcccatgtgttctcgcaagaaaaaaggccatgccgcgtcttattccccagtcacatagttttgccatcaaagatatctctctcgaatctgaagcaactgaatgggctggtttccgcgttgacaaagatcaactctatctacgacatgactatgttgtactgcataacagtggcttcgaagagtaagtctcacttgacctgcccccttccttgttttcttccttttgcacttctcgtggtcggattttggttataggccaccctcgatacaccttctttcgctgcctaactcacgaatcctaattctaaactcccattgttcacggttgacccacggccaaaactaactaattctctaggtctatgaaattcaagaagctcacgaatgcccagcgtactggtttgaaccaaattcctaaccgtcggtttacgctatggtggtcgccaaccattaaccgtgccaatgtctacgttggtttccaggtgcaactggatctcacgggtatcttcttgcacggaaagattcccactctcaaaatctcgttgattcaaatcttccgtgctcacttgtggcaaaagatccacgagtccgtagtcatggatttgtgtcaagtctttgaccaggaacttgagcagcttggcatcgaagcagtccagaaggaaaccattcacccgcgtaagtcatacaagatgaacagttcgtgtgcagatatcttgttgttcgccacgaacaagtggaacgtaacccggccttccatcctcttcgacactaaggatgtgtacgagcctaccacgacaaacaaattctggcttgatgtgcaactccgctacggtgactacgactctcacgacattgaaagatacgttcgcgctaaatacctggactacacaaccgacagcatgagtatctatccgtctgcaacgggtctgatgatcgcaattgaccttgcttacaacctgtactcggcatacgggcagtatttccctggcctgaaaacgttaattcagcaagcgatggccaagattatgaaggccaaccctgccctctatgtgttgagagaacgtattcgaaaaggtctacagctgtacgcttctgagagcaatcaggagttcctgaactctcagaactattcggaactcttcagtcctcagatacagctgttcatcgacgataccaatgtctaccgtgtcactattcacaagaccttcgaaggtaaccttacgaccaagcccatcaacggtgctatattcatctttaatccccgcactggacagctgttcctgaagattatccacaccagtgtttgggcgggacaaaagcgtcttggtcagcttgccaagtggaagaccgcagaagaagtcgcggctcttattcggtccttgccagtcgaagaacagcccaagcagcttattgttacccgaaaaggtcttcttgacccgcttgaagttcaccttctcgatttccctaatatctccatccgtgcttctgaactccagctgcctttccaggcagctatgaaggttgagaagcttgcagacatgattttgcgcgcgacagagcctcagatggttctgtttaacctttatgatgagtggctcaagactatttcaccatacaccgcgttctccagattaatcttgattttgcgtgcccttcacgtcaacatcgacaaggcgaagatcatccttcggcctgataagagcgttatcaccttggagcaccacatctggccctcgctttctgatgaagactggatgaaggttgaagtgcaattgcgcgacttgattctgaacgactatggcaagaagaacaatgtcaacgtccagagtctgacaagcagtgaagtccgagatatcattctcggtatggaaattagcgcgccctccttgcagcgacagcaagcagcggagattgagaagcaacaggaggaggccaagcaactcacagctgtgacaacaaagacgcagaacgttcgcggcgaagacatcattgtcactaccacatctcagtacgagcagcagtcgtttgcgtccaagactgagtggcgtactcgtgcgattgccacgtccaacctccgcactagggcaaacaatatatatgtctcgtcagacgatatccgcgatgagggttatacgtacatcatgccgaagaacattctcaagcggttcatcatgattgccgatcttcgcgtgcaggtagccggatttctctatggtagctcgcctccagacaacgaccaagtgaaggaaattcggaccatcgtcatggtcccgcaggtgggtaacactcgcgaggttcaacttcctcagcagctaccgcaacacgattatctcaacagcctagagcccctcggagtaatccacaccatctccggcaatgagccgccatacatgactgcacaggacgtgactcagcattctcgcctgatgaatgcccattcatcctgggacaagaagacagtgacgatgaccgtatcgttcacaccgggttcggtctcccttgcagcatggggtcttactccccagggttacaagtggggagccgagaaccgggatacaacttccgatcagccgcagggattctcgaccagcatgggcgagaagtgccagttgttgttgagtgacaagattcgcggatacttcctcgtgcccgaggacaacgtctggaactacagcttcatgggaagctcgtacggaagtgtcgagaaacgcccggtatatgtcaagattgacaccccgcttcggttttacgacgaccagcatcgcccactgcacttccagaacttcgcagagctggaggatatttgggttgaccgatctgataactttgcttaagcgacggaaggcgttttaatgtttgtatttttcacccttcgtctctctgcattaatacatttgtggtaaacttgttcttacttgtttcattatgatgatctgaaagcaatattatggatgaaaggaaaaggcattctggggatgaactggccagtattgtatgtatttagtttactaaatctgttctcggccagtgatctctacgaatatagtaatcatcatctgggtgtggtagtccgagcccactaggcactgtgggacttgagcctgaaggtcccttcttgccattctgccaattctttcgacatttcctccatcgatactcctcgcttccttctcatcgttgaggtgagtacggcaagccattattgatttaaattttttgtttcagtcgcttgaaaagtttcaccctacgcggaaatgcaactttaccgctactagttccgatccctgacaattggggccagcttcatttcgcctatcgagaagcgtgggggtgggatcatcgatccgttcaccattgcttcacggcctcgac

SEQ ID NO: 5632 - DNA, 5499 bp, Emericella nidulans
catcacaccgatggaaccttcgcgcttgacgagcaacagttctgctttcctgagaaagaacacagcgcttggtgcggtgtcgccaaaacaaacggcgatgaaaatgactactgtctgaccaacgggctttgtctgggtcaggtcaagggatacacagggtttgtgctgctcaatagctgtacggactcaagctgggagagcgacgattgtccaaatttctgtcctaagtgtatgtacgtcccgagtcggacctaggaggtttagttgtttgcacagtcctaacatgagcgctatacagcaatgcaggcctcctacggcatccatatcctcccctgcctggaaaacagcaataaccaatggtgctgcagcactgatggctcggactgctgcgacaacgccttcgagctggacatgggaaaattgatgtatcccgggcccggcgggaactggacgaacccgacatcggtgataaaccctcccacaagcacgtacgcaagcacaaccagcagcgcaggtgacaatgcctcgcaaatagccacaactactgtcacggtgacaagcgatccggactcaggctccaactcatcgtcctctgagacctgcgacaacggaacagggacctgtcaggatagcaagaccaccattgtaggagtcggcgtcggtctgggcgtggcgctggtcgtatgtcttgcttcttcagcagctgcgctgtgcttccaaagacgccaatttaatcggcgcttggaggagacgaaggcgagttatctggcgtctgggtatttgcctgcaccacgggctcaggcggagttgtatgcgtcgaatgcgcggccaccaatagcggagttgccggcgaataaacggacctcgatatttgagatgtgaagtcgtggatgtatggccgctttgcggacccactgtgtatattgctagctttacatacgcttgaacatgatgatatgacgatattatgcccaccctttagcactggatagtggatagtacctgcattccaacatcagtcagagtcgactgggaaagactaaacagtggttgctttttgagtggtgagtctcacatggcaagttcatgttcctgggaggacaagtggtggacggggatccgctgctatacgctgtgaactcttgagggaggacaattatatattcatacaaaaggatcccaaagggtttttctttaattgacccctgacaatgtgaataagtatatctcgcagtcattgacctgcaccgatatttcgagactacgctgtctacattgtatacgatctcatccagaaactgaggttaccttcaatagcttgtcgattcatcatgtatttccttctctccgtcatcttccactttcctgtcttctgtgccggctttccacctgccgtatccagaggtacgtgattcaatgtgctcagtaatccggcttgaaccaaccgcaatagaaatatccacaactctcctcaccaaactcaccctcatgtctcaatactctgctgcttcaggttgcagcgaaaacaataactcttctgtagggagttctgtttattgcggggctgaaatgtgtccgcttatcgacagtgccaatacagaactcctttatgcattctcagagtattcccctttcgatatctcattggattaccatactcaatagacgctaactctttactttctcattacacaggatttaccccggcgatacggctggctacattgccgccgaccacacaaacgcccttctgatcatctcgtttcgcaatagcgtgacccccacaaacttcatcaccgattgggcattccttcaagtcagcgcgcctaccgcgtgctccggatgccgagcacataaagggttctggtcggcgcccgtggccgccgacaaggctttagatggttccatcagggaggcaaaggccagatacccagagtacgaactgacgttgactgggcatagtttgggaggtgcacttgcaacgcttcatgcaattttcctgaggaatagaggagttgctgttgattctgtaagttgaggctttgccgcaatgacgacccgagcaacttgatggctgctgatgctgactggactgctagtataccttcggcgcgccatcggttggtgactacgcaatggccgattacatcacgaacgggcccggtagcgacaatgggaggaactatcgcgttacgcacctgaatgacgtctttccaaaaatgctctaccgtgcgtctaggatgccggttgcagatcggctggtacaagagtacagccagtccgggccagagtactggattacgtctggcttcggcgagcctgttacaactgcggatgtgcacatccttgagggcgtggataatgagcagggcaatctgggaagagaacctggcagtctgagggaccatatgtggtatttgggggcgacagatgcttgcccactaggctgactcttatcttcgttatcttttgttggagaagatcccattatcttatctgtgttatgcggggtacatataagagtaaggctgtctttcccattcgaattcagaaaatcgcaaaagctctagtcctcaattgaatttttgttcgctaaaatgatctatcatcgctccaactggatagacggtcaagagactcctcccaccgcaaccaccatctccgttgtcaaccccgcaacagaggaagccctcgcaacgatcaacgcaacaccctccgaagccgtcgacgagatcataaccgcctcctggaagaccttccactcgggcgtctggtcccgaaaagatcccagcgacagatttgccgttttgtctagagcttctactctcctccgcggccgcatcaatgacttcgttgccctcgaaaccgtccaaaccggccgtcccattcgcgaaatgcgtacataattggaccgcgatgctgcaatagaggatttctctcggattaaggccgagaccaacagcatcaagagcaatctaggcagtctggacactgctcggatcctccctagcccccgtctgcacgaggcaacgcggactgtgcttgccatcacaggcgcagcaacggagctggtagcagagccgtacagtcgaatccaggaagttgcctgccagtattttgaatcgcgggcccttttcgttgctgctgagcgccgtattccagatcttcttgctggagccggtgagtatgggctgagcgtcggtgagattgctgaagctactggaatagaagagcggaaactatgtatgcttccaagtgctttcccgatccaaatcatactgtgagcaaaagatgatgctaactcctattatagctcgtatcctgcgttgtctctgctcaatccatatcttccgacagataggaactgatcggttcgccaacaaccggatctctgctgccctgaagaataacgagccactgcgcgcatatgttcagctcttgtatgcacttatatcctccttcccgcgctattcacattctgacatggagacagcaatctcgacatctacaccgcatctgaccagctccccaagtatctgcttagctcgcagggtgcttcttacaaagtgcacgagacagcatggcaaaaggccgtgggcactacaaaggcacggtgggactggttggctgaacgggtttcactcgacgaggtgcgaccaaaggaggctccataccccggactgccggatgtcaggcacttgcaacccggtccagacggcaagtacgcgcgtcctgagctggataattttggactggcgatggttggcggagggaaagtttcgggggcggcgcatgcatacggtacttgacctgcccaacttgacctagtatgacatgcagggcaactgacgacttagacttcccctgggcatccctcggcgatgccctagttgtggacgttggcgggggtgtcggtgagtgccccattttatactctactcctagaacacgagtcccattccaggtcgattctagattcaacgaactaaccggaactgactgcattctataggtggattcgtcctgcaactgctaccagcatatccccagctccgatatattgtgcaagaccgcgccgaggttctgcagcaggcacaggaggagatctggcctgttgaagcccctgaggctgtagccgacggccgggtacagttcatggagcacaatttcttccagccgaaccccgttaagggggcagatgtttactggttacgtggaatcttgtaagtggagtctagccgccatccaattctctcacgcctctctgtaaagggccggatcgagctgacagcgccacgcagacacgactggtcggacagttactgcgtgcagattctctcagctctgcgcacctcgatggctcccacatcgcgcattctggtatgcgatcaggtcatgaacacgacggccggctgcgatgagatcccccctgccccgtcgccactgccggctaattatggctattacatgcggtacccgcaccaccgggatctggcgatgatgtcgattatcaatggaattgagaggactccggcgcaattcacggaactggtgaagcaagctggtctcaaggttaacaagatctggaattgtcggagtatggttgggattgtggagattggcttgtaagtagggtagcagggcagtagtatagggcgtccagcgcgataaatatgcaatattttcatcagagaaagaacgagaaagatcgccatcaccgccgtctcagctacatggggttcggcaattacacccaattagggattggtatctaaactgtcaatgctgtcattagtacatgatggtctcacgtgtgcaggcttcttttcttccgcaaaaggccccgtgcgtgacgaactgcaggtaagaagttagcgccaacaaacaggaatagttccgaaactcagctccattcatagaaaggccgggttgatttgggctatctgcttacttgatgttgtggcggagcagtaaatcaaattgcatacacctttcctgcccgaacaatagacgccaagtaaatctgaccatggaaattatcatctggcctatatcccagttctcctaaatcctggttattctagatctggactcgggtataggctgacgaacaggcgtagactccactctccaataaaatcaccgtagattgccggggtgtctgtccacttgttggcggagacctatcctggggcgtaagccattctgcagcgaagacagtcagcctttgcgaatcttaagccgtgtctttgcacactcagaggtccattaatttgactcttgcggcggttagttgtgcagacgcctctgccttctttagtcctgttatcactagtataccagcctctcggtgtatataccggaattttattttaggttaagcttcagccagaccgttaagaggcaacgattatccaggaaggcccggagtatacggcgggggcgtcagggtttgctgagacctgcaaggccgtttcagccaaaactggcagcgaaagt

SEQ ID NO: 5633 - DNA, 2673 bp, Emericella nidulans
aaaaaagagatataaaatagaaaaaatggaaaaattaatgatataatagaaattttgatatgctatagaataaaagtaggaggaccaaggcataaaaataatatgctggttagaagatcaacaacgggcgcaaataagaaacatttccgctccgggataggtgtaggtggaataagaaccctattggacttcgggggggggtacggcaaaaacttataaggcttaagacctaaacgggctataaacttaaataggcttctaacgaaggcacacttcgggaatgccctggccccattattgcacaagctcaggcagttagatagagctcgagtccttttaaggtttgtcaatccgcaatctctaagcaatgactacgcaagcctcaaactatcggtgtaccaggggacctcagccctcttcttctctcctccagaccagcgagattttcccctcgcgtacctttccgtattccgcgtccagttcctcctcatccttctcgcccctataattttctacctcatccacagcatccgcaaagactaccatgccttcctcgccctcggtcccggcggaaccccatcaacaccagcaggctacctccgcatttgcatccttcgtcttttcaccctccgagatcccctcgacccgccttccattccacaaaccctctacccaaagaccggtttcctgtcttcagccaaaatcgcagcccgttcagggccccgcccaaccgtagcaggaattgctccgcagcgccaaataacccagaaagcggggccggtcatgtacgatgccctggcctcagaaatccaccgcctcgcactcgaacacccaaacacgctgtacactgcgacctcctgcttcgagaaacacagcacaggcatcttctaccgcttcccgaccaccacgactgcagccgcatccagcaggaaatcccccaaaactacatctagcacccacaaccaccgcatcacctgtaatggcgaggtctgccactcgcatcctagtgacggaagcctgcaccttaccctacatcccgcagacgtgaagctcgtcctcgagcgcggttgggcacagcggcacccactggcgagggatagtctgtggtggatgatgaagctggtaccgccgggattcgtgatgatctatgcgccgagagacgatgaggaattaaaggttgttgtggagattataaaggctgcggcgtggtgggttggggaaaaggaggtgcaatagactgtgggtagtttttcagtggtctataaggtaggtttaatttggtaagtcgtcggttaaacttgggaactacataatgctaggtattgcttagcgatgatgggttatggaaataatggcacgttggactgcacgttggactgcatgttcaatttagcggttactctttaaattgaatgccgtatcgtaaaagcaatttctatttaagacataacaagggcccttcatctcgagcaagcgatatacaagtcctactacacatgccaaaatatacactcctcgatcagtgctagctttatttcaaccacgaagggagaaaggtggggataagacaatatgaaaagatgtttggcaatagaaagagaagaggacgatttttcaagtgcaaaggataatcgatcgttcgggccaacgccgggattagagggaagagagaaaaaggaaagctaatagcatagagaaaataaagagccgttaggaaacatacagaaaccaccgagtagcacatcacatcacttccctatacgaggtgtccgtcggcccccagttccccatccatcatccccaactcccagtcaaaagttcaggtatctatccattcatcacaactaccgcaattagtcgcggccagtcttccgcagcgtctcggcaagccattcaagtccttcgtacagaccgtctccggtggtggcgcaggtagattggatgtactagaaatgtgttagatatcgatgataaaccagaatgatcgggtcaacttacccaggggcgacgagtgaggctctgaagaccgagctgctgggtgatctcggcggggctcatggcgttctaggaaaattcgaatcagcatctaatgtttatcgaccaggtcaaggtggtgcgtacgggcaaatcttgcttgttggcgaaaacaagcaaaagggcatcacggagctcatcctcgttcacatgcgttgcagttcttcccgggcctcgacaatacggtcgcgatcgttgctgtcgacgacgaagatgataccctgggtgttctggaagtagtgtctccagagaggacggatcttgtcctgaccacccacatcctacacgttaaatttcacattcttataggtgacgctttcgacgttgaagccgactgtgggaattgtggtgacatcctggttggtgagtttgagtttgtacaaaattgctatggaagtcagtaaacgctcgcgagagttttaagggaacatgaatcggcaacgtactcgtctttccagcagaatccaaacccagcatgagaattccgcatcttctttgtttcaaaaattttgcccatgatcttcgacactgaagccgccatcttgacggatactgcgcgactgcgggggagaacgtagaccggtgattaggggttgagaaagtagaattgggacttggggtttgtttccacagcaccat

SEQ ID NO: 5634 - DNA, 8639 bp, Emericella nidulans
cggaggttatgcgattaatatctcagcacgggggttggcttgataaaaagtcgaaagggaacgggcaagctcgaccacccaactaataaggtcagcggcattctgtaatgtggccacgggggtgaggcgctgcaagtatctcgtcccggactcggacagacctttcagcgttggtcaacgtcaaagcccgagggcttcttgtcctgtctggaccgtggcaagccatggtgcatataagtctcattatcgcactaatatttctttcgatctcccccagtccgcgtaagataagatacagagttctccgtagattggagtatgggccctggtgtaccgaacggaccagataagctcgtctgacaggtatgccagcatctacatggtagtaatcatactcctgcaggcggtacgacgactaacctgaggcagagactgtagtacagtctttgcttttttaaagtcacggccgttggcccccagacggccaggataagtcagggaaaattgcagggtgaggaaactcggattgccgcatcgggcgagccgagtcatccgaaaatggactagtgcgtaatttgtgggtaattgaatacgccacagtctttaatccggcttgactcgtatctactacgactactgctatctactccggagtggcattcttgggtaacctagtaggcagtacgacctaccgaatacgagctagcgtcgtccttgtcgtagtatcatgtagtatggacattgtcgtagtatcagagtatgtcgacgggtctgtgctatcacagctatcacaggcttgtctgctgtacgacacgtaagggcagaaactgaaatgagttccacggtttcggctgccaattaagcttgcgtcgatctcatttcttttcctgctggaataatttcttcttccctctttaatttattctgcttccctccctctcttctctcttcctgaactctctcttctcaatcttcctctctcgatcattctatactctgtatcattactgacagaatcatcatgtcgctgtctccggtcctgttccatctctgtcgcatgcctggttcggactgcagtccctgaccatatccaaactttcctgctttttctcgacgtcaactggtactcaagtcgacggaacttggttcctgctacttgctgctcgccaccgtgactcactacaagagccgttccttatctcaaacgggctgcgtctcgtcctttcgcccgttttctctactgtacggagtactgctactgcatatatctgtagtggccccgccttcatcaatacctaggtattattacggtcttccttgatacgtctgctatagccatactatcaagaatactgatttcgaggatatttcgtcttctgatcagctactggagagacaatctccagggccagtatttcttatcgtgcattttatctcggagagcaaacaataatcatggcgacttatacgcccgtgcagctctcaatttccaccaaatcccatggcgccgctgctgcgccaggacttggccttactccccctgtgactcccaccattgatgaccgggctggcagtcccaatgctactttattgcctctcgtggatacgtgctacggcaacggagccgtagctgtatccaaccctccgcatttcctcggtcagttagagtaccaactcgacgaagaagaccgtcctatcacgtttggaaccggcgcgtggagtgttgtctacaaggcgtttgcctccccccgcacgagtaatgcaacgcgcccatttacgcccccaagctcgcccagcccggccggccgcttggttgctgtcaagtcacccggaagacgagatgcccgccccgtgatgtatgcagaagctcttgcgctcacccgagccagcgctacacccggctcagagcgtcatcttgtgccatttcacggctatatcaccgactccagctccatagtaatgtcagcagttcccttgaccctgtcaagccatatcgaagacaaggcccgcattgcccagcagaacttcagcatacgaaccatgcacgaacccgttctagggatgacgcagtggcatgatcttgccaagaagctcattgagggtctctcctggctccatagtaacgcccatatcgtacacggtgacatcaagccacataacattctccttcgcccacgcaattccctcgacagcgacatcgactcggcagaattcccttatgaaccgctttttgcggacttctcctcctcatattccacttcttcctcaggaactgaaataccgttaaatgcctgcctctcagccgtaacaaccccatttacagcgccagagctgctcaaagcccttcgctcgccggacgttattccggagcccgcgtccgatgtcttctcccttgccgtttcacttcttggcgccgccactggcgatatcttagtttattctgggctccatccgaccctgcgcatacagtgcgcaaaggacggtcatcttattattgaatgggcccgtcagtgtggaactaacggtacacgcgtccccccgaacggacttgttgagaagctcctcaagccggcagttgcgaaagttcctgctgagcgggtcactgctcatgcatggttggacatggccagcactgtctagccaatatatcttcatccgctctcccatcatcacgaacatcggctttgtcataatacacactctcgagcatctactccggcatatgtttcttctagatctatccacatttctgttgcgatttgggttccgcgggtttgattcagttacgcatgtatatgtttttgcgaacattttcttttatcttccttcttaacaccaatttgtgataccctattattacaaggccaccacttggctctatttttcttcgggaactatgctatgccatgtcacgctatatgtactacttagcccatgtatgcatttctatacacctggagtttcaagattgtcatgtgctacgccacgttataccctgcctcgcctattccgactacttccgacttattaaatgggatgaggcgcgctaggtatatactctacatgtcgaccacgagtctgtgtgtcagattctatattcttatactatacatatgagtgacaggatgcattcgaagttgacctgattcataagtttctatctcttccgcagttcaaataccatgagtttcgtttatatacgagcgacatcatccacatatacagcaattatccaatcaccgaaggctagtaccgtagccttcaagccacctttgtctgaaactattctagccagcaatcacccaagcaccatcgactaccaaacacaattcttaatatattgattcccagggttcagtacgcaaattgtcccgacacaagtaatcctgatatcctattcgatgctatagtaaattatcccctaattaactggccgagacgggcatccaagaccgggaccccaaacccgtcgatcagatcacttcccgaacgggcagatccgttaattaaagttccattattagggctttctcactactagtagttaggtgttcacccagtagaatcaaagagggacgaaaaaaaaaaggacatggtatctgtgctatagtccctcaagatgtaggattgtcatctgtagtaccttcctggctgtcatctaccggagcctaagaagctggcatcctactacctggacgttttcgatataacagagtatgtacaaagttagggaaagtaaagctgaggttgatcagtgtattatgcatatccatgggtatcatagtacctgcgtcaatttcttgtctttgaataaagatacgagatggtgcaaactttacgaactgttacccaaggagcgatggagagcagcagtctgccgtagatcggttgttgtattcaccaaacggcatatacagcacagacccacaacactacctatctatattgacatgtttatggtacaactatagagaacaatgtatataatacaatccgaatgaatctagcaatccctcatcccggtcagaaaacgccattccgtctataacccaaagagcatccagacaaattgacgtcaaagacgtgtgttgcataccgttagtaataaagagaaggaagacaggaagatcaccacctctttcgcatcctatcaccaaaatctctggtttgcgcagctgtagtcgtaccccccattatccgagtcaggtcgacaagaggaatatccatgccatttttggcaaattcaacagcaaggctccaaacggtctcgacggagagtaggcggagacggacttcgctcaagtcatagacgaggttctcttgataaccagagccggcatcttgctttgcgctgagacagagtggatcgtagtgcacggttttaggtaatgaatcaaagtccggttttgggcgcttggaggcgtaaatggcgagggtgggggcggccctgaccaggtcattcgcggagtacgtgtggaagatgcgcttcatcaggtttgggacggtaacggtgttgctgacttggagggagacggaaaaggccgtgaagaaattagaggccttgtctttctgtttctcgtcgagttgctgcatgtaccgaagcggtacggggtttgggtccgcttcgaagtacatccatgtcctgtagatattttgaggatacaactcgtccggttcgataaagagggggttgaagggccggcggtcgaaaagaagaagggagttgtccaggtcatcattatggtaaactgcccgcctgtcgtcttttaggtagggcagagagcgagagatttcggaatgaagactggatgtttctttgttgagagtagcttcagcagcttcaatcggctcactagtcgtgttgatggtactaagttcggtatccgggcgtgccgcaacccgcaagtcatctttgatgaggagttcgttctcgctatgtcttttgcatgctttaatggaacagtatatctggtggttgtcatgattgatcgccgcggctattttgcggtattgattctgggcctcctcatattcagctgcctttgggctcactgcctgagtttctccatatcactcaaatatttctcatgctgaggggtcatggcacggaacgtgtagggcactggtttcggagcagggatagggctctcaggcgctgcttcaatcggcgggaatgctcgacccgttggaacgaaaacacccgtctcagaggtcctctgtttaacgcgctcttcaaccgctgtaagcacatcccattgccttgaataagcatgatatcctctctgatcttcaaccgttgatgctacctcgaatgcatgaagggcggcctgttcggctagaagcgattgtcgaacacgggagccgatgttgcgcggtaatattgcgttcacgtctgctgcggtcagcgagaccagaagccgtacacttccgtaggcatgcaagccgttctgccgaagacattcctccataaacacctgtacccatcgcgaggcacgaaagtggtctttcgccgaacgcgggccaggcgggtttgccaggaccaacaatgtgtcattgcttgccaggagcccgcttttatgggtgtttgccgggctttgttccggaaagtgttcatcaagcaggcctttccaatctcgcaggccggtgagtttcgtttcgactattgagcagcttggccgactctttgcccagggctcaatgaatcgcttaaaaatatccagttccggctcaatgaggacatgcctgcgcggtttcaggtagtcgtttattttggaggagaggacgccggcgccaggccatagatcaagtacgtctaccggagcatttcgcgagagatacggggaaaggcgtttcagaatatcgtctatagaaaattaaactcagaacaaagtcgatagatatcgaggtaggtttacggaccacatagcccttcgcttataatgctcggtttctgggttctgcttcctttgataggaagggctttgtgcaacgcgctggtaataggaaatcgtgccgagggcgtgtatcgagggagtgcctgcttggaataacgcggcatagtgaaataaagaaagtctaatgctagttcataatgtgaaagagcagatacgaatgggcgggaggttgctggatatcggcagcgtagttggctttgtttaagggcgagctttgagctgcgcggaagagcccaaacctccgacgccccgccgatccctctcttcgctcaattccaccacctctcgactcatcctcatctcatggctcgaacttcccttcgtttatgtcgagccttcctgcagatgaaatatatgattatgatcgatcgccgtccgtaacatcaccctttttctgctgcctaaaaccacccttgtctagcgggatttaagcccgtgactgctccgcaatacaaagcaagcttcccaaacgacagaccgacactatatagacatggcatctctatccccagcccagagcggaggcgcttccgcacctcaaagtgtggagaagatcagccgtttagctcaggactacaaattcaaccctgcagttcccttacggtactggctgaggacggctgctaccctagttcgtgaggttagtgatgcctctatgtatctttgtcactgttgctaatggatcaggttaggctcgaatctacctgcgcgaaggacatgatgaacaggcatacctcctcctcttccgacatgctcaattagtgcttgttcatttagccgaccatccagacttgaaggatgggaaagatgtgagggaagaacggaaggctctaatagcggctgagaaggaggtgaagcagaatctggagatcctggaaaaactgaagccgcggatcaacaagcgatatgagcggcatacacagctgatgcgtgaacgccagtcccgcatgtcctcgtccgctgcggtcagtcccgctgcgtcgagccagccgtcgccacctccggaccccgctctgtctggtgttgccgaacctctagaagctgggaaggataatgagctagctgtcaagctggctcggaccgagattagtcgtagggcaaccgtcaggaacgcgatgcgccaaggtggactcagcggtgaggatgattcgagccgacgcgcggcagggatatggggtgactgggaagaagctctgcagcgaaatgagaggagggatcccgacgatctgagtcgacgcattcaagaagtgcgactgaacctggagggcaggccacagatttcaagcaagtctgtaacgcggccgctgaccaatgtctcatctacgcccacttacaaatatccaactgttcctcggcagaaagcgcttgatgttccctctgttccggtggatattccacagaccaaggcccgcgagctcacctagccaccggttcttcctccgaaagagagctttcataactagccagccaagcgggcttaagcttcccccgcgtccggacaagatttcacagacagttccgccagcatctgcagcagcagtgccttcgaaagtgccaggggtcgacaaacgcaaggtattggacccctccagcttcacattcaagccatccgccgaccttggaaacggtacgcctcatcgcgcagtctttcttccaccacagatgcggtcacattttctgtcgctcgccgcgtcaaatactcgtaagaatttggaaacgagcggtattctctgtggtacaatgatatctaacgccctctttatctctcgacttcttatccccgagcagatatctacatcagacacctgcgagacagtcaacgagtccgccatttttgattactgcgactcggaagatctaatggtgcttggctggatccatacgcaccctacccagacctgcttcatgagctcaagggacttgcacacacattgcgggtatcaagtcatgctaccggagagcattgccatcgtttgcgcgccgagtcagaccccaaactggggtgtattccgtttgacggaccctccagggctcaagtcggtcctgagctgtactcagaccggactgttccatcctcatgctgagaccaatctatacacggatgcgttgcgcccagggcatgtttttgaggctaatgggttagaattcgagactgttgaccagcgggtgaacaagtcatgatcacgacttctctactctttgcattatgttttctatattccccatgtgtaattgtggtgtcagttttaatttccgacatgaatcatgagcaagaagaataatcatatattgacctaaaaatgtcaggtaattcacagtttgacctgcatacctccgggcagttccacttaatgaggttaagacttaagggagtgcccacccaaccaaacaaccggagccttattcacttcagttctcaaattgaaatctgagaggaacttgtcctttgtgaactttgaccaccttaataaggagaacttgccatgaaccaaaaaataagggggtcatggtttttttcccccttgttatatacaacctccctgcttaatgggcgccttccccgatcaagacgaggatctgtctcttccaaaacgtatttccctaccattcagttttgttccccattctaccccaaaattccattgaatatttttgggcacacacaactctttctttctctatatc

SEQ ID NO: 5635 - DNA, 2945 bp, Emericella nidulans
tgttatcttgcttcttgagatcttgcgaagaaatgttgacgggaaattcggcgtggcgggtgctgatgaactttttgtagatgtacaaggcccggttgaaggcttcgcggaccatctctttcgtcatgtcgtcggccgcctcgtcgccctcgcacagcgccttgggcagaagggtcttccactcggcgatgcttgtgaggaacgcgacgttctcgccggaaaagtcgtttagggcggagaagcgctgcaggggcgtcgggttgcgttcgaggacgtactcgagggcgctcatgttaaggatgctctcgcgggcgctgctgtcgctgatgacggactcgttgttggatttccagccggacatcatcgagtcaaccattgtggccgtcgaaccgagcgacttgctgtccgagttggcgcctttggtgcggatctcccactgcttgatcgcctcgagggtgtccttgtgcagggactggtgacgcatgacctcccaacaagggagtaggacggtgaagatttcgaggaacataatggaaactgcagatcctgcgccggtcagaccgatttcttgtacacttacggggatactggtacagaaggaagaaggtcggaaggaaggggagcaagagaagacataccactgaggaggaatttcagtaagcgttgaccttctccatagcaggaacgtaaagagcgatgagccacataggagtcgcgtgcagaccagaaagcgcgcagccgattgtctgggtgcgccagccctgggtgtcgtgaatgtgacgcgagcgccacagcacgataggcgcgaccacccaggaccagaagaactgccagaaaacaccaggccaccactcccagccacggccttgctcgacgagctgctgcatcggggggccgtgcacctcggtgccaggagcgccccaggagctgtggaacttgcgcgagatgacccacatcaggatcgtaagaaagacctagagcacggtcagccggggatttagggcttgcaggggaagagcagccgtacctggacaaacatggcgatggcccccaggataacaacgcgcgctgagtagtccagacggcggaatcggctgagcaggcctgagggctggcgcttggcgtcgggcgttgagtttgtcaagattctgtacttgacgtacttcttctgcatcttcgcaatatgcaagaagtagctgttcgctccgtggaacagggccagaccgcagggcaaccaggtgcccatgatccagtactgggagtcgcccggcatcagcggtccgatcatgacgccgaactgcaccgaccagtagtagatgtgcaggaacgcgacccccccgagtgagagagtgagactgcggacacgcacaatgggcgagtcgcggcggatgataaggaaggccatgcccgaggcgacgaccgcagtccagaaacagccccagaccacccaccagatggcgacgggactgtagacggcctgcggcttctggtcggccgtgattccaagctcggaccccatggtaagcgcggatcgaaggggccgggggacttagggttaggggacggggaaagggctgggctgcagtggcggaaaggatagacggatagttggtaacgcttgtcagccagacagacaataaagagcggtcagtcggaagaggaactccaggaacgaaagagagaacgagtccaaaggtcacaaaatcggatctgggcagcggcggacttatgagggcagtcaagtcctagtgtacgccgcagggccgggaagatcagcaccactaacgaggcgcaaaccccgaatttttccctgtgcaaaacacgcgctcgtgcatcttgaacaaacgtgcgcgttgacgaattggctggctgcaggctcatttgcgaatcgtcacaggcgaggttactggatcgagagttcatctcgtggcgatatcgagatcggcagggctattgatttagggcccacctcccaacaccgtatcgatcgaatcaccagccagcgtccccttgcgcttgcgcgctttgggaaagaaggctgctgcacggcgcacgttttgcgggagaatttgaaatcgcgagcgggtaggatgggctgtggacagtgggctgtgggccaaacaagtttgcgtccaagatctccaggggtatggttcacttgtagacgggatcgtgatcttggatacccgatcgcagcaccacggttacagcgctaactagctggatagacgtacgggtagggctattcattttccagctctcgcctgcggtctatcgccgcagagatccagttccagagggtcgcttcccccaaaaacgtctgccttcgcattcgagtcgtctcaagaatgcgctccattgacccgctctaatagcaggacggtctgccccgtttcacaattctgggcctctgctgggcactctacaaagctacggcacaccggcgattccggcgagcctgacgaatccgttctgactctacagtcccacagcagaaaaggctcggcagtgcatgcaccccagtctggtccactgatcagattagatgacgttcttcagcagccagtttgcgccacataggagcttatatataggagaacgtttcataaccccccgcacggcttctctcatcttctctcagtgcttccagtttataacggggtgacaatagatgtagccatgcccgcgtcacaccactagctggccatcacactgctaccgaggggccggccaatatcacatgtacctgcgcagacgaccgccgttaccatttaagcacgcccaagggctagcgcaccaaatagtttttcttagcagggcgttagcgtctggggcgtttgcatcatgtagggtcgagctctcgcttcgagctctcgctttggtctccggatggggcaagcgatgtacaaccagaccatcggatcgatcgaaagcagaaatagaaa

SEQ ID NO: 5636 - DNA, 2753 bp, Emericella nidulans
tgatgacatgctgctgttggtgtgtctggctatacattgtgaagggattgagggcagctgccgatcctatgttggggcgatcgcgagggcgaaggggcttcgtggttgaatttcagacgtggagtcggagagcctgtgccgttgcggataaggtgacgttggtgaggttgttgcgtttgaaagaagtattgcccggccccaggctgctggaacctgtaggtaccatctgccatttaacgtggcagatgaaaccctgtgttatttgcgggaaaggaggtttcggagcggaaccgaattcgcagcagcggggagacggccgtagcaggggagtgaggaggagtcgggggtcggatacggtctctccttctcttcaacatggggtcctggaatggaaccaccccagagaaagcgactgcgagacgggacgagtagagcgatgtcccacaagcaaccttccgccgcactagtttcagcacctggcaaggggtcaggagaaaggcctaaggatcgagcgtagagtcgcggtgtcgggcgaacgagtcacggcagaggaacggcgggagcacagaggcctaggagatcggacgttagacggactctccaaataattggccaatagcagatacggctgagcgcatacaatacgcagtcagatgatatagcaatgacagtggacaccagtcgagatgaggttctttcacgctcgcctgggatcgaaggcgggaggacgttgttgaggtgtcacgtgactggtgtgggagggctgtgattcgccactctagcaacccttgggaacttacgaagaccatcacgaagcttggtaaggccaaatttctaccttgagatcctttttttgctattatcagttgctagtgtctcccttgattctttcaatccctcgacgtgtccttctcagctacatagaatctattctagccggtaaacgcagtatgctctagaaccatccatagcactccttggtcaatcaccgcatacccaatgactgaattcactgaataattgctctttcgtcctgtgaacttgctctttgaaaagagatacagtttacaagcacgtacacaaatccaaattcaaaaccacacattcagaacttcagttgttcagtcccgccagctatctattcactatgaggatttcgaacaaactacgtactaaagtactgctattaaacatgactcttcactgcttcctaacatcacatctctaaaagtctgttaacttaagcacaacagtcctcaagttcaagaaatcttctatactacatggcccgcggacgtggtctaggtgggaagggtacaaatataccaagtattcttcgagatgagggtcaccatttctccactaaaccacaagacaagtatagtagcgcagaggcccttatttaagctggaattgccgaactgaagctgttgtgctactctcgtgattatacgatgggaagagaggacgccaagccatagcgaactgcatgccctcagcacctgctgaagtaattttatgcgcgaggagactgtcctccgcacgcatatacccaagagtgcatatagtttctatccctcctaatggagatcaagccatatagcatgggtgtagcaacatcatacagtatattggtgggaaagctccaagcgttcgctagcatcaacaatatataattaccggaagaaaattaatatcaaccctcggatcagtcaaccacgtccaaggattagttcatagtgggaggcatcatgagtttgtttttacagcaagttcatttctaaatagctggtactttccgcttataggccagtcctgaacactatatagctaaccgccgaagcttacctatcagaaccctggcggccgttattgtccaacaagcgttgaaaagctctcggattacggggaccgagagctgaattctccgaactgcttgctgccgtgtaacaccatggcgcgacatgaagtcggtctactcaaatcattccgaacatttaaagccactcagccgcggtcaggtcagggtgttgtaccagcggcgccgggaagacccagagtacgctttgattcggcccctgaaactcgaaagctcttcaatccgggtattgattaacagagatatggcattattgaagatcgatacgcaccaacatgtcatgcccccggccgttaagaagggtacgtatgcaccccgaggcgagacagatcggacatgcttaccatgtatgaaacaagccatccagaagaaccctggcctcgcacagggcatgaaagctccggactgggtcctagaaaggacgctggaattcatggccagcaacgacatcgggacatccattctttcctgcccgttcccactcacggtcgtttgccaggacgccgcggaaaccgcagcgctcgccagagaagccaatgagtatctcgcttctatccgtgaccggcatcccacgcagtttggtttctttgcttccctaccttcagccgaggatacggcccggtgcatcgacgagatcagatatgcgctggacaggctaaaggcggacggcgttgtgctgttcaccagctataacgacaagtatctgggccatccggatttcgaaccggtttggcgagacctggatagtcgcacggccgttgtattcacgcatcccacaatggaggatatcaaaaagtctatcgacgagccgttcacgatcccgcgagtgctgatggactggtcacacgagaccacgcggacagccgtgcatttg

SEQ ID NO: 5637 - DNA, 4071 bp, Emericella nidulans
  unsure (1)..(4071): unsure at all n locations
aagatcactgttcttgaacatgctgcacttgacgtggcgtcttcatgcttcgcgaaaacactgggcattgattcgaacactcgggcactacagttttcaagctacacgtttgatgttagcatccttgagacgataatcactttgatgacaggaggctgtgtctgcacgcctagtgatgacgagcgcatgaatgacctcgcaggcgcgataaagaggatggaagcaaactctataagctgcaccccgtctgtcatcagtacactagatccgagcagtgttccaacgttaaaaacaatcttcaccggaggcgagaagcttactgaggctcaaatcatgcgctgggcagataggcggttctacaacgcatatgggccttcagaagcgacgattatcgccacggcgagtctaaaggtcaaccgggacggaataaggctggacgatgactgcaactctatcggtacggccgtgtgtggaagagcttggattgtcgatccgtacaatcatcatcgacttctccctgtcggtgctgtgggtgaacttgtactggagggatacaatattgcccgcggctacctcaataatgacaagaaaacgaaggaggtatttatcaccctgcctcggtggcttcgggattcagggcttcgagatgtgcctaagcccactggccggatgtaccgaacaggagatctggtgcgctacaaatctgataagaatatttccttcatttctcgcatggacacgcaggtcaaacttaacggacaacggattgaattggaggagattgaacaacaatgcacattcatttcaccagcaaacacacaagtagctgttgatatcgtggtaccggagacaaaaaccgttgcaaaagctttggctgctttcattaccattgctggacacgaagcacaaagtgcaacgccgggactgggtgtctcctcgagcttgctgcttcctctatctgactctatccagagaacaatcggacagcttcacaactctttgggtcaagttctgccacaagtcatgatcccaaggctctatttcccggttcgttacctacccctaggtacaactggaaaacttgaccgcaaaggcctgcgtgcaatggttcaagcccttccgaaagagcagctgatatcctacatgatttcgaacgtcggttcagggcgcgcggttgagcgagccgcagagtcaacccttcgagacctatgggcaaaggctcttgagattgaaccgggatcaatcagcgctgaggacagtttctttgcgctaggtggcgattccttcgctgccatgaagttggtgggtgctgcaagatctcaaaatatttctctctcatttgccacaatctatgaacatcccgtcctggtagatatggctaagtgctgtgacgataccgaaaagcctgctgaaagacagagagctgatcttcgaccgttcactctcgtccccggctcgattccgttgcatgatatcatggaagaggtttctgaacagtgtagtgttactaaggactcgatagccgacatttatccttgcactgcagtccaggaaggtttgattactctttcaattaagagtccaggctcctatgttgcccgaataccctatcgccttgcagcgagtatcgatctccagaggtttaaagcggcatggcagcaagtcacagatgagtttgatatacttcggactcgaattgttcacatcgagaatactggtttccttcaagttgttcttaaaaaggagaggatctcttggacccttgaaacttcccttgataatgtgactgatgataccgccgagggtagcggagcactattggcaaagtacgcaattgttcaactggggactgatgtgcgttatttcgtttggacagtaaaccacgcactctacgacgggtggaatgtccctcagattatgaaaagagttgaagatgtctataccgggttctcagtcgagatatcggcagtgccttacaagctcttcatccatcacttactccagcgtgatatgcagcagtcggacgagttctggaaatcataccttgatggtctatcttgcgagcctttccccccaaaaaagaacaaagatttgagttgctctggagcaggaagcattcatcgggccagcgttgatatttccaggaaagtcggaaccactgatactacagttcccgagttagttcgttccgcatgggctattgtgctttctgtgcacactggctctggcgacgtctgctttggagaaactctaatgggccggaacattgatatgcccggtatcacggatgttgtaggaccagtgctgacaactgtgcctatgcgcatacgagtggacaacaaactcccaataaatcagtatctccgggatgtgcgccagataataacgactatgatacctcatcagcattcaggtctccagagaattcagaagctcagcggtgacgcagcacttgcctgcaactttcagaatttgctggtgatccagtcggatgattctcagctcaacgatgatatttggagcccagtggagcaggacacacggggtgactttttcacacacccacttgtggttcaatgccagatatctggccccaggctacttatccttgccaactatgatgaactagtgctcgacgactggcaaacggagaggctcatagggcaattcagctttgtgcttgaacaacttcttagtgttcctcgagacagcttgatgacggtaggagacattgatatcactggtcccctggataagagagatatcgccagctggaaccagcgacaggtgacctgcgtcaacaagtgtgtccacgaaattatccgtgagaatgctatcatgcacccgcaggccaccgccatctgctcgtgggacggtgagatcacttacgaagaaatgttccaacttgcctcttcctttgccgcctaccttgtgatctgcggagttggtccggaaacacttgtcccagtctgtttaggcaagtctctctggacaatggtcactgtgctcagtgtcctgctcgcgggcggcgcctttgtgcccctcgacccttcgcaccctacttcgaggcacaaagagattttggaagagatagaagcagatatgatactttgctcgccacagcttcgcagccgctacctgggttctgtcagcacaatcattcccgtgagcgaagacactatcaaagcatacagcacggtcacaacgagcgaaaaagcaaatgctagccctacccccgagaacatggcatatgcaatatttacttctgggagtacgggccgtcccaaaggcatcattatagagcaccgtgcagtatgcagcagtgtcattggctttgccccagttgtggggctaaacaaggaatccagggttttccaattcgcttccctcacatttgacgccgccatattggaggttcttggtactctaatgctgggaggctgcatctgtgtgcctagtgatgacgaacgtttgaatgacataccaggtgctatgcaacggatggaatgtctcatggagtttcttgacgccatctgttgcttgtatccttgagccctcgactgtaccttctctgcagattctcacgtgcggaggcgaagcactctctagcgaagtggtaaagaaatggacaggtcacgtaaagttttacggagggtatggtcctacagagaccgttgtgtttgcggttgtggcccgcgattttgtggaccatgacttcacatgcattggttatgaagacccgagtaccttgacctgggtcgtccagcccgatgaccatgacaggcttgctccgttgggagccgttggggagcttgtactggagggcccagctcttgcaagggaatatttgaagaacccctcgaagacaacggatgttttcattaacgaatccgcttggattaagagctttccgagttccataccttctcccatcagaatatacccttttcctcctcttgttattggtacccctaacgcctcgatagagtacctagggcccaaagatcaccaggttaagctgcatagacnacgcatgtagctaagcgagcacgaacaggagctacatgcaca

SEQ ID NO: 5638 - DNA, 3028 bp, Emericella nidulans
tttgtaactgcgtacgacaatgcctataaactagatctgttccctgataccggcgcagaagcaaatgccactcgacatccccgactggagcatattccctcaacggaactgcagcctctgcaacacgacctcgacgcactgatcctggaacatgaagctagcgaaccctcaactaactggcaagccgtggcagacatggtagtggagcgctatggccgtcgactgcgcttcctggcgtctggccaggcctcgacgctgcagcagctgcagaacgagatcgaggacgtggtgaccccattcatagattacgatcaccggaatgcctccctcgaagccgagcgctgctcaaagcagtttgtcaggcgaacggcttcggtcacgacgcttgcggctgaggcagtgctttcggtatcacacagcatctgcatgaccctcatcgaggcactgggttacactgaatatgatgccgtcgttgaccagatccagggcctcatggattatctggcctggacgacttggaaagattgtagaggctgcggtgaccacgagatctgcatgatccccatgtggccgatgggcactgtcgacgactacaaccacccgcagtgccgtgttatctcacagcttgacggacatggcccccgatactggggcagtcgtccccctcgaccgaagcccggtcccttgcgctctgaactgtagtcactgatcaaggatcaggtggctgagcttgggctgaaagctggcggcaatctcgcattttcctcgcttcctttcacctcgcttcaggggcaccatcacttcaccatgggtcagctttcaacccactcacccctgcataagccgtacgtcgctgaagaaagagagaaattaataggcggataggggttccggcgattggtggcgcctcaggggttcacgcgatcaagaacagtatcataatcgaacaggtctaggcttcaaaaacatatttccggtgataacaaaccctggagaacaggaaatcagacttgcgtgttgggctaacggcgcaaatatgatgagtcccaaaaactaagaaattgcctcaaccaatccccggatcgaccgggcgccaccatcaatagtgtctgcagcaaccgcagatcccgaaacaaaaaaaaagtcgacctttgaatttgcagctcccttgtgtaccacctggctattgactttgaagaactacttgccccgtacctgcaccattgcccgccacatttggaatcaagcagtcatggatccttgcagccggccctgtgagtcgtcgagatgcatgctgaaagcttcaaactctgtatccgtgttccagacactactcagtcacctccaaggctgctggacgcagaaagaggtcgtgcatggtttagacagggtttcagcaggcctgctaatccgataggtccctcgatcaggtacaacgctgtgattaacctttaggaaagtaaacaacgcatcagacagctccaagccctgccagggaggcgctccatcaggtcccaatttgctattcttgcccggtgaactctcagtctatgctcgccacgccaaaaaccttgaatagtcggatcacttgcgattgggcagcgaccactaggcacatctcctataatgaatctggactcggatgagaataatgaaggcgcaaggggacaaaatcaaggaatataagtatcggctccaagtcgtgctctgactttcttccccagtcactcattcaagaaagcagcttcttttctagctctgtcactccttgacaatcgttctgaccaagctccagtctttcgtttgctggcttgctttcgattttattctacgtacagcgttttgagatacccaatatgaaggcttctgtgatcactgccctaacctgggccgcctgcaccatggccggccctatcggcctccgcgatgttgccggcgaggactgtacttgcgagatcgagaccgtcacgatcaccgtccctgctcctactgaggtcggcaccatcggtggccctaccaaccctcctggcacggctacctggtccgagcctgctgagcccaaccccaacacaaacactggcactgctaccggtactgttactgctactgccactgccactgcaactgagacatggaccaacaccgtgaccgccacaggcactgccaccggccctgcgactgtccctcctacatctgctcccaccccctgcgatgatgaggagtgtcatggtaccggccacctcatccaggacctcggccctcaggtcaaccgtgctctgactgttactggcgccgatggcgagaggttcctcgtccaggtcaacgaggacgtctataacctcctctccggcagggtctccctcagcgattccattggtgagatcgttggcgatgccgccacgattggtgatctcattgccgacctcggccccatcatcgactgcatcctgaccatcgtcggcgaagacagccacatcctccttgtccgcctcgcccccgaagtcgccgatctccttcgcggcactggcgtcaccctcggccttgacgccatcaacaaccccatcggcggcctcctcggcagtctcaccggtggcctcctcactcgcgacgaggcccagcccttgacggtcactggccagagcggacatgacctgcctgttgctctagatggcgtcgttggtaacactctccgtgagaacaacgtttctggtccaattggaaccgttattgccgcggccatctctgtgacccagctgttgcagcacccgctcgcgcaggactctgaggacctgatcgtcgttatcggccgtgacactggtgctctgcttatcagacttgctcctggtgtcgctaggctgctcgacggtcttcttcctggcattgctacccctgtcggtaggatcattgccgtcattggtgacagcttgtaaacaacttcccgctttgtaactctggattggcatgcgggcattgaaaatgaggtttggacatacaaattccatgtattatagttgcctatcatatttat

SEQ ID NO: 5639 - DNA, 5253 bp, Emericella nidulans
aagagtgggcacgagatgatggtatttactcgtcgcgtgcatacgcacagtgcaagctgcatggcgcacagaactgtgtgtacgcaaaaccgattcgtacacagaacgcgagggtggagtggtccttttcagccaacgtacaccaagttaaactatgcataacctgtcagatgagatgccaattcttgctattttttacacagtctattctttcgcggcattggtcaatttaccctctgctaaccgccatgagccaggttcaacggtatagatggggaggaggtggccagccctaattcagacatacatactaccgatcttttaatatccttcagagtgccactgcatgtgacggtcttgcagtatttacctcctaatctatattgaaggctcagacaagacagacggacacccataagccgtggcccgtttgtggggtaataggctcttcttagggcaagagatcaaattgcgtggcccattgggtgactgttgaccgacagtcattccattagaagaacacaactagcctcataccacctcaatcatattcttcaccccctttccccaccccgtccgctctcaaacctcgggcgcctgctcaaatggcacgatactactaatcagcggggtaacagacaccactccagagtctggtaaacccaacacagttttgtagtcacgcggcgcatatcaaaaagccatctttaggattgtctccttttcacacatgtacggcaactgcagcgcctgtattggctttcccaatccaatctgaacaaatacgccgccggccctaaagcgtagagtccagtctgagcggatgcctcaacacccgtacattccagcaccacatcaacaccctcctccagggacatttccttcctgaattgcctagcaatacccgccggtgtggcccgagacacccgggccatagtcccgcagcccagatacccgctcgtaaactccctcttcttctcaccgatatctgtaacaagaccttcttcgccccgtacgtcatccactctgcagcacttatcaaccctatcgtgccggccccctgaacctgtatctcatgtagaccggcgcacctttcagggatctaaggggaatggatattatgctgaccttgttcttccgcaactcgctcctggttgcacccacttgggaaccgtccccagccatctcggacggggaccttccgagtcccgcgttcaagccctgaatgtgtctgttatatgagtgttgccatgatcatttgattgtgatactgacgatgcagttctccttttatggtgtgtttgccttaagtccctccaggtcttgccttgatagcattcttgtaccacctcaggaccataggcctcagagaaactcgctatggccacgatcaggcaatgctcttgattctggcaggcaacgcttaccgtcttccaaatactcctcctcgaagaatttagattgtcaccataccggccaatgagacggatgttgcagggctgcagagttcatcctcttgatcggcgttgaagaagcatccggttgtataattgttgtggcctgcagctcaccctgggcgctaataaatcattactcagctctgtgctctgtatgcccgtacctatgcgcgaatgcccaccagcacgtgaccatgctgagcaggggaaatgaacagttcagcctcaattgtcttatcacctttcccaggcgacgttatacaagatgaacgactatcaccggcgatacggagactttaccataggctgggtgactgccttgcccattaagcttgcagctgcacggtagatgctcgacaaagagtacaaatagtatgataactctacctatatgttggactggattggagagcacaatatcatagtagcctgctttccctccaggcagcttggcattataaacagggccactgtggactgcccccagtatttggttgtcctatatataccgtagactggaagtatggtcagaatctattaaagcacaatagcctccgggaatcatgttacaatagatgcagtaataagagatcagcttagctccaagctaggcagcattctatattttgagatagaagctaccagacttatgagtaatctaccctgtcttgctatctgtagaatatcagactactgcaactatacaaggatacaagctagcagctatttacaatagccatggctgcggcatatataaaagaggttctagttctataccctgcaagttctggtctagagcagcataagttgatcacagcttgaatagtatctcttgagcaacagcagtgacatgtgtttgtgactctgcttcaagtccaaggtactggtggctggttggtagaacacccagagtacataaagtggcaacacgcagcaagacctaatgtcacgtgctagagtcgttgatactaacaggtagtattagactagatgaattcgctagagaattaatacatagtgaccgtcgagcttcctatatatgtcacggaccgacgttggtgccaaccttgacttgtcattccggatgtcagccacaatattacgagaactggcctgtacaggccttatcccggactagggattcaatcggcagttggttcctagtggaccggctcgtcgcaattcgggcaatgctcaaatcaagacttcgggcgtagctcgtcatacctaattcctatagtatcccagcaggggaggtgctggaaaaacagttctcttgtctgttagatctagctgccctggttcagcgtctatgctgacttttgcagttctaacaccgccaatgtaccagacattgatcccctggccgagatgatcccataatcttccattattttgactatgagcatcagtctcgtcagacagttactttgtttcttagggccctactgaagcagctactatactacataataaatatactaaaaaagatagaggcttatattaataggattctactctcagtaagtatgctttagcaaataatattggagattatagaatccttgccgtgactgtacattttgtttgatgcctttaacaagtgtgttgatcttgagtttataaaagactattattagttttttttgggagaccctagtatctggctctaaggtttgacttctccttacaagttgtccatatatccaagaaactccctcagtatttccttgctgcctatagattctagtatgcgcatctgagatagacctggaagctatatatcgcaagggataagctaagctagaaataataatatagttaacacagattatataactaagattgctaatataccgatttattgagctaataggatgtcagtacctatatattattctaccttttcttgcttgcaggctaacaaggctaaagttttttcctgatagttctttgtactaaagcagtcttgagagagccaaccacgggggatatggaagacttgctgtctatcctagctaaagatttaccagctatattttaggcaaccatatcttgtatccgccatcttttagaaggatgaaaaagacttgggatgataacattgatgtctctagcgtatgcaaaacagcttattactacgaacaggctaacagatttcctgtcagtccatctcggtcaaacagtagtgcgccccaatcatcaaccagcgcctcggatagtactggaatgctctctgggactgtgacaatggaccccgttacagatataatgcgcctatctcactgcgctgtcaatgaatacctaatcaataagattcactgtgagactctattaaataacatatgtacagttgatacaatgtcaatctgcctatcttccccttgatcgtacatgcaggttcaatagctcggacctcaccacacgtatacttcttccatcatccgtcgcatcacgtctttaacaaaattcaaatccagacttcatatactcattaatgctcttagtgtacatatgtctggttaactgatagtcaggagtctgccgatcctcctcactgagtcttcctcttcttgttggctttcggacgcaagttctcggcatactgcttaaagaactccgttggctctacgggatgctttccggtcacatcgtggaatgcagtcgtcgatatgtagttcgtcttgccttcgcggacaagtgcgtagtactcaaggagatacgcgatctctccctcggaactaccggcatcgtccttgaggaccttcttggcttcagacctaatgtgagggcacaaatcagtttcatattataagaacgaaaagcgtatttgcatactctgatatatcttcgaatttcaattccttgccgagcgcctggcttgcggctgttgcgagctcgtcgccagccgtaagctggggccccgtaagaaccatcagctgaccgcgatgtttatcggaaaacccgtgtttgccgtggcctgttagcacgtgtgcaactacttccacaacatcagataacgccatcggtgcgaatttgtgcgatgtgccgatagggagcggcaatttgccctcttcttgcgcttgtcgcgagtacaagaggaggtgttctgcgtagaagccgcgactaaagtttacatagtcagtcagcgagctcgatcaaaaaatcaagcagaggagaggacgtaggaggtggcggacataccgaatcacaaccggactatgtcccgtctccgtgctggcatcgcctttgcctccataaccatcgcttcgagatcaatcacactcctcagcagcggctgcgcttcacgctcggcaaggtcacggccagcggacgaaataaagcatacgttagggataccggccttcttcgtggcggttataagctcagttgtgatgttaaatgcgtccttgtggccgggtggcaggaggcagattgtgtcggcgcccgtttcttgcagtgtgctaaccatggcatctagattgccgggtttgtgttcaacaatttgcacgccatgctcttctttaagctccgcgcatgcatctgaatctgggtaaagggttaagcctgtgatctttttgatgcctttggcgaaaactgcgcgatgcaaggatggtttttggcaattggggaccccgtgaggctttctatgctggtaatgacgaggtttgcgggacatagtcggttgttagtgtttcaaacagtgatgttgtataggcacaattagctattcctttttttttttttgagctgtgagcaaggaaagtggtggcttttttcccagttgtcggtggct

SEQ ID NO: 5640 - DNA, 2638 bp, Emericella nidulans
aatattgcaggcgttcctccattcacccattttcacaaacttcgcccctcagtttaattacatcctcttcacaaccctcttcggaatccactctgggattctggcccacgtcctgcccctacaagaataagttctaagctcaggaaacatgctggaacagaccaggtcgcacggcaggcacaacctcaagccgttgccgcagacatgcaacgctgtatacgcgggaaagagaccgaataagacgcctgaggcgaagttcggaaccaccgggaaatgttcacaccattgactacacttaaacaggttcaccaatcatgcccaagctacccatagccgtgggagtttaatttttgtccatgtacatggcacaaagttccgggtcaaacgactaccgttgtggagattatgatgcccccatccccgccccctcatcagtctccataccgtcttcctcaacgtggcaccactgcagaacctgaatcccatatattcagctactactgatattttctcacccttcaagggaagaggagaggtcgatcagccccgcgttgatgtcgtcgctcaattgctgggacaagatacaaatacctgcgtgtaattccttacatctttctcaactgactttgctctctatccgaacttaagaatcagttgaccatgcctaacacaaagactgttcgcgttgctcacttgggaggcatcgatgccgcttatcagatgccatatccctatgacagtaccaagcccacagtggttcttgtcaactctttcactacgtcttctgagctgtacagagctcaatacaacgacaagaagctgacagagagtgtaaatctactctccatcgagctcctgggccacggccagacgcggacagcccgccagcactgggcctattgggacacagctgagatgaacttccaagtgcttgacgcgcttggaattgacaaggccttcgtgctcggcacgagccagggtggctggatcactgtgatgatggcgctaatgcggcctgagaaggtgattcttactacctattccgtcgtatgcgagactgacgtggctagattctgggaatcatccccctcggaacctcgctggactctgaatctgagcgaactcggctgctaggatgctgggacggacccaaactcctcaagcccttcattgagcagtggtcgagcagggaaccaaccccggactttaccccagacaatgactactgcgacgtgctaatcaatatcggcttcaatgactgctccactgaagtccgtgatttctggcgctccacgatcaaacaaaattaccagggagacgacggccgtcgccgaattcgcatggctgctatcaatttggctgagcgcaatggtcttcacctgcgactccaagatgtccagtgccctgtgctatggctccacgtaagttcaacagcacaaccatgttcacagaatgacatgcctcagctaacattaacagggaacggcagatgttgtctataccgtggctaatgcgaaagaggaaattggccttctcaccaattcccccgatgctcagctcgtccttgtggaaggaggcgcgcattttcttagctgcacaaatcccgatgcagtcaacaaggctctactagacttcgtgaacaagcataagtgagcaacatactcggcacgacacttccccacagaagccaaacgctttcttgacagttggggtccggctccgtcatctagctagaatggcatcgaatggggtagtacttcttgttatattcggctgtttagtggaggtctgtttagacgattttcatttagctcaaggcgtcaaataaaaattccaggaaacaccagaacatgaagatatacgtataggcatcaataccttttgagcttcaacctttttcgataaaagagacactgctgcctcttcccacggtctcgtactacatcacttcagacaattcattgcactcttccggccagcgctgttctaactatctcggccagcgcacgagtcattaaccaaacatgccctctcaatcacctaccgcgggcaagaagcggcgaactagtacgtatatatgtgttttgacaaatatatgatggggagaagactaccatggctagagttgagtttagacaactatcgctcgaggtcctgtccggtagatgtggggggatattgcatgctggctgaacaagcagatcattccgcacccaattagtctacttctcgtgctgggtccgaactgttaccattgattcttgcctgctaccaaacaagctttggtgcagttcattgtagttctgtatcttgagcttctcgagattgacatggtgaatatcgataccgggccaaccagcgatgttgcatccccgtaggttactgcaatacttttcccttgaatataggaaacgtttataccctggcagattttgcgtcatcaagcaggatgcctttaatcaaggaggcaaaatggcattaacgagatttagcagtcatgaggctgtttttggtggtctcgacggacttctgcaggatgatgcttcactgtctacccttatcacaaggccttgggtagcatactgtgatgtatttaaattgaactataaggtacgtattggtcaatgactcatatgga

SEQ ID NO: 5641 - DNA, 4922 bp, Emericella nidulans
gagagaaaagatttttataaaatcaataaaaaaaaaatgtttattgagagaaaagcgaaaaatatcctaaatcgttagagaaccacgaggggtgtatttatttcagaagacgtaggcaagttatcctcaaaggccagtatggttcaaactcattcccgggcttctctaagcagggctggctaaccccgatgcgggactcagctttccgcaaacgcatccgcaccattatcctctgaaagtcgcaagctctcttcaatagagactaagccgcgagtatccatcgccgcgaactttcaggcatgcgtactccctcgaaaaacttcggcagtcgttcaaccagactcccgcacagcacgcactgaaggacccggcgctttaggagaattactgacatgtagtgcggatacgccgatcggtgaagggcggtttttgggtgttagcgctattcgctgggctatcatttctgcagcgggcttggatgggacggtcgaggcgagggcggaactgggacaccctgagctgctgagtgcggactcggagttggttggtggagttgcctgatctaggctaagtatttctgtcattcctagacaatacctagtatggggtttctggtatcgttggtgttggtctatatgcctccttgaatggcgctgagctcgtacagtcatccatacgtacaagagctccatattactaccggccctggctgaatattgcaggatagggtttgcgatccagctactgcacccatcggcaactgtgaagcagtccatttcgtttacagtgaaccggagttcctttcgcgctcgatgcgttgaaacatatacgagtttggaatctttaagcactaagaagcacgaagaacggaacagcagggtttaactggcatggctgtggctgtcagaccacccatctatcaagctttatgcaagtaggagagctataatattgagcgatcatttggggcaaaacatgataaatgcagaggtgctgtaaaaagtgctagctatccacaataatgatatgtaattgttgttaataccaagacgcctgtccatcatgaaccgcagctagagggatgctgctaaccacgctatgcaaatccttgcaatgtaaaacatttccgtgagaatgggtatcgcaaatagtgcatgttaaaagtgtcaaatatggaaaaggtgagaaggttccgacaggagagaacttgaatgtatcgttgtagtatgtaggagacgccctatcgtgaggtcctaccagcggatcgtagcgtaagaaacagttcgttgccttagtggatacgattatgcatcagagagatcataatcttcgtctgagtcactgacttcctggccagatcgattgacaacgatgcgcctgcccaattgatcttctgaatagccatcacgggaagctccaaaatcaagaacctggcagtcatcagctcaggaaaccatagaaaaaggaaagaaaactcaacttacctcaatataagtcatgccatcccgctgcactgcggctacacacctacgttcattgaacttgatctgccagactcctccaagatttgtgaggagatcgcgaacacactctccagttcgtatatcccacattttcagagttcggtcggagcccgaaatgaccttctggccatcatgctggaaacatgtgattgcgccagtatgagcacttaacatgctcttgcattgacccgtctcaggatcccagatgcggagagtggagtctgcagctgctgagacaagacgatcacacttcaggtccagaagcccaacaagagacgtatgaccttccaggttgtagagaatcgagccagtctccagtgaccaaaccttgaccatgttgtccatagacccactgatacaacggtttcgcttgtggtcaaggaccacgctatatactttcaatgaatggccagataatcggtgaacagtctccccagttgaaatcttccagacacgcacagtgcagtcataactaccgcttaccagagtgtccccatgggctgcaatggcgcgaacggaatgctgatgaccggtgagtacacggacaaaatatggacaatcagtatcatccacattgcggaccgctttgatagtaaccgggatcaccaggcttaggaagcttccacacgcgtaggtttgagtcccgtgagcctgtgatgatcaatggctccttgggcatcatatcagaagtgccatctgctttcttcccgacttcaacgggcagaactatttgtaaacaacgcacagtcgatgtatgaccgtggaatatttgagtacacctcgccctttcgatgtcccagacacgaacggacctatctgttgatcctgatacaagagtgttgccgtaatactcaagcgcccaaacaccaccctcatgtccttcgagcgttgccctgagcacgccggttttcgtgtcatacacgttgatattcgtgtcgtcactgcccgtcaaaattttgtctgtgtcgaattgaaggcatgtgactacatgacggtcgtgggcacggaatgcaatatgtctaggcttcactcccggtttcatccaacctttgcgcatacaataatgccgctggtataaggacttgtacaagtgaagaccccttagggatgggagacctatatctggatatggaacagccgcggccgcagcattggcagcggcatatggaccttctgcgactgacacatcctttttccagtctgaagagtctgattgatcagtgccgcttgacgaaatcatgcgctttgccagtttcctgctcaagactctcgaattcgctttcctcttcggtcgacggttgacagccgtggatctgtcgctaggtccagcaagtggcgacaaagcagaaccagaaggctccgaaattaaggacgataggctaaggtccttttcgtaatcctcaagcccattaggaaattgccagccccaaccctctcgaattgcacgctgcaactctccttcaggaagcgtaaagccatcccgatcgaggagctctttccatgacttctcgtctgaattgatgatgtgcctccacttctttgatacttgcgcagcacgacacatggtttgtacatcaaaatatttcacaatatttagacttaattcaggtggaagaagtgtgaggaagtcgcatttcagggctgggttaacaacgtcggcgacaaagtgcaaagtcggttttggacagcgtttgagaagttgatacatgaggtacgtcttcatctcctccggcatggagtcgaaaaagctcacaacatttggtatatccatcaaagatgacgcagcgggtactctagtgttcgaggttacgttttcgaagttcttgccggcaggcgctggaacgggagcagtcagggcctttctagataaagattcgctaagctgagaatcaacttgctcaaagcttgaatctgtttcatcttcggggtcttcggcagaatcaaatgaagattcagcatgcattgcgttcatggctgccaccggagacaaactcggactgggcaagcacatatcttgtgcgagaacattgtcgacaagcgtcagctgcgaagctgaatctatggaacgattctgcgagagcacatctttgttgaataaagtatcttggctctgagtaacttccagatcctgatcttcatgtattgctgattccgccgagtccgatactgaaggacgcgagggatgcctattcctttcggaaacaagagtcctagaacgaagaaggatcttttctagcatgtagatttggccggtctccctgagattcaacttctgaagataatggagatctaagcagagtttccttcctagggaaattcgcgctgcgaattcttctccgggacgtagtgctgtcttgagaactaaagctgctgctttctgtctctggtgttgctaatccggcggctctagggtgggaagaagtactgccactggaccgcgaacaaactaaaggctctgacggaatccgagttgattgcgtttttgaatgtccttgccaagaatccgcaagtggtagaggccgtcgcttcgagctcgttgggacaggcgacggatgattcgagactcgcgaggctgcgaaccgagacagtgactgattgtcttccgaattgaatgaagtgacagagcgaattacgccattcgaggctctcaggacatcgttcctctcgtggatctgacattcatatgttagttctaaattcatggtttggcagaaactgatagcactggctctcgtaccgcttctattgttgccgttgtgtcatcaggctcgttgaaaacaaccgacttccccccaacttcaaatctgatattttttagcgccgagggcgtagcggacgatgccagagggtagagcttaggatcaagttctcgaaccgcccgcggtggcttgataaacaacggaggaaatgtggttgtggttttagaggaagaggccacgaccgcggttcgcgccgcgggagcgaaggagaactggccgatggaaccggacgcagctgcttgtgcttcactatcgtccattttgttgatggtggtcgcccttcggctgcgttatcgggatatgctagcacagagacgcgtcttcgaggcggtggaaactggaccgttatcgtcgtctctgttcaaaagtcgatatacgtcacgcgtacttttgagtatcatgcgagaagaaaagaaactggattcgatcgatgtggtggaggaagtgtctagtcttgggagcaggcaaaaagggggcttgtcagcatgatactcggtaacggccttcaaaaccgtctgagttgccaaagtgaaaagaaaacaataattgttagaacatgatcatcacagtggtgtattatgaggggcttaagtcgacagagagatgagctgacaggaaagaaaaccccagtggcgtgcgc

SEQ ID NO: 5642 - DNA, 8019 bp, Emericella nidulans
gcttgttggcttcgtttgtcgattggttcgggtaaattcacgtccgagagttgatggccctgctgtcggacttgaatgttggtgtctccacaggtttgaatcgcgaaacatcagcttggcgaccctgcctcttccgcatgcttgctatgcttggaagtccaaactcatcctcgtcgtcatcaaaaacgatatcctcccccacgtcgtcatcatcatcatcccctatcttccccgcaggattaccgtgatcccacggtccgagctcttgattcatgattccggagtacgacgcgcgcggtgacgcgacccatatcccgggccgccgagtagacggtgatgcgtgtgaggaattattgggggacgaacgaggaggcgttcgcggccgggtgtgctgggacaatccactgttgaataacaagtataagagtaagtcgcgcccacagaggtgtatgctagttcgtctcaaagggaaactgacttcgggatgttggcgtgagagtaggaagcgccgacgataagactttgatcaggtgaattgggagtcctttcgtagttctgcgacaccgatctggctttccagaagggggaagatgattgccttgtctaattgttagagatttgagcacaacattaaccagatgatgtagcttactcggaacggtctgtgtacgggggcggggagcatttatcagccactttgcgtcgaatttgagacagaggttatagggcacgaaccaacctggaccatttccttcgggctctgagttaattgacttctgtcgcgaacacagacaaggtaactcacctgttgctggacttttctagtcgccattgtgtgaaagaaaggccactggtgttgcggagatgatgtcaaccgaacaggtcatcgggtcagtagccaggggaatattgcgggggtgcttcaatgcaccaagaacggaatattgagaatgaagacaggacccgagccgaccactggagacgattaacttcagaagctgaattactggcagtaatctttcatcttgaacataagacagagctgcctaggttttgtctggttatacttggtgctggaggttggcgggcggtaatttacctaggctgctgtactttttaaagtgagctctacttgtactcccgtaatatccaagtcttggctcccaattataccttgtctaacgccgccggtacgagtgtaattttcggcaccttctctccaatccaacttcactcatcttccttccctcttattctcttattcctcccactcctccccaccctcctcaactttcattattgtctctctaatccgttttcttagtattctgtaactcagccactaggattttcttcgtgattagcttctggtgataccctatcaaaatctgactgcggacatcgctgctattcgcatacgggtcaattgaaattgggtcgttcgtcttgccgcttactccatcatcaaccagcgccgattcacatcatggctgaaccagaggacgttgaggaggatcttttcgccgatctgtatgttgctcccactctcgcttggacaaaattacatcgatctaaacatgtcttgctttctaggtacgatgcagatgagacaggaaatcaagcagcttcaactggtggagctccggcggcttccaactccgcaccgtcagatgcgcctgcacaaccttcagccacttccgccattcaatcagttgaaggcgttggcaatgagtccgaaaccacgcatggcacctaccaaacccctacatatgaaggaggctatcaaaatggatctggccccgactccggatataacaaccaaactactggtccagtcggagagccggagccgcagggaacaggcatcaaggaagacgggtaagttctcattgtttttttccctcacaagcatcttatgttcttcgcaattcggatacgtttgtgtactttgcctttgctgcgcccatggtatggggctagaggtgcccacagaaactgccaattcgtttggcggaatttttcctatatgcacatgatgatggcgagctgtacgttgtactcggtgcatggcttgtgcaggacaacctacgtttttggcttatctggtgggtccatttgatgggacgctcctgaggcatgaaaggggtgttggactggaaggccggatgagactccgttcaagtcaagatcttttggtgggagcaactattacgccggtgggagcaaagccatttcaactcaataagattgacaactttgtttgcacctagacggtgccggatctgggtggacgtgcactattacttccaagtctagtgagggtctatcagcgagtcagcgccattatggcagaatcgggaggcatatgtcgacagcctaattatgcgagccccaatctcgagcgactatagtacagctgataccatatagcctcttatcggtacatgatatagcacagccaccgaggagtagcgcccccggctggctggctgggcattatcgatcagtttacctagcttcggacttcatagacagcaggcagagataccttggtcagagagacagaagagaacaattgacttattccgcccggcaaccctctcccttgtggtctgtctattacccgcatacacaaccggaccctggaacccatgttgtttggtatccagactgctgggtgatttgtaatccagtggctgtgaattaactccgaaataacacctgcgctgatatacggtctcaggcggttcagttgagtgtatacgtgctagaaccacagctcatcatgaaggagcgcatcttggtcgttcgatatgggaagtcgccgcagcagacaacacatcaattcatacgccatggactaccatagcccaaaacaatttcccaagaccaaaaattatggtgctcaagttgttgataagatctgtctgagttgagatgctttccctaccatgggcccatcaaccgttcccggctactcccagccatatactactcatgtgttttatatatttgctttcctttccctctccctccccctttcccttttcttttcttttcttttgttttctttattccctcccccctcctttttgcattcgtcttttgctgggctgagtactttcaatgagaggaatggagtttctaatgagctatgtgtggcagaaaaatgtttattggagggttaaactgggagacaacagatcgtatgtgccgtttacgagccttcttaagagactctgtgatctaacctcttaagctagaatctctaaaggagtacttctcgcagttcggagaagtacaggaatgtaccgtcatgcgtgacagtgctactggtcggtctagaggattcggatttttgactttcaaagaccccaagactgtgaatactgttatggtcaaagagcactaccttgacggaaagattgtaaggcttgctttagcgctttttatgttataatgatcgtatgctcacataactcgcagattgacccgaagcgcgctattccacgtgatgagcaggagaagacaagtaagatcttcgttggtggcgtcagtcaagaggctaccgagcaggatttcaaacaattctttatgcaatttggtcgtgtgattgatgcgactttgatgattgacaaggataccgggcgccctcgtgggtttggctttgtgacatttgatagtgaagccgccgtcgaagcagctctttcgcgccctctcgagattcttggtaaaactatcgaggtaaagaaagctcagccaaggggtaacctacgcgacgacggagatcgtgggcgtcgcggtagagactttagggatggcagtcaaggtggctcagatggttcccagcagcaagcaggggcccaggggcaaggtgtcatgcccggcgggctcactcctcaaatgatggcgcagtattggcaacgcatgcagcagtactttgctttgatgcaacagcaaatggcagtagccgccacacagggccaaggaatgggcgctatgggaatggctggaatgaatcctgctcttatgcagcaaatgcagatgaagcaactacaacagatgcaaatgggaaataatcagcagtcgccgagcatgagtcctcctgctcagagcccgaccccgcagtcaatgcagaatatgatgaaccctgccatgatgcagcagatgcaacagcaaatgccaaatcaaggacaagcaaataacatgggggggcaaatgggaatgggtggaaatggcagtggaaacatgaacatggggagtactatgctggaggaggcagagggggtcccggttacaatgctcacgaacaaattgcatttgagcaacagaaatatgagcaacagcaagctcgcagagcaatggaaaaccgggccttctcaccctatcagcaaggtggtccgacatcatgggaaggcatgtacgatgaggtgccccagccaaatattcccacaggtccccaggccatgaatcgatccagtagtgtgggacgtggtacgcatcaccattgttctctgcatcgttacatattcagctaacccggtactaggtcaaacaccgcagccgcaaggcgctgcacctgcaaacgcgccgacaggacctaagaatgctgggaagcctggcgcaaattaccgtggtggaggacgtggcggccaccgaggctttcatccctatgcgcgaggataggttgttgtattgactgagcaagaagagcatggcgcgatgctgtcgcctcatgttttcatggaaaattacccttttgatttctcttttcatcatatttctcagtgttcaatctttaggctgtctgccagaagaaccttgttcaatgattacttattagcttgccgatacgtgggtgttctgcgggattctagggtgtggcagtgccaactgtgctgatggttctcaaacggctactcgattattatcaacaaatggcaataccaatacgtctatactccatcgtactgtaaccgtgatagtcttcgtatcgtataagagatgggctggatgatggcctggttgataagataacggagcggaactattcttttgcgattatcgactttggtcaatagaaagctcccacgaccaggcccaactccggtaaatttgctaaaggccagggattggagcttatcagattcaagcccctcctcaagatggcgtctggacgaaaagatttcctcagtcaacccgcccccgagaattacgttgctggtctaggtcgaggagcgaccggcttcaccacccgctcagatctaggtcctgctcgagagggtccaacgccggagcagatccaagctgcgcttgcgaaaagagcacagttacttggagcagcacctcccacggcttatggggctacaagagaaaagggtaaaggtgaggaaaagccggccgaggaagaagatgatgaacggttccaggaccccgacaatgaagttgggctctttgcctacggccagtttgatcaagaagatgatgaggcggatcgcatctacagagaggtagatgagaagatggatagacggcgcaaagcacgaaggttagtggacttcgtacactctatttttttattttccctttttgccttaagatgagttgtttatcgggttcaccccgtctattcttggacagatgaccgacttgtacctttaccgcagggaagctcgagagcgtcaggagcgggaagagtatgaacggaagaatcccaaaattcaacagcaattcgtcgatttgaagcggtctcttgcgtcggtctcggaagacgaatgggcaaacctccccgaagtcggtgaccttacgggtaggaatagacgaacgaagcagaacttacgtatgcaacaacgtttttacgcggtccccgatagtgtgctcgcgagtgcaagagattcatctcagttcgatacaaccgttgcggacgatggaacagcaacagatgctggtgctaacggggcggacggaatgataacgaactttgccaacattagtgctgctcgtgacaaagtattacaggttaagcttgatcaggcggcaatggggtcctctggggacgcggcatctggaagtgcgactagcatcgatccaaagggctacctcacaagtcttacgcaatcagagctgaaggcaggtgaaatcgaagtgggagacgtcaaacgtgtgcgcgtcttgctggaatctgtaacaaggacgaatcccaagcatgctccggggtggattgcgctggcgcgcctggaagagctggcgggcaggatagtcaccgctcggaatgtgattgcaaaaggatgtgagctctgcccaaagagtgaagatgcgtggcttgagaacattcgacttaacgaaggtcacaatgccaaagtcattgctgcaaacgcaatcaaaaacaatgaccactccactcggctttggatcgaagctatgcgattggaaacagagccacgtgcaaaaaagaacgtgttgagacaagctattctgcatattccgcaatccgtcacaatctggaaggaggcggttaacctggaagaggaccccgcagacgcacgccttttactggctaaagcagttgaactgataccgctctcggttgagttatggctggcgctcgctcgtcttgagacaccttctaactccccgaaagttttcactcgacgccttaaggccgtgcctaccagccatgagatctggattgctgcttctcgacttcaggagcaaatgggacccttcaacaaagtgaatgttatgaagcgagctgttcaatcgttggcgagagaaaatgctatgcttaaacgggaggaatggatagcggaggcagagaagtgtgaggaggaaggggctgtcctcacttgcggtgcgatcattcgggagacgctcggatgggggctggatgaagatgacgatcggaaagacatctggatggatgacgcaaaggcgagtatttccagagggaaatatgagacggcaagggctatctatgcgtatgccttgcgtgtcttcgtcaatcgccgatccatatgggttgcagcagcggaccttgaacgcaaccacggcaccaaggaagcgttatggcaggtacttgaaaaagcagttgaggcttgccctcaaagcgaagagctatggctacagcttgcgaaggagaagtggcagtcaggagagattgacgatgccagacgagtgctcggacgtgcatttaaccagaaccctaataacgaggatatctggcttgctgctgtcaagctggaggcggatgctcagcagacggaccaagcccgagagcttcttgcaacagctcgacgcgaagcaggaacagatcgcgtatggataaagagcgtcgccttcgagcggcaactgggtaatgttgacgatgcgctcgaccttgtcaatcaaggtcttcagttgtatcccaaggccgataaactctggatgatgaagggccagatatacgagtcacagaataagctccctcaggcccgcgaagcatatggcactggtactcgagcatgtccgaaatctgtcgctctatggctattggcgtcacgactggaagaaaaggccggggcagtggtcagagcccgatctgttcttgatagggctcgtctagcagtaccaaacagccccgaactgtggacagagagtgtccgagttgaacggcgggcaaataacatccctcaggcgaaggttctgatggccagagcattacaggaggtcccatcatccggccttctgtggagcgaaagcatttggcacctcgaaccgcgctcgcagcggaaggctcgcagtctggaagctatcaagaaggttgacaatgatccaatcctcttcatcacagtagcgcgaatcttctggggcgaacgtcgacttgagaaggcgatgacatggtttgaaaaggcgatcatatcaaacagtgatttcggcgacccgtgggccctgtactacaagttcctgctgcagcatggtccaaatggaagttttcttcctttctgcatataatctctttttgccactcagtggaaagaaccc

SEQ ID NO: 5643 - DNA, 2614 bp, Emericella nidulans
ccctctccatcagcatataggagttgcatggatatttttgcacgaacctgctatgacacccaggtgcaactgtccctgctcgctatgctctgcgctgtcgagccataaagaacatgagtagccggatccgcttctcataatgaggccctctcggccttgatgttggagtacggagtaatagggcgtctataccttaagcggggatctgcactcagagtcggcgtacatttgcaactattagggcttggatcgaataagagctgaacagtcgaggtcataccatgtaataaatgtggaaggactcactgaaatagaatagagcactttgctcaattggatatcaggttcacgctctggaatgctggcttctgcggttcagcactgcagccccttgttcggccgactggaaaaagcaaaaaagaaaaagaaagagtagtggctgcataatctaaattcaacggctactatcgtgtcatagccatggccatgtccttcctagactctttgacaatgacggaacaaaagaacgaagccaccgtctcgcggcgcgagccagcgaaggaagaggacagaggatatgaggcgcaagaaacccgcatcatccttcgcaaattcgaccttcgcctcctacttctctttactgtgtcatcaacctcttcagcttcactgaccgcgtcaatattggaaatgcccgcctgcttggtctccaagaggacctgagtctctctggtctgcggttcaacatcgcactgacatgtctccttgtatcatactgtgtcattgaactaccgtctaatatcctttgcaagcttatcggtgggcatatctacgtgcccggactggtattctgctttgggaccgttactatgcttacttcacttgtcaaggatagaggggggttgtatgcctgcagatttgtactgggggtttttgaggggggaatctcgccggggttgctgtttctcctgtcgttgttgtgagtcctcccgaatagatctttagagtatagctgacttggctagctaccgtcgccacgagctcgggttcagaaccagcatctacatctctgcgtcttcagcgagcggcgcgtttgatggattgcttgccattggtctatccatgattccccaatggggtctcatcagttcatggaagaatatcttcttcttcgaggctagtaagatatacatcctagctcgagcccagatctgacgtaccagaatagggcctggtttcggtcctcctagcaataatcgccttcctcgccatcccgagtgggtcggggactgccagattcctgacggagtcgcagagcaagcttgctgcagagaggatccaagttgacgcagccagaacaagcgagcattcacgcactagactccgccatatcaaacaaggtttgacgcaattgcccatcgatggcttgtgcgctggggttatttcttgggaagatagtcgttatgtctggctatcatttggccaggcttcttacgttgtgtacgatttaacacatgcgcccaatcctatctttagttcttccccgtccattatccaagcaatgggctacactgacgaactcgcccagctcctttccgttgggccatacgtaagaacccaaccccagctcagagtatagcaagctaaattcaataaacaggtcgcagcctgcctgctctccatcctgaccggctacatctccgacaagtaccgcacccgcggacacctaatcctcctaacggcacccctcggcgtacccggtatggccatgcttctctcactcccagcctctatgtcctccgcaaaatacggtgcgctctaccttgccgcaccgggaatttacgcattcctcccgctctatataacatgggccgtcaataatgccgccacacccaccgtgaaagccgtcgcatcaggactggtctttacagttggttcattaggagggatccttgcgccgtgggtgtatctgtctcaagacgcgccggagtataggcaaggccatttgattatgcttgcgtttctgattttctcgtgggcgattgcgggaagcctgattacttggattaagtgggagaacaggacgagagaaagtgggaagagagactggattctcgagggattgggggaggtgcagaggggagagcttagtagtcggcacccggggtttcggtatgttatttaagcatcaactgaagcttggtagatattcgaggatatgatgagttcgcctttaccacacctaattgaaatcagagtcagtagagacaatagactacggatgtctaccgatactcatggtaagccctaatgccgttggggctgcacaacgcgattagggctggtcttcagaacccagagagcagaatggagtaagatataagtcatcaaaaagagatataggactggttggtatccttccgttgaggctcggttgcatctactaactccaacactttctctcttcaaaccctaacccgccggctcgagttagggcttactcgagttccctaccgaccgatctgagactcgcttgcttccaaacaatggacatgtattctccgcgcaatggtttattgttggataaggaaatgctcaaaagtattacgaccgtcta

SEQ ID NO: 5644 - DNA, 2302 bp, Emericella nidulans
ggagaaatggtatagacagaagggagatgaaagaagatcgagaaaggatatgaaggataatagagagaagagtatacagtggaagagaaggatggggataaggggtcatctgcgatagatagcgaggatagagtagagaaagggaagggcagggaatgtaagaggaagggaaaaccccctagtcccattgggataaggtggagattatttataaacgagccaagaggggaggagttgttccagtaaaaagaaaaaacatcgggcacttaaagggctttaaaattggtgcaggcatgcaacagtgtgtgccaaataacacaccagaaatgtgcaaatgttggcctaaggcaaaggttttaaaaggggagcggcaaggcaccttcccctcacggggggaccattcctcctccctctaaagctctgtagctggtcgccgaggccaacggggttgtcgcacttgtagattatcgcgtgggcataacccagcttgatgggaatgtttcgctccaactcgttcttaaatcggacagtttgaccccttgaaatagctttcaccaccgttgacttaccgtgagcgacgtggccaatggtaccgatgttaatcgtagcctggcgggcgcttcttctcaggtgacagaggagttagtgtagacaggtcgagcgtatctgggttgggttgctccggtagttccggtcgtttcggctaagaaacaggtatgaagtccttcttcatcgctgccttgatgggcttctcctcctgctccgggggctcttggtcttggatatcatcctggccattggcgttaagaatgggagacccgggctgggactcctcgtctgaaaaatcgcctgttggtagccatgattgcgctcgacagcggggttcgcaaaatgaaacggtgtacaggagaaggttggtgcgtggacgtcgaggaatcgtaggatgaaatttgctggttttgcaaatcgacggaggcgatacgatctttaggcctacactgggtttagtgggggttggttggttttgtgcagtggagagcgagcaggcggtgggtgacggcagttgtttctagacactatcaaaagttccagcttggcttctttgattcttctcagaaattttatcttattaatattgataacggtattgattatgaaacgtattgatggctgcagcatctcggttgaccagagctcgcctaaggtaataatgttagttggggacagccagcatatagttatcggttcagatgtgactcatcatatttcggatgtatattttcaccctaacaaagggatcagctagtattaaagtaaagtagcctttatagttgcctcatactcaatctatggtttacgtcttttaatagtaacagggtatatacaacgaaatcgtcagtagtattcggagtgctgaccctaatcagcatcactttcctcgctacttaatacatcctcactttctccatcggatgactcaaaatcctctggggtgcactcttcagaaggcatcatgacgaatgccttcagacaggttattcggtttcctgtctcgtaagagctcaaaagcttgcccacttggatatcctttgtgtcactagacttcttcgcaatagcattgcgcaactgggcaccaagcaactgccaaacacgcaccacaccctcgctatttgctgtaactacagcaaagtcatcatcattgattcccggctggcccttcaaatttaacaactcaaagctcttcaccctccctgggtatccttgagatttgccaccaaattgagcaactggctcggcgtatggaatcgacgaatcgtcaccgtcgtccgctttccgtacgttcctagttgagtagaatatgactctgccatcttccgtcgacactgcaaatagttcctcatcgcccactgatgtgtactttatttcatgcaacttgcttcgcggtcctgggaagaccctgcagatcggcgttgaatcctgtgaccgtgttagaaagcttgacctagaagcctagtggtagagcgctcacaatgccaaaaagtactgctccccattcgaatgccacagcgaactcttctcccgctgcattccaaacaatttttcttccttcgccagtgctccaccggccctccttcacactttgcaagatctccctgtcaaagttcagtaccccagccttctttcccgtaaccaagttccagagccgcatacacctctctcctttcccaacacttagcatcagcttcatactcgggtgtacggcaaaatcattgatgccagatggagagcccttcaggagagc

SEQ ID NO: 5645 - DNA, 1602 bp, Emericella nidulans
gtctctcgccatacgggcaagattggattggccggcccaggccggtctctagcagcggcccagttctaagtgagtggaagatgcacctaaggaagcaggaccgcagaatgcctggttcacgttaagcgatcagcctatctaacggacggctatagcttggtagaggaatgatagtggcttgcacggcttgccaggctggccactgtgaagccttactgtcttatttccctgaccagacctgcctgagtcctgcccgcagtctggatacatcagacgtcattgagagcatactcgggaagatagaaagtgagtagagataaataaaagagataaataaaattaatgaataacaatagtattaccaaatgaataaaaacaaaagatagatgaacggataataggtatactcagagtataagctgagacgataagctaaccagaacaattaaacaaccattctacgtcatattcagaatcataagcagggggaagagaattatgtacatagagtggttggtgtggaatgtctatacaaagccaagcctaacattattgggtaggcagtcggaagcagaagtccatttatcctgtacaccggtttacgcgataatgctagagaatggcgacggtcattccgagcaccgtgccccggatgagctctgtagcctgcgctgaatcatgatcgcggcttcgtaagcacagtgcttgagataatcataaaaaacagattctcaaacggagtttgccgatgcgaacggggtgcagttcccgcggtccattttcctgacgcttagtattggttctgtggcagtctcgtaaaggtatagggactggaggcttgggttgttagaaaggctgaaggcgtcggctagggctgaaggagttggttcaatctcatcaatggttatccttcgtcattgggtcagtggtaggcctaaaagggatggagatagatagaggcagatggtgattgaataggcttgagctgggttttggtggaggagggatactataggatttggtagtcatggtaaacgggtcggtagcgatgtaagtcgagaattctgttagggttgtgatactatgcatcgtttctaagttagagatggtacctggactaaagggagataaaggatgccaagtcctcaggtgggctacagtgaaagaatgacattggatcagtaaatgaggggagtgaagtttccacagagtagatcacagatgggggagtgcacaagcagggaaaattttcagatgaaatatgaagatatataacaagggagaagctggggagagatcacttaaagggggtttatagataacggacattagagaaaggaaaggatatgactaggtggggttacagatgggttgggtctaccagaggggtttattaggaaactctccaggggtataaacaatcaagatatgagacatagactggaaactaaataaggcgggtcaaaggggatatttggaccagggagaacgcataatctcgcgccctttgggtgaggcgctcttttatgagccctatattaggggggacataaggttacgtttgagaattggactttaaaagactattgggggtggggctta

SEQ ID NO: 5646 - DNA, 5738 bp, Emericella nidulans
ctgtcttgccgatcgtggccaatattgaagaacgttagcactactgtctgtaaaagtgtgtgatccgcacattgtaacccttaatataatgtatagaaggccgtgagcttgagcaaaatagcataatccgttcagccatactggcagacttgcgcaacatgcagttagggctctactgctgtagatctgggttcactattctcaggtatgtttcagactggataaactgtgtgatctcctaggcgatgttgcaattcaatcagtcaagtcgttcctgctgagtttacgggctcgtgatatacaacgtcgataccgtcaaccgtgtagttgtttgtaggcaagtacatacccgtgagaacaataccatagataaaaacagaaacaggacgcgtaaccatgcacgcacatacattaaatggcaagaagtcacagccacatgtggcaggtagtcaagtaggtatggtagtatcagtgccactgatctactacctggtacacacatatacagcaagcacgactcagaacaacctctaatgaaatgccgggtactattgaaacgggacagagagcataagtcgacaacaagaaaacagggagatgatctacggaaaaaaagctaaacaggtgcacagacagagaaagagagataagatgcgatgctatgccattgccattgccgcgccagtcgcttaacaaaatcaacctcgaataatgtactgtaccatcatgatcatgatatctaagtcccagtcaggcatgcatgtattgttttccaattcaaaccaatccagttccgtgaaaaataatgccactgcccggattcgttgatatgctcgtaaggtaagtatgattgcccgcatagtgatgccttgtagtatgagatgttgtacgtatgcaagttatgcatgtatgtgtgttcgtgcaaggaagcccagaatcattaattggataatgcaaagcgagaaggagcaaaacgccggctgaacagaaaattgtattgtatccaagtgatgtcgctgcgttaaatgaaatgtcaattatgttaaatggaatggtgcgatgaggtgacgtgtacaataaactgtcgaatagttcccgaggaccagcgagaaaagggaagaattgaataaatgttgttagaacatgacagtcagtcaatgctgtcgttgaaggatttggactgcttcgtgtctactgttgacattgggcgcctgacgcctagtcttcggccgcctaagctgtttgcgcgaagtcgattctgtgttatgggcgtgtagctggaggctagcttgcttgagggagcggatattctcgactggtgagcgtcttggcgtggtgatagtggtacatcatccacgggacttccagccgctgatggtaagccatagcgacgagacccagcttgtatgttcgcgcggggaatcgccggtgtatagtgggatggggtcattaagcttcggcggaggggtatgccggattgtgaactggttggggtacgcggctgagaggactgctgagaatcagaaatcggccgtggcgcctggtacccaaaagaactctgttgtcggggtgaggccttttgcgttgaggaggcagctccaatgtcggtcatacttctagaaactgagcgcgtgtgcgggctgcgataatcagagggctcgtcttcctgcaacctctttgtccgcatcgaaacggacaaccgacttagccgactggcagtggcgggtgtgacgggagcactcggtgagtgtgccaatttggtgctttggcctgcgttctcaggtgaagggtaatggtcgccttggttcgctaagcttgcgcgccgcgcttccagccgacttgcggtacgacgggccacatgcatgtgtcagtgggtgcattttcctttcgtggtctttgggttatactcttacggtatgatagcgtagtaggagttactgttccttcgtcggtagtattcgactgagagattcggaatgtagtatcgcccgacgactgctgcttagtatgatgttcgtctgacagagcgagacatagttctgtgagactacgacagacgctatcagctttccgtcgaaaatggcgtttccgtgaaccgtatccattgactatggagacatttccggacggtgctttggctgctccaaaaattggaaagggccattgattcctggcggcgggctccaatgccgtgaacacgtccttagttcccacactccttaccttggccagagccgactgtataagcggatgagccgggtttggagctgtaatagtatcagattcacctgatacgctagtccttcggtgacgcggcgaggaggacatcgttgttaccgtcgttgtcaccgtgcgcggtcggtctccagaggagagcatggcttcctgagatgacggagggagttttccagtcagttctagtttcttgatgcgcgatttgagatcttccagctcatcccagacggtagagggcgcagtagtcgaaagggtggattccgtcccatcttgtcgggattcataacgtggcttctcggtgacttcagaagccgaagcttgtcgactacttcggattgttgagagcccggagtggcggaaggagcgtgaatcgtgtaaagaagcgcgtcgctcagaaattggttcatcttcggggttggtacgacttagtcgactgcgaggcagtccaaccgttgagtgcgagcttgaggcgaaattcgactgaggcgatcgaccagattcgtctagagggtgggcagaagccgagtacgaatatggtaatgagctgtgtcgagtggatggcaaaccattttgcgaattcgaatgcaaggggctctcgaaggtatttgagcgggacagttgttcgggagacggtgttaggtcactactaacgcgggaggtagacgagcgaaatccagtaccggacatcctcagacgcgactaggagaagaatagagtcagctcctggaactatccgctcattcaggcagcttgaagaaagtctaatcagctcccgaaccgaaattggctcaacttacccgtctgagttcagagcgacccaaggactcgcgacggctcgagtcggacctcgcaatgttcaagaaaatatcgtcatttcgggaccgagattcgtcggtattcgcgcagcgccgttctcgtcggcatacgagcgcccttgaacaaaggtcgctgtggatgacggcattctcctcttcacatccgggggtgactgctgggagtataatgtcgatttgcggcgctttggtgcattgggactctgcacgctgagggttgagccgccgttaaggagcgcagaactacccccttgcccagtcgcggtcgcagcggaagagacgactggaggatctgaaaccgactctgtatcaaggtgtgacgaatggaagtctggaacggatcttcggtgaccgttatacaaggacgagtgcctgggtgaacggctcgattctggggcaggagtactgcggtcgatgctggcagtcttgaggtgtgaggtcagggcgatcttgcggagaggagattggacctcaaaactgaagcgactctgaggaaggcggggaataggagacagcgaaccaggttggtgaaggcgcgacggagatgagggcgacgaagtcggagggatcgaacgagatggtgaaagtgaaggtgaaggcaatggcgccgttgagggcgtggtgccggcgaatgttagcgcgccagctttccccgtgtcacggggatgaggatctcccgaaatggtcaatcttctttcaagcgcagcagaccgcagccggcctgatgatttgctcttgatcagatagtgcccttcagggtcgtcggaacccacggctggactcgcaggctcgatctggtgtacccatgccgggtacctcgttcgcgacggcaaatccatcgtcgagcgacgcgaaaaatgggctgattcgacgatcgaatggctctgcgatgcatgggtgcttggctggacaatagaaacagtcttccgccggcgccgagggtccaaactcgtcgtttgatcctttgttgtacttgtcagagtgggagtggtgggcgaagacattcgagtgccagcagattctttgtcgtggagcatctgcagcgctggtcaggcatccaagcgatgccgcatgagtcagttctctattttcaatgaattctaatagaagcattgaaaatgcatctcagtaacccggtttgttttggagaaaaaaatcaatctattggctgcataatcctatacagagagtgaataatcactaccacgcatacatcacaattgccagcagctctcgcctctgatttgctagtttcagggggaaacagggcgacgtctacaaaaataaatcgaaatgaaggacctttcccaccgttgcgagggctgtgagtggttggacagctgaaatatgggctctagccggtggatctcgcaccgtttagccctcatggcccggagaataactgcactaagtagatcgaacctgtacctgacaggtacgccttgcttagaaaagatatgataaggagtccttttacgggttgcggtgttttcagggcccttgtcttaggcatccgattgagtgacggcagtgataagatatatcttctacagtagccagccccctaaaattgacaacggatctttaaccaccacccagggaagagatcgaacaagaaaagtgagcccacattggggctagggctcgaacggtcctgtatgtcatatttctgcaccagttcctgcagcaacagcaggcccatggtccgcacagcagattccacggttcatgcgctggaggagacatgtctactttaaacaggccgtctaaccgctctgtacaccaagcaattccactaaacaattgaacaaacgagttgatacgagtactcagatgtaatattcctagtgactagccggtacggagtagctaccctcaggtttataaaaccattacttccgatagcgcatgtagggtacctccgaaccgaagagggcgaaggatcgagctcgcgtattagatttagtgcaccacagcggtgcgggcagcaccctcagtacagaattcagctcactcttcagtaatgctgcgaccgttagatgaaagccattataacgccccgcaactccgtgagtgtctcaagagtgccgcagtctggggctattctgacagcgttgtctggacgtcgagcatgaaaacggcacgtcggcaaaacaagtttcatcctttatggcagctcggggttgcctgcctcgtggtcaaatattgcagtcacatattgcgctcaccctgaaacggtagatgatgacatgttgttttcgtcatcgagatttcccagagctgacgagaagtcacggagcgatcacaatattcagcgagatgctatagccgttatattgcgcctcgagcggcgagccgctcgtttcggcctcacgcgtggcaagatggagccagcagctccggcctagcacaaggcttgaggcaattttttcgatccacgtcaaagctctgaacccgtcgaaatgaaacagccgcgatcttttcggctggagcctggagtagctcaagagagcggttaagaacccaagcgctcattgaatcctagtatgtatggagtaggtcggacatggagggatcgtatctgcatacgatgcttcatataaacgaagttgagaccctttgctgcaggagggttggagaaagcatcaagtaaatagatggaaagtgacc

SEQ ID NO: 5647 - DNA, 3284 bp, Emericella nidulans
gaacggccgcaaaccttctgctgcgggaactctcttctttcttgctttaaaatgttccactgattttgtggacctatcttggccgctgctgataggtttcttcaatagaaggttctgttcgatgatgtaaatcgcggctggacgctatgactgtcttttttctctcttttggttcctggttctgggatgaagaagatcagtgaagaattacaaaaaagccaaggctgaaaataactcctgattatacaggcatcaacacggatatagtatccctagataatggcgtcgactccacttgggctaggtgtctggtcgaatgcaattacctaaccctagtgttaatgctgctatctatctctactaataaaactgatttgccattccacttatccaattccagagacggccctgggttgagtacctccaaggtcgtcgcgtgccgaggcctacaattctctgagacctgaatgtgtggtaagtgtaccgtcttgaacttaacgccgccgagtttttcaatcctaggggctgctttggcttgagaagttatgtgggccgtggagtaaaatctccgacttgtcagtctcagaccgcaagattattcagggcatggaaaacccgacgggcgtgattggtaaatatgaggtagactacccaccagcagccgtgcaagagtcagtgcacggcagtgatcgacgtaggatgttaagtattccagcagttccagctcgacttcgcaagcacgagtgtaagtactgtgtgggcattgtgggcatcttgagtgcagagtcagagccacgcccccatcataccacgaaacaggccagggggaatgccgctcaaaaaccccttggtgatatcaccgggtgggcattgagttttttttatgtcgacccttgtccgatgatcggtcagaagaatagcggggagattattacagcgggctagcgcacactgcagctgacggtccaataaacacgattctccgtggctttctcgacatggaaaccggcgtctgccacagtatcggctctgcttcaagaagcttattgtaaaattcaagaatactccataagctttactgcggagggatgagggtgcagctgatggatcgggcccagcgggaaagtgcttatggatatgcactctgcagtagcggaatgacccagcgtagccggcgaggactgtcagatacaaaacacactgccgcagaaggcgcggtaaatcagcatcaggctgtcttgcgcgttgggcagagagctcggtgggaagagaacggaactcacttgctgctctatgagcacggatgcgcctcaacagactcaaaaccagactcgaaacaagaatttccgtatgaagcatcaggtctttactgtttgcagttctggtcgattatgatagacagttacgagcctttttggcgttagtcccgccagctgcaggtcactgcatcgccccggccaatgaatataggccgccccagtcagggccctcaaaaggagtcgactgtgagacggatgcaggcggcggactggtcgctggagatgtgacttgggtacatggcccagcagtagcttcttggtcctcgtggaaatgggtgggtacaatggagaaccggcaatcaccgaaccaaaatgacacaaaagacggtcgagccactactgcagtactcgaagggggcaatgcgtgtttcatcgaccagcgttcgtttcgtccaggcggcggttctgagcgccgtttcgggttgtgggtttggcaggattttgtgtttcgcggtgcgattgtgggttcggtccagggctgtccaacgctcagcccctccgccgcattagtctcgagtctcagggctagagaaggaaaaccacagaaaaccactggcagcgtgccgtgcgctgccaatggactcgtcgatcatgacaccatgacccaaagcttcaagagtcaaaagcaaaagttttcagtctgacgaaagaggcaaaagacagccaatcgcgttgtcttcgctctggcttctctctggcttctctctggcttcgcactggctattaataggaagacttttcgacgctcccagttgacgctggaaacgaacctcgggcgcttaaccaggagctttgatatggtaccagacccagaagacatgacgatggtttcaccctagcgcctagaggaaaaggctttcagcagtcgcgaaccaagagtccccagagttcggtagcttcagctcagcgcgaagtcaagcaaatgaatggacgagcacgggcgttggggatatattttgcggtcgtcccaccagacgacgaacaaggttatgctacagtaacattcaggcctcaccacgcgatcatagacccagagttcgagaaccacctgaagtgaattggatctgatcgttcgtcgacggccaagatcggctcgataaactgggtatctacctttctgggctcctggctccttaatgctggccgccggcggtaatgaggtatggagtacaggaccgggtcccagcacgctggaacaaagaggcattaagattaaagcacaggactaacggacgcggacggggacgggggccgcctcccgccgggaagtttacgaggaatcaggaataattgggaggtataagttcagtagtgtagttagtctggttcctggaaactgggaaaggggtcggttataaccgtccgcgtcgacgagtagagtttaaagcaccgcagtagcgcaataccaagcggaccgtcgtcgagctggactcgctcgactgccaggacgcactcgaggagggtcctgagtgctgaatctgatacaccacttgcagaggctagcagctgacagcgccttcgtcgtgcagagtagtctagtagtctacaggggcccgatcctagtcatcctagccatcttagccatcctaaccttcctagccttcctagccatcctagtgcctccgccaggcctttctcacccccgatctcaaaaataataataataataaaagaagtcgacctcgtctgcttttgcaactgcctcccgccccgcccccttcgcgcccgtgggcccaaccgggtcaagagagcggctgcgacaatcataaacttaaagaaaagacggcgctgcttgcttgcttgcctgcttgcctgcttgcttgcttgtctaaacgcccgtcctgttgttgtcccgcttcgctctctgttggtttatgggtgtcagtccctcgcgctcttccagcaccgtgaccgctactttttctaagcctgtcaatcgtcaatcttcaatttcccttgtgggag

SEQ ID NO: 5648 - DNA, 7642 bp, Emericella nidulans
ggacgggaagattctggagggcgatgtgctccttcagtttaacggggagctcctcacccgatttgggcgggtgtattacattctcgattctagtgtcgcacaaacggtgcggttgctggtgcagagaggcggccaagacgtcgaggtcgaatgcagcgttggcgacttgcatgccatcacgcctgaccggtttgttaccgtcgctggcggaacgttccataacctgtcctaccaacaagcccggctctatgcaattgccaccaagggtgtttacgtgtgtgaagcagcgggctcatttaagctggaaaacaccctctcaggatggctcattgattccgtcgacaagcggaaaacaagaaacctcgacgagtttgtcgaagtcatgaaaacaatccctgatcgctctcgagttgtcatctcctatcgacacatccgcgatctgcatacgcgcgggacgagcattgtgtatatcgaccgccattggcatccgaagatgcggttagcggtccggaacgacgagagcggtctctgggatttctccgaccttgctgaccctattaaggccgtgccgccggtcccgaggaaagcagacttcatccagcttgacggcgtaagccagcccgctgccgccgaaattgtacgcagctttgtccgtgtttcttgcacgatgccgttgaagctagatggcttcccccaggcgaagaagactggcttcgggctcgttgttgacgctgacaaggggttggttgtggtgtcgcgtgccattgtaccgtataatctgtgcgacattaacattaccgtagccgattcgataattgttgcggccaaggtcgtcttccttcaccccctacagaattactgtatcgttcagtacgatccttccctggtgcaagcgccagtccagagcgcaaagctcagcacggagtacatcaagcagggacaagacacgatctttgtcggcttcaaccagaacttccgcatcgtggtcgctaagaccgcagtcaccgatattaccacagtttcaataccagccaacgcttcggctcctagataccgtgcaatcaacttagatgcagtgacggtggatactgggctaagcggacagtgttcgaatggtgttctagtcggcgaagatggtgtggttcaggccctgtggctgaactatctgggcgaacgtacgccaaactctcacaaagatgtcgagtatcatctcggcttcgcgacgccctccttgctgccggtcgttagcaaaattcagcaaggaatcctgccaaaactacggattctgaacatggagagctacgtggtgcagatgagccaggcgcgcattatgggtgtttcagatgagtggattgagaaggtcgcccaagcaaacccgtctcgacaccagctgttcatggtgcgcaaggtcgactgtccgccgcccgagttcaattctacggcggacagcttccaagagggtgatatcatcctcactttggacggacagttgatcacacgcgtgtcagagttagacgtgatgtatgagaaggagatgcttgaggcactgattgtgcgcaacggcgaggaaatgaagatccaggtgcctaccgtttcgacggaggatctggagaccgaccgagccgtggtattctgtggcgcagtgctgcagaagccgcaccacgctgtccgtcagcagatttcgaagctgcatagcgagatctatgttagcgcaagagtacgtccatagtcgacatgtgtttacatgtgctaatgaaagcagagtcgcggatccccagcataccaatacggcctctctcctacgaatttcattaccgctgtcaatggagttccaaccccggatctcgaccgcttcgtagaggaagtcaagaagatcccggataacacatacttccgccttcgcgctgtgacatttgacaacgtgccgtgggtggttaccatgaagaagaacgaccattacgtcagactccgttccctccataaacccattaccagactgactgatattgtcctagttcccaatgtccgaatacgtcaaggacgaatccgaaccgcttggatggaagtcgatctcgcacgatgtcaaagggaaggacggagtagctgcggacgttgcgaacctgaacccggacgctatggacgagggactagaaggaggtgtgagcgatatagagccggaagctgtataatagattggcgccgcgtataggccgtgatttgcttacctcgcaggtatttagcggctagctccatgctgatatacggaataagcgcccacagcggtcatggattacccgctctcgacttgtactccgacaatttgctctgtaaccgtagtcagtaaagcacctcaccactagcccacctgctctactgatggttgttggaatttcaagacccaagagcaggcgatacgctatcgctatccgcacagtcagcagcttgcttaacctcacatgtctactcgaatatcatcctgctgtgtgcagttctctggaaatcacccactggccattatctggctagatccacgcagtcttggtttactgcgaatgtttgatgataagccaactcggaatagacggaacggcgtgggaccggcgcggaatcattccatgccacgtacttggtaatgcagatcacgatcaactgaccgctcttcattgaacccgtttaaacgcgtttttttatattcagcaatgatgccaccagttgcagacatcctgtcaggacttagttgagcaagaggcaggatctagattaaaatcaagctccaaaagaaagagaatatgatatttgtcatgcaaaatctgcatataatatcccctagaacactttaagtttgaataagggaaacctaaatgcaaattagaatactgcaatccaacctctaaatccctagtactgacagtgtattgatatctcaatagtatctaagatacttgcaaagtgcctctctggctgttcatgcaaaagagtaatgatataatcccctagatacataatcccacagagttggatcctctattgaatagcttaaaagtagagttggtttgcacaataacagatgtcaaggtcccttcgtcaaggtagatcagcctgttcaccaggtaaggataccaataccatgtaaagccaacgataggtgttatgggatgaacccccagatactggctcggcatggccctcgctgctaagtagcgctctagatgcattgatcagtcttataagatgttttgtccttttggttccagcggtcaggtctctatcagcacagaggaagatctgcgtgttacagaggagacatttctatactatactagtggaacctcgggctggggccgctagtttaggcactgaaataccctcaaagataaacaaatatttcaacccaacctgaataactcaaataacaaagctagtaatcgtaacaattgaacttgcctttcaaagaaggaattggtaagtaattttaaaattgcggagcttatgcccgctttacggggtttagaacggcttaacggtcaaccctcgtagtactaccactataactacagttgtgccaagtatactcccacaagttctagcatttatagtaggttgtagtataacatcttaccctaaacaatctaaccaccgaacatagtaagaatatacgtctttcgttgctggatatgtcttcaatttgtgtgggtatgttatgacacaacacctatgtcttgccagtgtaaggagcagacagccataggtgccatccggcagcttagaccgtagggtccaatattagtgaccttcttggtccagttgagagtatacttgcatggtcttacactcggaggattacagggatgatagcttggattgccggccaatcagagaatgacctgctgtcgtattagcatgaagactcctattatagggttataggaatagatacttatatgagaagcaggaacctatactaggacttagaaagctatgccccatgtcatagctatataaagagtagaaatatttaaaagtatttataactggtacctctagtaaaataacttgttatttacagtacttgataccttgcccctgctttctcttgtaagcttggcgctctggctgtggcttatactatactagttgggcatgctgttggatagagattcggtaagctggttagactgcggagctacagcggagttagctggctcggaaactgaggggccagcctttccgttacgaagtgtagctgaactgtatggcgaggtcgggaagcctgtgtttccgccatggatccccttgcgcttataagacagactggtcctctttgggcagggccagaaaaagttgttctcacttgtatctctcagttgctgttcaacagtatatagaagcggaatctcacaatggctagcggaaccctcccgccgtttcctacaaagttgttcatcaacaaccaggtggaaaatacccctcatcccagcacattattgcctgctgatcgtatgatcatcagtatgtcgacagcacatcttcagtccgccccacggtcgtgaacccctacaatgaaactcccattccatacgaggcccacgctgccagtgcatccgacgtcgacgccgccgtggccgcagctaaaaccgcgtacaagaccagctgggcttctttttctcctgcacagagacaagcatgtatgctcaagtttgcagacttggtggagcgcgatgcagaacgacttgccatcctcgagtccctgcctacagggaaaccggtgacgcctaccatccactttgatattgcgcatatgttggaggtttggagatgtacgttgcgtgcccctcacaccgatatcttccgctatcttctactttcagagggacagcagactgatatatattgagatagattatgccggctggaccgacaagatctccggcgaatcgtaccctgagtccaacggcgtgtacaagatcgtccgccacgagcccctcggcgtctgcgcggggatcgcctcttggaacgcgaccttcatgtatatcggttggaagattgcgccggctgtcgccgcaggcaactgttttatcttcaagccgtctgagaagtcaccgtttgggacgctggcgctcggtgcgcttttcgctgaagctgggttcccggcgggtgttgtgcagatcctcaacggcggtgcagagacaggtgctgcattggcgaggcacatggatatcgcgaagattagcttcacgggctctctgggcggtggcaaggctgtgcaggaggcggcgacaaagagtaacctgaagaaggtcaccctggaacttgggggaaagagcccggcggtggtgtttgcagatgcagagcttgagagggctctaggagggtaaggctactccctttccatttggctgggaaacaggggcatggttttgttactgatactaaagagctgacgatgtagggtctgcggtttcctgtttaactcgggccaggtctgtgtcggtacgttctccatatactccattgttttcggcttcaaccctgccatactgacaaagaaaagcgacatcccgcgtcctcgtacagaaaccgatcttcgagaaattcacccagggcctcaagtccgccttcgaacagacctcctccactcttggcgccgaccctctggacaagaacgtcagctacggccccatcgtcgacaaagcgcagttcgacaagatcatgtcctacatcgccatcggcaagcaaaccgccaccttactgaccggcggcgagcgaaaaggcgacaagggcttcttcatcaaaccgacaatcttcgtcaaccccgagcctgagagcccgatcgttaaagaagagatctttggacccgtcatggtggttcagacattcgagacggaggaagaggcgatcgctctggcaaatgcgaccgtgtatgggctggcagcttctgtgtatacgtcaaacattgaccgcgctctgagggtatcgagcgcgctcgagtgcggaggcgttgccgtcaactcgccgttcctgccgcaggtaaatacggcgtttggaggcatcaaggcgagcggaaagggacgagagctgggtctctatgggctgctggagtatacggaggcgaagagtgtgcacatcacgtatgtcgaccccagtatcttccttcctgttttggtttagcttatgtgctatgcgagttactgactaagccaggctcgatgtgccaagactgtaattgctatgcaactggcagatgctgtgtgaaccgtggtggctggaatgattgtatgagaacgcaatctctatgagttgtaccacaatatagatccaatctactcgaagatctgcagctttacctgggtaaacgagtagacaaagacggggtcttctgactgcgggcgcgcgcactgcaagcagctggaagcaataccgatatatcgaacttcccactcagccaaaaagggctaaccgcccttggagagctaagttctgactaaaatacttgttgtcacgatatagtaggcacgcagccagatcagctgcaaactgcaggaagcgtaatgaattgtctcaggcaggaagctgagacaatctggattgatgaggcctaccgaacaagtacctaaagtagtcaacctgtggaaaatacccgttttggtgggtgttctatgggaatccgcattcaccagaggagaggccatttgagcaccaggaaggaccgtaatggatcactcctggtgttaatcggcagctcattgaaataatactcaataaataatactcaataaatctcggtctggttcttactcataattcacaagagaacggtcgtcttgagcggggtcagcggccccgcagaaggtatctttgtccatgaggggatcccatctccaacactaagaaataagaggggaaaaaaatacttgtcctgttttttgtctctctcctccacgctttcacaaaatgcctacagcaaaagcaattgtcgcccgcgagccccggttcacagcgctgaactgggcgctcgaggatgtctgcgtctctaatgagcccggcgacgacgaggtccttgtcgagatggtcgcttctggcgtctgccataccgatatcgtactctctgcggtgccgtcagggcagctaggaattgggtatccaaaagtgataggccacgagggtatgtctaccgtactttactggaccccgtagggccactgaactatgctgatactcagcggattgaattttgaaggatctggatacgcgcgcagaatcggtaagaacgtcacaactgtccaggaaggagacccggtgttgctttcattctattcctgcgggagctgtgggcagtgccaggagaggcacccagcatactgcgactcgttcgcggtagaaaattacgtcgggcgcagggggcatgtcacgacagccaattctgccaatggtaaaggggacaatggggagcaggtccactcgcgcttctttgcacagtctagtttcgcgcggtacagcatcgttgatgaatcgtgtatcgtgaacgcgtaggatctccttcggagtgaacacgagctgaccctctcgaaaagctgggatgcgggttccagacggggatggcagcgatccaccagtgggcacagccaaccaccccctgctgcct

SEQ ID NO: 5649 - DNA, 4937 bp, Emericella nidulans
agaaaaatattgttatttactgaccatagtatttacttatatacccgtatattcttcatacaagctctaactttttaatataggctattttatacctctaagatgagtatatagcggcttagcaaaaaataaatatatctagtataaagggaaatataattatattgactgatgaactgttcaaaatattgcttatacatggaattaggagcagaggcagcctgcttgcttacacggcccacttgcttacaggatcaaaggctcgggtggctgactcagatttgcacctacttatattcacataagtcatcccaatgaaaatagtgtagtaactaatctttggcaacaagaggtaactccatggatgataacaagtaaactagagtataatctggaaatccactaggacctcaaagagtctagctaacctatagccaggcaggttgaggggggagcgggtcgagtttaaagagtctatccaattgaaagaccgacaatggttatagtgttggctcaggttcgcggcgcttgcaggctgtgacaagtgatataactgaccaactgcgacacaccaacaacagctccacaatatcacagtaaactcacttatccactatacttctcgggagtcatcaatggtacactatggagactttaggtgaaatgcctgcagagactcttaccttcggcgacctgtattcccactgcagtatcgacggtgacaaactccagtgcagcagtgccaggggtgagagccggataaacattcccatagcggacatactctgtatactctcagatgggaatgtttcacggggatacatagtcgtctttcttaaggagaccggatcacccagtaccccaccagaacttgaaagaatataccttcagaccgcgctaccaacagtgttatccgaccatttacttactgaagtaccagaccatctcaactacgactgtcatataatcgtttccactgcatctgggacaggaagggccaaagtactatctggtatacttcaacaacttctcgcgtggatcggcctcaatcggtttacggttcacgagacacagtcagctcagacaataactgagttgtgtcattctttgttcatcccgcaggccgaagcgggtatccaacaaaccatcgttctactgtctggagatggtggactctgcgatattattgatgcattccatagtacgccgaaaagcatccaagcgataccgaacatagcccttatccctgccggcactggcaatgccatggcgaattccattgggctgatggttcttcctaaaaacccactaatggcactgctgcgcggaaaacctattcctctacccgttttcgttgctacgttctccgacggagcgcgctatgtccagggagacagttcccgcgtttcgaggatatatggatgtgttgttgccagttgggggatacatgcctcgctagttgcagatagcgacacagtcgaatatcgcaagtttggagccgacagattcaaaatggctgcaaaagagctccttttcccatcggacggtagcgaggcccacaaatacagtggcactataaccttgctcaagagagatggccaacaatgtctcgagcatgaactggttttagagcattaaggacatggcatatgtccggccaccataagggccaattctcaaaaaaaatttcaaaatcctctccaaactctccggcacttattggtcttttgaggatcgttcatttcagcccaatgccatctcagcggggtaatgcagcatgctatttgatgggtaccaagacgggcagcacgtcaaagacaatgatgtcatgtactgcgagattgaaggtttgagaattgattttcatgaagtagacgagaactggaggcgtgtgtgcatcgacggtagggtggttgtcattgaggaagaaggctggatgagtgtgcgcaaggaaggcaggtcattggtggccctcctttggtcagggcgttaataatcgtccctgaaaatttcattattttcataagtgctttggctttcggctgctgtatccgctgcagaagttagtctgttagtagtattggcagattgaagatgcggtcctgtggttacgatttcaactgattgaatgtttctacgggagttaatagggttcgcgatattaagcctccaaaaaatgatctgcacgaagcacgtatattgtgaacagtgacagaacacagacgtatattgggaagcactttcaaaaccccatctggctttagcagcctcatccttgtttgaaagtgctaaaaattataaattcagtgatatccagactcccacatggtcgaagtcttaacggagacaaccgaagttcggcttcgggtgtgttggtatcctcggctttatcgccaccaatcattgtgccggagtttcgaccacagcagtaatcaggtaaggcttgcttagatatcctggacggcttttcacctatccgcgtacccaccgtattgtcaatcgcggctccatattcagaaatctgggaggctccgatgatacctattcgaatatactgagttaccatatcagagaagcactgataatcgctatcaccatgtctttttcaaatctcgtctccgacctcgcgttgagagacagctatgaagaccgaaactcccagatctcgaatgcacggtctcaagttaccgctcgatcatacacaagtacagctgccacaagtgtcagcatagccggagacatctcaagccagctacattctggctacagccatccactcagcatgtcatggcaagcagagaggcaattgaccaaggtctgtagcataaaaatattcgttacctctacttcgcctgaacttcgctttcactgcagtcgcgtcgttcatgcccgatctgacttgactctaggaaatgttaatctactcttttttcatcaccgacaacccggatgaagagacgcctattccgtcactcccaaatcaacaccgtcgaggattgaatcggctcgtaccattcctgcggccccttgttcagaagggtctccgctctgttatcctgtttggtgttccgctgcatccatctgccaaggatgcattgggaacctccgcggacgacccagccggccccgtcgtacaggccattcgtcttctccgctcgcgctttccagaactttacatcgtgactgacgtttgcatatgtgaatacacatctcatggccactgcggaattctgcgggaggacggtacgctcgataatgcgcagtccgttgaccgaatatcggatgttgcgttggcttatgctagcgctggtgcgcactgcgtcgcgccatctgacatgaacgatgggagagttcgcgccataaaattgaaactaattgaggctggtctggctcatcgtgtgctgttaatgtcttatagtgctaaatttagcggctgcctttatggaccgttcagggacgcggctggttcttgcccttcatttggagaccgcagatgctaccagcttccccctggtggccgccgggcttgcacggagagctattcaaagggacatcggcgagggtgcggatatcattatggtaaagccagcaagcagctatcttgatatcattagagacgcaaaagaacttgcgaaggatattccaattgcggcttatcaagttagtggcgaatatgccatgatacatgctggagcaaaggctggagtcttcgatctgaaatcaatggcttttgagagtaccgaaggaattttacgagctggcgctgggataatagtcagctattttgtgccagaatttttagattggctctaattttggccatgcccgattcactatctgtctagctataaccattaggactatcatgcttgctcctttccttttcatacctctttgtagttacgcaacaggttatttcatgatagttatgccgtattatatttttgggtacgcacattaaaatgctgctactctctttattttggttatcatgcatctatagccgttaatcaatagcatagatatgaaaggtttgtggtaactccgcagcaactagcaatcgtgtagcaatatctctgggaattaatgataacagtgtataatcgtgtcaaaaaacaaggtcaacccgctttgtgaggctttgatgatgacaataactgctgctctgaaccagtcagatatgatttcgagcctcaaaagcacaagaacaatcaactcgacaactgagcttgagcaaatgtcgtagtgttacacctgggcaacgacaataacccgagcaaaatatgaactagaattaaaatagccgagtcatggatatctgaggcttagtataaaagcatcagacaatatcacatatagcttggttttagtccctgaaacccataagcgacaatgtcggatttgactacttcaccgggagcgacataagccccgcgccggagacggacgccagggtatatagtacagccggctccgacataacaatcttcctcgatagtaacaggcctgccctggtagcggctttgcgaacctttccgttcctgcatattcgcatgagccatcgatgtgagaatcgtcactcttgggccaatccacgtatgtgccccaatggtaacaggacaatcatccactaggagacagttctcagatatcataacgtcctcgccaatatggatgttgtatccgtagtgacaatgaaaaggcgtttctaccacagtgccttgtccgatagaccctacgggtcttggcgacgtaataccggaagatggattgatggacgcttggggtaccaatatctccttcagtaaacggttctgctccttggcgctaagaccggaaacagggttgcaggcattgctgaaccgccaaagtgcggctaacaatcgctaaatttcctccacaagtataacatcaaagggcctgtagggttttccggg

SEQ ID NO: 5650 - DNA, 2965 bp, Emericella nidulans
  unsure (1)..(2965): unsure at all n locations
gatcgtccgcccttgtagatgagcgctatggcgtcgcctttccatgtatgcaggtggttgggcccaacgcgcacaattggtccgtaagtattgtgtaactcgaggagtttctcatgaattgtgagtttgtacacgtagtaggctttgtaagtgttgctgagagacgcgaagaaggggccggggcactgggacaacgggtgaaaatggcgcatgtataccacgtatgtgaggaaagtggtaagcaggagcgttgcaagaatggccataggggtgacatcccgaaaaacttgtaggacaaccgcggattctagtaaagccatgcttgcataacgggaagatcgccgatctgcagggaaaggtcgagtgagacgtccaaaataagccgggggggcgaggcttttggggctatataaatccagctgcatcaagtctcggctgtaagaccggctaatagagcggggctgggagatgctgaagacgatctacggggtaatctggggtttgtgtcttccttattggattgaagctttttgctagaagcgaggacaaccgtggataggcttccgcggcgttgatccaccagcgtgccataccgcacgttctaccgcgggattcaccccccagtctttgtcggctttagccgcgaggaatattctctggaacacatctacttaggcattgaactttgctaaagcaacatggagacatacacccataccttcaaagaagtcgacggactgtcgctgaagatcgacgtctctaagcccaaagctgctgataatggacttgcgctcgtgcatttccacggagggtatctggtactacaccttctatcaagagcagattcagtggtcagttaacaaagtttgtcacaaggtcttcggcgagaaaacaacgaaccctccatactggctcataaatgcctgccgcacccgaggctggacatacgcaagcccctcctaccggctgctccctgaagcccccgggcttgatattctcagcgacgccctcgacgcaatccgctgggtccacaagcatataagcagaaatattatcatcgccggatccagcgcaggcgggtacctcgctctcgcatcggcggcgaatccaacctgtccaaggccactggatgttctgtcaagttatgtcttgctggaccctgcgtgcacgaggtatgtcagaccgggacagcctctgcatgcaccagtgagcgatctcccagcaactgtaggggatgtacaggccgccaggcaaagtaagaaagtgcttgtcggctgcgcattcccacgaactgccgtcgngatgcgagactcaactgggtaaaagcactacatgaggcggctattttccctgacgtattgaccagggttcctggactggctcagcagattttgcagtgtggcgtggaggttataccagctgaataccgggcgctctttcccgtatcgtttggcctgacgagaaacttcccaccaaccattctgctgcacggagatgcagatgatctggtgggattcgaacagagcgagcttgtcgcggagaaattgagggagttaggtgctgatgtgcttctggagcgagcggtagggcaggggcatgggttcgagcataacggctttatcgatctcgatactagcgacggaaacggggataataaggagatgctggaatgcctgcgccgtgttgttgctgcattggagaaagtttgtacttctgcttgtggttgatcaataccgttcgtcatcctatatccagatgctcaacagccaatatgagattcgcaacttggtccatcccagtttgatcaaatgtggcaaggccttctctggactccaagtagacatgctcgggcagcttcttgagcatgaggttccactcttcgggagataaatgggacttatcaatgtgcacgcgcgccagtgcagcgaattccctggcatgtaaagggaaagggagcacttcatctgtagttgggtttgtttttccgaccatactgctgtcccatgctaccttccaacgatctagtgctcgcttcaatgggtctgtggctaagggaaggggcgagaatgctcgaagttggtggaatatgagcccgtggacggctgttgagacaaagactagttaacaacggacattttcacttcggagactcctcaccagtagcgatagtaaacagattcagcgcacccgcatggccgagatgtgcaatcacatctgggtccgggctttccgcacacagattgcgaacgcagtcggtgagcagaggaacagtgcatgctgggtgtaacttcaggactctcgtgaactcggcaggtgacacggcctggaacacgtcttctggacaggtcagatcgatcgtcatctcctgtaagaccatgcgaggtacggaattgtggaagatgacaaatgccgagtcgaggaggaagacgtggttgaaggttctggtcgtcagctgtcagcaagggttgctttgccggggaatggtctgacctgatcatttcggctttgagagtgtactcattccatgcttcgaaagtcacggtggaactgagatcaatacggggatgtcttgcttgggacagtcccatagctctggtggtctatcgagtgtcagtaagtccgcccatgaaggtgatggtatggctctaccgcaacaaaggccgtaaaccgatgccgttgcatcctcaacttggcctgggaactcccctcccacttttgcagcagacacatgaaacatgtagcctgcaggatctgaatattctcccgggtctggagtagattctcattgctcgaacccagcctcggtgattccaggaacaacggattcgaaaagatgagatcctccatcacatccaagaacccctttgccatctggtggtctatctcttgagaggacatgcatgccccaatcagacacatcgcgacgagtaagatatgggaacacgtgtaatgtcgtgaagagagt

SEQ ID NO: 5651 - DNA, 2318 bp, Emericella nidulans
ttgtcgctgtccttgttttgctttgctttaaagctgcccgcttggcttttgttttggaattgagattctgtagacgcctggcagtttcaaggcggattcgcatgagctctgttggttttcgtcggcgcgaagtaacggttggtgtattgtcctcgatcatctattcccgtcagacattagcgtaaccgtccaagaaaaatgtcataacgcgattctatgagcggtcaacccttgagggacaaacaaaccaagcgcatacctctctcttagctctagccctcaatctcctcggaaccctcttcacattgtgactagcagtccgccgtctcagcgatctcggcacttgctgaaacgcacgactcgtgagggcggctttcgatcgctgtatcccagactcaagagacctgatcgcagcctcctgggctccaacataggccgcaacatcaagttctccagtcgctgtgagtgcagcgctagaagactgcaccgccaatgatcgggcatcgatcgtctttgcgcgtttgcgggcagcagcggtgttttggctggcgaacgcaggtttgcgttttgttgggtcggggcccatggtggccggatgggcgaaaccaaaaacaacttcgatgtcgataaagacgccggtattttctctgttattagagtgaacttagagctcattgggaaattggattggcaagactgggcttgatagggcctgggttccgtgttgaatggaactttttaggcgtccgccgctgtcaatccgaatctcacccctctaagctcccggccgagagaaaaaagcacacagacaaatgaggaccaatcgaacgaggagaacgcttggatacatgcaaatcttctggaaactggggtaattaaatattaagcttactttggcgtatatccttcagcactatgttctattcttggccaacaagggtgccctcttatactgcacgtctttaaggatgtttaaagtcttacgaagagagacgggataccttttcatagcttcgtaaatgcatcgtatttctatatgtggaaggtctaaatctaaaatgaacccctgtcttcacaggtcattacctcaccggtggaacgcatgtgcaaaacagacggtctgtcaatagttcgtcaaattacaggtgcttgatgacagtctcggcgctgtagaactcaaggtggttcttggcgggctccagagcagcgtaggtgaccttgccgtggtcgagtctgatggcataacgcttggtacggccctcctcgtcggcccagcggatgctcttggagcccttggcctcggggtcgtgaagtgaaagataagcgcatcattagtggatgtgctatggcactaacacttgagaggtgaacgtccaatgtcgtcgttcttaacaccgttggccttaccccaggcactcatgacgaaagcatcgttgtaggcaagtacggcaacaacatcgacacccttggcgcggatctcggggaggcgctcgatgtactcagggacgtggcgagcagagcagacgagggtgaaggcaccggggagggcgaagaggatgaccttcatgtcggcccactccatggaagcgtagtagttaatggggatgccgcaagaggtgatctcgcccttctcctcagtccagggaatgtagctgttaaacacaatagttagccttaaaaaaaatcaattgtactaataagaatttagagcaacatacgagaagacaacgtcagcggggaagctgtcaccggccttaagtccagacattgtgtaagatagtggttgttggttgggtttgtaagaaagaaatgaattgatagtagaatgtaaagtgtagagaagtaggagtaaatgtaagagttgacttatcaggagagaagggaaggatcaggagcggaggggaacgggggtattaataggattgggacggttaccagagttgccgttcggattggagatcgcgctccaggaagaatcgaattggctcagtcccgggctgcagaggcgccatccatactccgtagtgaggtgatccgaagcagaaggatgccgaacgaatcctttcgatgattcgccgcctgtattatcaagaaagaccgtcgagactgaggccccgccaattgctctcagtaccctacttccgccccccaccacgcaccacgcaacgaggaatatgttatctagaacccgaaattgactaatcccggtgcctagcagaacaattacagaacacccggcctccttggggtctgtttgtcacatcgccgcttccagccgtaacatttttgcatactgtttactgctacttcgagcgacg

SEQ ID NO: 5652 - DNA, 7795 bp, Emericella nidulans
gacggcatagcatagtgctgatccagccagtttgcaagccaaagtatgtattcgaaaaagtgatcagagctccaataacgatcccgaccagcagagacctcaaggtgaagcttcgaggagccatcgcgtaggattcatcaccaaatgtggctgtatgtggtgaaggcatactggggttgtcggtaatgcccggctcggcgcctggcgtaatggactggtagttcattaaatcagcagtcgcatcgacttttctctaatcatgcataaggactatattaagagttcatatgaccataaggcacatgttattcatcgggccatagctcgggaggacaaatgtacagagggagtcgagcatggggagcggagattcagtgaggagtgaaatagcgtcaccagctgtgatgaataagcagccgataagcgataagcccagatctccattctccattctccaccactggccgagatccgaagttcatctacacgacctgctgtgctgctaccatcgttgaattttttcctgtctacttcgctgctactgcccagtcgttctcgaggtcaattgcattgagcttcaaggatattcgtcaatggagatctgagcttgtcgcatgctcagcttcagctatggaaatatccttggttcatcttgtcactcacagggcgcccgccccaccgtccatggtccaaaatgtctctccaacacgaccggcaatgataaataccaggcgccgtccgagctccattcaaatatttcagtcttagctcaataattatagaaagtcgccaggatgcccctcccatcagctgaacaccatcacatcgtcttcctccagggatcggtactcgagattcccaagtttgaactccccgcaccgttcacctactcgcaaaccgtctacgattggacatcgtcggccgaggttccagatcgcattcgtgacgcctccataataattctatccgccgcccgagttgatgctgccgcactgtctcgcgatgtgtcaccgcatctcaagcttattgtcatggtcgcttccggtttcgactgcatcgaccttgaggcctgcagtaaaaggggaatcgttgtctgcaattgcccaaactccaatattgaagctgtatccgagcatgcgatagggatgtactttgctgcgcggcgaagactcctagatatgcatatgtcaacaagggcagggaagtggaaggaaaggggacttctgatgtttgactatctggataaagacgggattccgcctctgacttgccaggatgaagtcgccggaatcattggaaacggcggcgtcggtaaggccacaataatttgtgtcttgagcaagaatttaacaagagcatcagggaagagaatcgccacacttgcgcgtaatctaggaatgaaggtgctggtttctggccgcaaggcgtctgcaacctcagatcccaccagggtcccgttcgagacagtcatcaagcagagtacagtgcttttcattgcggtcccgcttatgaattctactcggaacttcatctcaaccccagagttcgagaacatgtcttcccatgccatcgtagtcaacgtatctcgaggtggtaccgttgatgaagaagccctagttcacgcactgcgcgagcgcaaaatctctggcgcagcaacagatgtatttaacggcgagcctgcaggccctgatacttcgcccttgttatcagaggacgctaaagacctcaacatcattgccactccgcacttagcctggctgtcccaaaggacgtcagtcaattatggctcaaagctaaaattggcagtcgaggcttgggctgcagggcaacctgtgaatgttgtgtcataagactactcagactcgtcactcaactagacataatataagagtcggaactccgaatctattttatttttgaattactcttcactcgagtacatccattcgctctacgacccagttatgaggataataagtacaggtttatgcttcacaagcgactccttgctatggaattaggaaggatctaggcaccttgttcgaatgagctggctcttcgttaccggggactttttgggataggcccttgcattaacgagcacgcccctggttaagcagaacgcgaatcttcagttaagagcctgcgacattcttgaaaattccttcgagcttttatactgcgcattccctagtttccgccctctaaaggttgacccatgggtagggtcaaccgtatcccctccatgaagcgcactcctacattcctatacctatcgacccaggctcaagaatccgcaatgggaactcaagggctgttgtatccttcgacgcgtcgacagtgtctccaacgaaaacataaatagatcaccatgtctgtggcctttcgatgtgcaggaaccccaactcactcacactcatttgcttcatcctcaatcccagcccaaggttgactcaaggtcagatcaagccagccagacagccaagatgcatctccccaacgtgagtctcatcctggatttattctaaaagaatcctatctaaccgacgcacgacagattctccttgcctcggccttgacgcttgccccggccgtctacggttacggcgtcgcaactgttgacatcgcctaccacgaagcctgccacaatggcgaagcccctaacaacagcgttgacgaccctgagtccaccgtcgtgaccaaggacacctgcacccaggtgcgtgccaagcactcctttgacatcgacgcgtattccttctccgtcacgccggttaccaaggacacgacgtacgtgtgccacgctgttggtatctacacgaacgatgagtgcgtgggcctcccgatttctgttatccctctcttccccgagaataatgaggcgaagacaccgtgcatcagtgacggttacttcgacaagaacgtctctctgaagctgtactgtgaggatggtaaggacgatgaccacgaggagcatggccatgggcctgagcatgataaggacaaccatgaggatgtcgatgataatgaccataatgacacccatgaggcttatgataaggatggagctgagtatggagctgaggatgcggatcaccgtgaaatgcagactcctgaggctaagccaaagggtattgagggtatccttgacggtgtgaacttgtaagggctagggacgctttggatttactgggcttgagccctcctataactaccatttcttagatatagttaaataccagaatccaagtcaacttttgtccctgacgcactgtacacattcactctttcagcttgcgttgcgataatgtacactgcacattccaacataccaggaaggcccaaaattctattcgcctaatggactatcgtttgacatacagcaaagacgtctgctcagtgatggaatgttcactattgcagaactccattcctcgcagaggcaatctgcatacctacggtttacctgccacatgctcgagactcagagctggaaaagtcttcgcgtttcatcgcggagagtcacagctttcgagccgcgacgccgagactctacgttcctcccagccatgcgtacacgtctgcgcaagacgaacggtggcgaagtgagttatattgcacgaacacaggatgtataagaacgggaagtatcagcctggtgctgaagagaaaaaagcactaatcaatcctctacactcatcttgaattcgcattaagcactatcgctattcattcaggctctaaaatccatactcaatagtctccattcttcgctcctactccacaacttcattatactatagttttcagaacacaccgaccaaaacagccatgcactggacaactgtatgctcttctacccaccctctattcccaatttccttctaaccaagcgagtcaggctattcccccttcttccccttcttacactcacaacttcccgtacaagcccttcgaacaacccggattcttaccaaattcaatcccttgggccccgatccctttatcattccaggcgaccttgactcgccgaagattcacagtagactcaacatccgctcaggcatttgccaaggtgtcccagtgccgctccccctaggtctctatgacgaggtcgaccacgtctcattcgaactcgtccacacggaacaagcacattcgcctcttcactacaactccgcgatcccccttccaagcgcaagcccaagctcgaggcctagtctgggagcccgggccggcaacaacagtcacgcgcccaatctggaggtctgcacagtgcggcttttcgaaaagcccgggtgcagcggcttcgataaaccgctgatccagcgcgagttcggtgtcggtgcgggcattggtggaagcagtcggtgtgtaaagcgcagttcggagttcatggagcttggggaggtgtttattagggttgactgcacagatgggagtcggccttttcctgcaactggcgatattcgaggagagctgccgcaggctggtgaaaatgggaccgttgcgggtgcttggggatcacatatgaatagcactactacgactagtactactaccacaagtggtattggtgccgtggttggaaggtggcagcggaggaggttgtcgcttttgggtcgttaaagtcggctgattggtgttatgctggattcatgtattgaagtgtttacaatgaatgaatgatttgcaatgtaagctagcgattaagctgtcgttcaagtaaaaagtattgagaagtccccaatctagaaccagtgaaggcaaaaagtttcgtacagacgattccatctataaataacaatatactccttgcccggtaaagtaagcattaacatacagtcaacaagaaagtaaactaaaacccaaagctatcaagcagcgaattagcatccggctcatgaaacattgtaggcggtggttgctgcttcggggcaaccggggacgtcggctccctgggctttgccggcatatctgcaacaacaagactgcttctccgccggagcatcttcctataatcaatggcgccgtcgaccaggttgatcataccgtctttggaaagttgagtggacggtggttctttcaagaactcccagtggcggacgaggtcgagagcaagcaggtcacagcccattcgatcatacagacgtgcgttgcggagaacaaattcccattctgcttgggcggagaccttagaggcccctttcagtgtttgtaatgtcatttcgcggagttgtttgtataaaaccaccagtgctgggtcattggataggtaggatttggcttgcagggaaattgatcccggggtctcgggggaggctgggtccgacgggataagtgactcgacgggggactgagtaatgtaagctgcaggcacccaaggtcaggctcagaatataggtcactctcaataagcgaccgcgcagccatatctcgacggccgagcatccagcacgcccaggaagccatccagcgatttccatccatggcagcttcgggcaagactcttgtttccaagatctctctcagccccgggccattgtccccttcatacgcgcgagcaatggctcattcatagttgaagatcaccaactgggttcagacagacctgggcagcgtctcgcaaatggtctgcaagaaggaagaacgccgcggcgtactctatattctcatctattagcggagtctgtcagagaaggcaaggagcttggttaccaaatctccgcctcccaagcagcgcatatgcgttcttgagcgcggctgtctgccaacgagattcccggaaatcgtttgctagcaatttctgtgttgcggactgttctcggttccagtgcgccatcctccaaagaccctgaaggatattcttctttctgagggcaaggtagtacaaagagcagtcaatgggattcctttcttcagtcttggtgtactcatttcgagcaactacctccaattgctcgcgctgcgaatatttagcccatgtttctcatgggagaggcgttgacttacaattgttgcagaattcgacaaccacatgaatatcccactttcccgagctgctttccatgacaactttccaccaaactgcctcgatacgaggtcaataagtatgtcttgactgccgctatggaaagcccaaacaatctctcgccaagatactgtgtcattattcgcgataccttgtgtcctgcgcagcatatgctgtcggaaaaacagaagatagcgagcagcattgtcatccatcgagcgccggtgtttttcaacagtggcaacacattcaattgtgtcgaccagccggacttgttcctggctagttagttgtggtagagcaacccgcgccagattctcattaagaatggctgccgtggcttcgtccatgactgtaggctcttcttcaagggaaagatccgcataggacgagtgcaactctttagacactgcttgttgtggcaccttttgctcgttagccaagtcataaatgtaggtagattttgctcacatcatgatccacataaaaatcttccagcgccatctctagaaaaccatcaatgtcatccccctctgtgtagaacttcaacttccgatggagattcatcaatatcgaatgcactaagttcgtcttaccgcttagtatacactgggcgagaaattgcggatggaatacaggaagcgcgccgttcagtcggctcacgacttcaaagagatctacagtcgatgaaccacgagtgggaatgcgaagctgtgagaccacccggtctgtggcttcaatctcattgtcgtacacaaaaagctggttgcccgccccgatagcgaggtagccgctgctcagccaacaggagtcgccaattggatgaggggtgagatcgcgaatccagatttcgcgaatctgggtccaggatggccctgagtcgaggtaatcataacgtagttgcgtcaggaggataaccttgtgtggaaatcccaccgcaagaacggactgcatgtccggtgtagacgtccagtccaaatcacgaatgatgtccttttgggcaaaatgttcctcaaactcgagttgtgcgccctttgtatcccaaatagtgagatgcgttcgatcttcgtcaacaagcgctgccttcttgatggagcttccactggcaagagaaggatttgcgatgcccgtctcaacggtggacgtcagtagccattctatccggctattatccttgtccactctggccgtccatgtatgaacaataccagtagccgtataagacagcgctatgtcgggcgaaaataggtcaaaaaatccagacaactgagtccgaggaccggcagggtccacaggtaggaagtatgagacatcttctttcaaccctaggtcaaaggtacagaatttcttcaagtggcattgagactttgtgtgtcctttcgcaagtggaagattgacttcccaagcgattccactcatatccgccgcaattgctgcgatgtaaacaaccccggcattcttctcgggtgtaagcatttccagaacgcagagcggtttacctgaaagctcgaatgttaacgatgcaattctttctgcatggaacgaacgaacatcccagacagatattccgttatgatgcaaattagcgatgaaatcaccattctcgatcacgcagctgcggtggatatgctcgtctgagaacaacgtgctcttacggagaagcccagagccgctgtctctccgcttctgtctccatatcaaggctttgttatcgtctgtacaaaaagtgagagtgtcgccaaaagcgtttcgagattatcttcc

SEQ ID NO: 5653 - DNA, 3570 bp, Emericella nidulans
atgtttctgcctcaggccacatagtcagcgcatctggagatctcatatctgcgactcggaaaagcatcactcaagctggagactattcaactttgcaacccgccatcaaaatgtcagtaccgctccggtccctaatgcggaccctcgcccgcacaactcgtccacctctcctctccgcccaatgccgcgcgcaggtctcacaaaacactccccgatgcaccacaccatcccgctcgcaatggcagcccttttccacgacacccgcccgccccaaggccaaaacaatgggccagctgcgtgcacgtaatgcaacgggtcctttctcttggaaagctgctctcctcttcgttctcaccggtgccggaatgattatctatttccgcgttgaaaaagagcggctcgagcggaagcgcatcgcggagatgagcaaaggcgtcggaagaccaaaggttggccggcccgttgtgctaaaagacctggatggggacgtattcacggaggagaacttaaagggggagtattcttttgtacgtcttctttcctttcattctttttcagcccagactgactcccttcgactaggtctacttcggcttcacacactgcccggacatctgtcccgatgagctcgacaagatggctgaaattatcgacaaagtgaaagaggcgaacaagggcgagaacattttcgtcccggtcttcattacatgcgatcccgcgcgggatacgcccgaggtgctgcgcaactatctgcaggagttccacaaggatatcattggcttgacagggacgtacgagcaggtgaagcaggtgtgcaaggcgtaccgtgtgtatttcagtactccgcgcgatgtcaagcctggcgaggactatctagttgatcacagtatttacttttatcttatgggtgagtttttcccttctctattcgagagtgcaaatcaagttgtgaatcatactgacgttaatagatcctgagggcgactttgtcgagtgtatcggacggcaggatacgcccgagaccgcgacgaagacgatcatggagcatatcaatgactggaagagagagggaaagcccttaaagagggattagaatgttgcctttcctcgtccaagcaaccattcgtgtatttataatatccatcctgtcaagtcttgtaccatagctctccaatcatctagaatcctcctttttggtcttcaattttccaaacccatccctctccctgttctccctccactccatccctccatccacaaactcctccctcttccacacctcaacccgctccttcacaacctcaagcacccactccgcgcccctccaggcctcccctctatgccccgcccccaccgcaacaacaatactcgcctccccaacgggaacttcaccaagccgatgcgcgatatagacaccattcagcccgaacttctcaaccgcttcagaggagattttgtgcaatgatttcagcgcgagggctgggtatgatgtatatgagaggcgggcgacgggacggtcatcaaacgtgtcgcgtgttgtgccgaggaagagaatgtttgcaccgctactagggaaggaaacgtgttgcagggcggtggtgggggagagcgtgtggtatgttagctcgaggtggaggggaatgctggtgggcccgtgagttgttgtgagggttcgcggataggttgttgggtcaaggtgtgaagggaggggttctgttgcgttgcgttcggatcccggttgcggttcgggtctggctgacattgtatgtgggtgtggttgtttgtgtatgagatgctggtggagagaccgatctgttgaggggaactgataagcttgaacgtcactgcctcaggctgcgaccgataacgaaatttggtttctgtatctgcaaaagactttcattgaggcgtatatccacggtcgtatcatcactagaattacagattactcccgcttcctgctccgagtctatatgctgaaacaatgacaataactgactgaactgagaagaaagcggttggagtatcgcggcgagaaactgaaaagaactgggataccatatatgtataagccgcatatgctcaatggcatatcggatagcaatccaagaatgaagtagtcgcatgccggtgtccattgatcactcctgctcgcctggctggcacggctagctcggctgggggtcgtccggggctcctcctcttccaggacatcgctaaggcgcgtcggatggcgatggcggggagtgacagattcccagccggtcccgacgccccagctggctccgctgtagtcgactgactggtcgtaaccagcgtacattggcccagacgtcggaggcatagtacttgtcgcatagccgccttcactatcctcgagcgacgcttgctcatactcgtcgctctcttctgaccgggggtaggccatctggcggctttgcgaggtttgctggtaaccatagtcatcgccaggctcgctgctgcccatgctggcttcatgtccggcagtggtgcgtggagggtaggtgctctctggctcataatagctggcgtaatgtccttggctctgggagccagtgacaggagtcgcctcttgaactccagactgcccttcaatgaaaggatcggttccgacaggcgaaatcggaatatcaccatacatttcctcccttggcttcctttcagctccgctgtaagggccgtctctagttggaggccgagcgggatcccggcgagggagtcctgcgatcatcggaaccacctgcactccgccgaccagagtgggctccccgttacggagggaattcgtacgatcccgttcttcttgttcgcggcggcctagttcctcccaggcacggcgagcttcctcctttgagatctgaagttcgcggcgcatctcctttagcagctcttcgatacgagacttgtcactctctgccttctgtgccgctgccattgcttctgtgcgggcttgtcgttcagattgaatctgcctctcaagctcagcctgcagctctttggaccgctcttgctccgcccgcgtgtcaaagaaccatcgctgaaactttcgctcggatgacgcgcgcaagcgttgcaactctacaacagcatggaagagattggcaccaacggcgctcagatcggtcacttggcgggccatctgttgaaaaagaggatcccgctcaagtgcctcattattttgctcaagcttgcggatccagtagctagtcaatccttcccaatgagacgaaagggtctcccaccgttcaaacgcatgaggaaaaccagcacgtcggggctgttgcggttgctgagatgtagctgtagggacttgttgctgagaggccagcttcgcctgagaagtttgctgtggtcccgactgaggtgcttgctgcgacgcaaacgtaggagcgggctgcctggattgggctgcagtggcgggggcctgcgtcgtcccaggggcattacccgctgggactcttggtgcagctctccgctgcgtgggtctttcgccagcaacgccagcagggtagggctgccacttgagccttggcttgctcctgctgtagc

SEQ ID NO: 5654 - DNA, 5808 bp, Emericella nidulans
gtctgatgccgagttcctatcgggatcgaacaagacaggtagattagcaccgatcaagttcaaaccacacccaccggctttgctgctgagaaggaatacaaactcttcgccgtcggtgtcgttgaacttgtcgaccagcttctgtcacttcttaacggtcatcgtaccgtccagtctcaagcaaacatatgctctctacctgcaagcttttcaaacaaatctagtgtttgtgtataattgctaattagaacaattttgtcatttgtatcctggcgtatccgcgccagcatccggtcaagcaccatcattttcccagaataccaaggtctgacgtccctgtctcgaccccttgcttccacagggacataatcatcagggaatgcgtgctcacacccgggaagatcagtggaaagattcagtaagtctggatggttgcagagctttttcagtattccgatcgctttcagaggctgactgcctttgcccctgagaagacttttgatctcgggactatcgatgaaatgtttgtataagtccagttgaaattgtgaaagattgcagaaaacaacatgttcatacttgactggcaagtacttggacaaaatgtcgtttgtccgccgaatgataaacttgttaacgatactggaaagctctgccagacgttcatcgcctttcttcctgtcttcttccgtgcctgctgcatctcgccccttgaggatgggtatctcaaatctctttcgaaattcgttttgcgacccaagaaggtctggattggcgaaattgagaagtgcaaaatattctgaaaggtcgttctgaataggcgtcccagacagaatcactcggcgttgcacattcagactgttgagtgctgtccaagtcaaactttctttattcttcaatctgtgaccttcatcacagaggagcagcccaatcgggctatccttcaaagtatcgacatacatccgcagtgtttcataggaaacaatgagtaccggtctaacgatagagcggccggaggagattgcccattgtttcaactggcttgtgagctctgtttttgatgctttgccatccaccgcgaacggagtgatagtatctttcccaagccatttgcctgcttcggttagtgtctacgtgcagaatgtaattcaataacttaccaagttcattggcccaattacccaccaaactcgacgggcatgcaatgatgcatttctggatggttgtctttccagcctcgggggactgcttcagaagtgtccacattaaagaaatgcattgaagctaccaccgtaagtttcatggttacatcagaaagctcccagacttacagtctttcctagccccattccgtctgccatgatgcaaccatgggcgtttctatcaatcattccagtagtgcagcggtagaggaactggacctgttagttgggcagtccgctaaacagtggttcttgcagaggacttgccttgactccttctacttgatgcggacgtaagacctttgctagcctaggatcaatcacaactgggacttttggacggttttccactttcttcttaagcccaaggatatccgccaagctcttatgcacgataggctcatccagcttctgaatcttatcactggcatcattatcctgtttctcgggcttgacctcatcgatatcatcaacggttgggtcgtagaggacaatcgcaaactctccacttgggtcatgcaaaggttttaccacaaatgaggcaccgtgcctcatccccagggttggggcgggtcgcgagctgtcgtacgtgccggtcgacttatttatcataggcactttgaccttttgcttgaacgctacgtctttgtccttcgccttgaagacaggaaatctgttgacgtcccgagtggcaagcgcaaggcgttcttcattggtatatggtttaacgctattgtcgtcgatacttccatcggccccggcgtaattcaccttccttcgttttcttgcaggcttatccgaagccctagttggtgtagctgatccagggcatttgaaaggtttcgagaggcggtcgatggagttcgaggatgcgctgacgcgcgatgctatagatgtaacatcaccgccgttgtctgagggtcgcgggcgataccttcaacgattaggccttttgagtttccagtaatatataatgtcatttactcacatttataggagaggcagctctttcttgacctgctcctgccagagaatgtttgtagtgatattgcctcataggcgacgcacgcgtctgccttagcgccaaaggatcgcgaaatcacgtggtgatacggtagttgataagcccatgtccccgcgatgctgctcccacctcaactggcatccattgaaggacttcggaagttgggtattacttgtaggtcaagtatccaactccatgtctgcagacttttgggccggctatattagcggcgctatcggtataatcattgggaatccccttgacctaattaaagttcgactgcaagcaagcagttctgccaatggccctgtatcacctcgacagttgactcgatttgagagcactagttctcttgtgcgaggtatgtgaactcctgcgtggttgtccactactattcgtcatttctgattcttccaggcgctgcggctccaatccttggatatggagctctcaatgcactactctttgtgtcttataaccgggcattgatgctcttggatagatcagtcactgaccccaccaaccctcaaaattgtgctctatataaactttggcttgctgggccttaggcggaattgccagctggacagtttcctccccaacagaattcatcaaatgccgagcacagcttgacgcttgcccgggagtctcatcgtggacagtcgccaaggatatcgttcggactcgcggctggaggggattatattttgctggtggaataacatgtgctagagactctataggatacggattctagtacgtatttcctaagctctttgatagaaggcgtttgtttacaggttgacagcttctggtcctacgaatactgcaagaggttaatgtcctctcccgatggagaagatacgagcaatactgccttgaaggtgcttttttgcggcggcattgctggaatagttacatgggcttccgtcttcccgcttgacgttattaagacccgtctgcaagcaagtacgattgcggactatgctgaagcacgccctttattacaagcgcagaccagcaaacagacgctaggttcgttcgacctggcaagggagatgtatcgagcggaaggcttcaaagccttttatcgaggcattggggtatgcagtttaagagccttcatcgtaaatgcagcccaggtaatgttctttcgcatctttgtggacatggctaatattcaaactagtgggcgacatatgagtggcttatgagatgtttccaagacccaacatggtataagtcactggaaactatataatacaatagatctgcaggtgtagagatgatatcccgtgaattattggacctgggaaagttcatttccggcataattattaccgttctggccaatagtcggatatagatgttttctgcaagagaccttggataagacaccttgggagacggctgcgtggtaagcatttatatgatcacagtaagaaggcggatatggcaacttcagtctcacaggggctatcaagcagcggacgcatgtttgcgacaggggttggctgttcatgctgcgagcgtggcatgtacagagcactctgactgtctcggagtagactactttgtacctaatttaagcgatagtcaccagactatagaattactagcctgagcagtatacaagcatcgcccattacgataatggctctcggtgaaggttgtcccagcctccgagtatgcaagctttaattcgtatcattgctagccgcgctcttgtaaacggatttcattatttcaatgtcagggagaagtgggggcctgtatgtacaacttccgataagcggcgatgtcgtaggggcaaccgagggtggactcggcgggattgagcataaccggcgggcttcggcactttgggttctcacgtgtctgttcaaatacaagacgatgtgattggctgaaattttttttcaggcagcccgcattttagcttgaagccctgaaagctgtgctatacttcccatgcccatcaccatgaattggaggaattggcgtagatagcttgctgccagtcgatcaagctagtttgcagaggagaagcaacgctcaaactctataaataccttcccaggacgtctgtcggagttcgtcgagctggcctttatcacagtgtcatgaattagctatccatagccatttcgtcgctatccccccggcgcgggccattgtctgtcgtcaggcctacagcagcctcagcgatcttctgtgaatggggttcttcacgtagtagacgaagtctgcgatcagaagaagttagatggggtttcgatgtttgagattgcgccggacaaccgaccttctcttgtggtttttgcccttcctatgagcgaccaaattgtagtcgctctcgaaccatttggcgcattcgacgcaataatgtttccctaggccgggaaggtcttcagggtctttcgtcgccttatactgtgcaaggtgcttcgagctttccacatccgcgcggacctgatcataatctctgaaaaatctttgtcagtgtcataggttcaccccagttcggatattctggcacaaaaaaaaggtcaaaaatacctggtcctgcgcttcgtctttgttctcctcactgctcccatcttgtagattatcggcctaagtctgaccccaactcgtcctcaaaagggtggtcctagaatatggagtcagtctgtggatgtggcgatcaccgattaacggaaaaagctaaggccgtcagcggcggcgtgaaagcgggtcaagaatctccaggcagtcgctcaatatgcgcggaagcaatattgatttgcgagagaaactcgttggccgcaattggttaaagtcaacctgagtcttggcgacgggctcgcgggcctctcggtaggcctcggttctagctcggctcagtcagcagccgcagttgtgcttagtgccccagtgtctttgggcgatttctccgtacggccatgtatgacgattccactattcggcattttcctccgaatcttcgccgtccagttgcgagggtagcaaagtaattcaattccacgagtctgagcttccataaactgaagatgccagacttgtgaacttcgacaaagaagcaggaggtgttggtattgccttgtgctttggcttgggtgctttcctagtattcagttcatcgaacgctatatcaccatgagatgagccccgtcaggctatgatgtaaagagttgtaatgctacttcaaagaatatagggtgtaatcagaacgttctgattggtttatttgaatactaatattaccggtctcacatgcttcctaccattaccggcagcgtatttacagtacgcgatattgcttgtcgccatggggaactaaatagcaatctcgtagatgaagcaatagaaaaatacggttttgcaggagtatatactctaaagcgtgagcaattattactctagcaagaaataactctagcaagcttgtagaatgcctacattcctctgactggctggtgggaaagcccatgaccttccatgtctccggttgcatgctttggttcggtgtcgcccgaaagcgtacagcggcttgtaatggaggtattgcagcggttacgg

SEQ ID NO: 5655 - DNA, 1933 bp, Emericella nidulans
aagtgctgtgatcagataatggtgtctcttgcgcgttctctcgctcaatgtccagggattgcgcacgtcacagagcctgctgtagggatcgttgtgcagggataggtcgatcgcttccctccaggcgatgcggtaccagcgcctcagaaatccgtgttgaggcagttgatcggatttaatgatgctatcctcattggctcgcaagcgttcttcggatgtggagcattccgcagtggtaaatgattggccaggtcattcttcctccgcagtcctcgtccgcagtcctcgcgcggatgttgtagaatatatgtcacacagaaactcaacgctcaacactgctaccatgcccgcaatgccatggcctgagctgtaaattcaaaagaattgttgtgtctacccgattgggcatgctggattcgaattttgatgtgaagccaatgaccgtcgcggtgggtctgggtgccattttagattttcttccaaccgcagcgcttgcccatccacgaccgcaggatctcttcatctgagtacgcagagaatatcctctggttcttcctacaggttaattatgtctcatctttgcccgccgaataacttctgtcaaaggtttaaaaggatgcctcgtccccaagtgtggtcgaccaatttgatcttataatctgggcttgtcggacacaattaggtggtatgacgaaaattgaatggctgctgtcttcaaggcccattttatgccgatcatgtgcaagcaaatcatctctgattcaatatttccaccaactccagtccaggctgtcgtcccaacccttccttctctctcccacaatgactatcgcgaggaccacaaggttgcctaggtcgactccctaatgcacctacatttcgtcgcgaggggacattgaacggtgtcaaatactcagacgggtactcatgcttgggctctttccgaggccaaaaagcaagaggtgaggggaagttgtgccttcaacacggatgacgtatgaacaggtggagcctggtagggcgagaagagtctggccaatgtgttttggtttccatagcaacagcaaccgcactagtcctaaacgggatggagtttgcatatctggtcgagactgattctcggactaagcagtggtcatggctcttcgaaggatatccacaatggcatgccgtagcgcttaaggcggtctagcaaggctgtacgtagtaagacttctacaacactttagacccctatagagaggctgatagacccgacgagacagatgcaggcaaagaagatagattagcaaaaaagaaccacaaaaatatacaacagctcaagtatggtggtgctcaccaggagctgcgtggtcggcttgccgccctattcagtcttcatggcaatttaggcccttgctcacccaccccgaatactagacacccaagctagttggaagtcacatttgcgcaaatgagaccaagaagtagcaccaagtcccttcccccgaaagcataaagattctgttctccaagcagttggtcttctctctttagaataatagcgctcttaagctacatataactgcatactgggacgtgggcgatatggcaggacgaggcgtggcaacgtttgaccagataattaatctggatgatcgtgacaactccaagttaaatcgagcggtccccacgtagaaagaagtgcgatcgcgttcttcgcagatttaaccattaaattcatgctggaggccctagatattatagtcacccttacgatgaacaagatattaagctctctccatggcaatctcgaggagcaactacttctaggaaggagtttgtagatgtagaacatagaagcgatatactcgtaatattatcgattgtgcttgtcggctttgagctctgatggaagcaggtaggacgaatactatgtagtaagtatagatgt

SEQ ID NO: 5656 - DNA, 4901 bp, Emericella nidulans
  unsure (1)..(4901): unsure at all n locations
taagcagcccgatggaccggaactccagcgcgggtgtactaacccaaccgtttttccttcgaatctcttcgaaagcgagcttctggatcatatggcggcggcaactcggacatgacgcgacttgcaccggagcccttttctcgagctgcaagcttaagacgacctgaatccagaaccagcaccaatgctgaacgccccacaagctccgtatctgtcacgacacgcattgtacgtgagcccattgctgacaagaacggcttgaataccgctacggagcccggcgcactcaatctagaggctagcccgcttacggtggagaatggtacctcggatgactcttcatctcaaatccaaactctggagtcagctgcaaacaaagacgaactgcgcagcatgtctgcctctccagccgactcgcctaaaccccttgcggctggtgcgctacctcgctctgagagtagattgtccgtgtcgtctaaaaatgacgaatattttctttcgagatctcccagtgaagccttggcatcttctcctgaagagaggaaggagtctcgtacttccaggcttcttcgccgcatgtcatcgctcacttcaccgtcgcgccgaagcactgccagctcaagaagcgcaacactcaaggaggagaacagcatgccgtctgtagaaggtcctaagaaaacagtggagcctcctgcggcggttgagattggcgaggtcaatgtccagtttcctgatacccttctttggaaacggcgattcatccgaattgacaaccaaggctttttagtcttgactccgggtaacgtcgattcaagtaatcgcaacatggtcaaacgataccacctgactgagttcaaaactccatgcatacctgacgaggaacggcaagagctctccaacagtatcttgttggactttgtagacgggagcactcttcaatgcgcgtgcgaatcaaggcaagggcaggcgtttgttctccaaagtaagatatagcaccatatatctaacatgcacagaggactaattgatatagctcttgtcaacgcccatagcactcatcagcgacttgcgtcgaaataactccgttcaataacattcacttacatttcttccgatctaaaatctcaaatccatgcattcgttctctttcaacactaccttggcttctttccctatcatgcatgtttccagcggtataccctctcaaaacgattttccttttgtcatcttaccggctatctctctcttgacactgcatctgaggcgtcatttactattcaaatttaactttcttttctgctcgacagtttcgaatatgaatggatcacgagtcagacttgctacgccagccagtgctagacgtttgctttaggggttataaccgtattgaatatttctataccctcaattatattttgcatcatggagttcagcacaattatctatctaatttgagcgtttttctgcagctctctttctctcccattcttcaaggaagcccttgactttgggaccccagacctcttctccggcgtcgaggtccttgtactccaaaattttatctggctccagggtgtagtctgcttgacgggatcggacgagcgcgctcatgagaccacagctacccaaagccttgcctagatcatgcgccaaagagcggacgtagaaaccagaggagacagtcatggtaattttgactgcaggtggcggtgctaggggtttcatttcttctgcagattcaggtttcgtctttgtggtagcttcctccacagcttctggggctttggtctgctcgggagccgatgctgcctcgccttcagcggacaccttctgcttcttcgctgcagcatttgaagcagtcgtttcgttgccttcggatccctctgccggaggcgatttgcgtttcgaagaaccatcagcatcatctgcggccggaacaataggaagggaatcatccttcgccaacaacttttccgcaacagccctctcatccgcgggagcctcctcctcaggccacgtatactcatgcgtcccgggctcataccactccacgattcttaaatcagtaacctcaacgggcctagactggatctcaatcggcggctctttaccttccctagcatattcgtacagtttcttcccctgtaccttgagcgcagagaaaataggcgggcgctgcataatcttcccacggaactgctcaagtgctttctcgaccgcttcgcgagtaatatgctcatagggtgctcgccgaacaatcttccccaaccggtcatacgagtccgtctctgcgccgaagattacaaccgtctcgtacgtctttgtgcatcctaagaaatcattgaggaattttgtacccttcccgacaccggtgacgaggactccagttgcaagagggtcgagcgttccaccatgcccaatcttaacatcgaggcgctgagagcggcggcgtctacgctggaagttgctttcgcggttgcgctttgcgcgctccgtttcgagccatggcctgaagagttcagacgggttgatgtggtgctggagttttcgaatcacgccggccgaggtgacaccctgcggcttatgaacggctcggtctattagcatgngtgtgggaggtattgctacgtgatagagcggccagtagacgacctaatgaatcatttccccggacatggatgtgcgatatcacctgagtgcctggagatgcccatcggctacaggatcatgaaaccggacagtgcgagagcagttgtggaagatccaagcaacccaggccacgtcgtaatagaagaataaatataataaattctcaaatttgagcttctaagaattttcaattcaaagctaaaggaaggaacttgaacataatttcccggggccggactccagcgattacagtgacggaccagtaagatcacaggagggcccccatgtcatcaactcattcaccctctttttgaccccaaccctccaggctggacattatataatcccaatcaaggcgtcatgcaacctccaaagacatgacagcccgagaagatagcgttctgcgcgcaagagacccctcactcgtcgacgagaacgattgggaagaatttagcttgtccgaggtcagaatcctggttcctggcaagtcgcgttatgccaatcttctcacggccagcccagagaacccggtccaggtgacgggctgtctggaagaggtggaagaagagcaggaatccctcggttagtctaccttctactataccatgcagaccatcagcatggctgacatgctccctctgtcgcatcagttctcgatccggattaccttacgaagcgcatcgtactcgacgatgtaagtcactttgcctacggccagcacaatgacggtgaggttgggatttggattgccggtcgggctggctggttctccatctcccccgcgaaggggtaccggccgatgttcaatgaggttgtggaggcgattgacctgctctactttctgaccgatcgacataagccgaaaaggagcagtagaaggaggaggaaaagttggggcgtccccgagcctggagcacctgtgtgatgaatatgtgcttcatacacatgggatctgtgaagacggcgacgattcattgggagtcttctacaagcatcataatttcttgatgtcacgcatgattagaggtgaagaagacgtgaactgggccgaaacgagtatatttgcgcatctttgcgaaaaattcccggtatgttttgcaagatctccaaggcctacgttagctctgacgggtatctaggaggactatgaggagctacgtgctcaaaaggaatcgaaggatgctgaaacagaagaagaagataatggggaggacgagcctgaggatgaagatgtagagatggaaaccagggcaactacgccagacgcgacagccatctccaaggcacaggcagacgccatttaccagatcatccttgatcttaaagaggcagggtatctcgcgaaacggcaactgaacctagagttggtaacttcgactttaatggcgcgcttcgaaatcgacgaactggagtatgcgcagaaccttatatcaacaaccgcagctatcattcttgagtctttaaacaaggccaagacgaatacttttgactggaccaaaaaggccacccacagggagctaaaagctgcaccgaaaaagaataccccggcaaacgcgacaaacaccccgatacggctgcgcaacaccgaggacgatagcacccccgacgaagaaagtgaacatgaacagccgaagcagcgaagacctcgccatcggaaatctgtactacgaccaaagagtcaaatcgctagtaagaggactggaaagcgggctcgaagcacaacagccgactacgatctctcagatgacaaccaagatgcgacggacgagtttgagactcctaccaaggtccgcggtcatgacctcgtcagggatccattgtcgacaactagggcaaaacgccgtactcgatcgattctgtcggaccctgagtcaactcctttcattgaaaggacgcctctacaggaaaccctccagagtcggaatacctccgtctcagctgctgagcctgggctcgacacaggatcttgtcatgatactaatcttccagctgacacttgggtatgcaaagtacccggctgtgacaaagtcatcaccaaatgtacctccaagcgcggcaaggaacagatccaagatcattcccttgcgcatgcagatgatacgaaggcgaacgttgagctagttgaagcggagaaaagactaaacgtcaacttccgcgttgacaacctgctcagtcgcattcgggatatgggactctagacggcgcgctgcggctctgaatggtgaacgaacggtgacttgacgaggatggtc

SEQ ID NO: 5657 - DNA, 3121 bp, Emericella nidulans
tctcaaagcctccatgcgccgaaccgcccatgccccagccgcagaaacaaaaccaaagtccgcccttgaggctatgatcccgcagactgcaattcgaggacgaaaacggccgcctccagggagcgtcagcgcctcaacctccgcgccaaacggcattacaggcttcagcagcaacagcgctgaagccgaggctctgaagatgttcaatgcattcagagccaagctagagagctctgattcccaacccacccgcagctgcggccaaacgtttatcggtagccaaaaccgacgcagcggaagaacggaaagagacgccggatgaagatgaagaatcccaattatgtgacctccacttcattgccaactgccagtcatgcaaatcgtgggacaacgacgtagaaggcggcgccaacaacggcgcagacgacgacgtcaatgatagtggttggcttaaccatcaactccgtttcggcaaggatacgcttggtaaagacctgaactggaaacgcgagcaccaggacgtcgacacgttgatggttattgatccgcgcgagaaggagaaggagcttgccgatagctctaggcctgggacaaaacgagtgaagggaaggggattagagagggatcgggaacgggagaggaagaaggggagggttggagatttagagtggtcgaagaggtgaaatagtcaaatagggtacctagactattggcatagctaggtctgctgtacagctacatgaaggatctagcaacctaaagctcttgtatctgaataaaacctaatcatgaaggatgaggtatgcgatcagccctacagtgcaacaggcacaccggcgctgcttccatcgcaaatcaatgccctcacttagcttttctcagtaccaactcaggccaggtaaaacactattcggggtcccgcgtacctaggttgagtgtatgcctggtctgtacttatgaacgcatacgcggttcagacactcgttaagttcatgactctccagtcataatggacggctcaaccacagtcaacatctggtgacacaataatataaatatcatttaacctttctatgtgcttctcgtccatgctgtatctcaaatactgagtgaagcattctttaatattttatcactaaatcctttgctttgatgtctaatgtccaggctgaacaacataacaggtaatttatagagaggcggttgaagctaagccgttgtatgtacgagcaaatataaataaatatttattcatatatacagaaaggaagacgtgctggtattggcctttggaaggccttttataagcagcgagattgaataggatggtgaagatcataggagcaacaagggctgctggtgagcaattgggagttagtatgggtcgtatcgctctggcaggtatctgtatcaggtatcttatacacccagatatctctcgacggtactgtacagctaggagtacccatgctaggaaagaggcactacgatcaagttaggttcagttgcattgcaattgaaggcgtggaggtgaaattgattagggttttcccacaaaccaatgccaaactaagattcatgtaaatgctagatcatataatttcatctcccatacttcgtaacggtagccagattccctaccctcagagccgcaaacagcatcatttgaaccagctagtctccactggtgtctaatataatctactatatccacacaagtagctttcttgaccagactttaaaagcattgagcctagtctggtagttttccaattccaatacgatatgacaatgttggatgtgcacatttctgagggtaagcgggctggactctgcggcgattataggcgtcatccactcgcggcacgctttagagatgagaccatgaatttggctttctgtgttatgtcgaccaagaaactgcgtttgcatacaagaatatggttttttcccctttttttccctttttttttgtatttttatttttatttttatttttttcccccatgctagggcgtcaggtcaaagcgggaggctaaaatatatatgggcgatattaggtaaaccaatagtgagagcctattgagagatgtgatggtaggcttacatttaattacagatctagagaacatttttgtatcatgaatatatcttgaaataggacctggagagctccgactgcgatcggaccactctcaaggtctgactctgcggcttgactatatgaccgttggggccttattggttcgggtgagatatagtagctagaggccttaaccaaactccgtattatctccttttacctgcaactcctcagtttgggatgacagtaactccagtcggccgttccagaccgtgtaggcgccggcggatctcattgaattccccacgcacatgatgctcttagcgctgatgcacacgagataccgtgacacgccggagctacccaccatcccttttggcgtatcacagggctcacaagagggtctaagcgccgggaataaagatattgagaccctccgtgcgggaatgggcctcgaccgcggtgtatggtttgccggtgagcatacagcgccgtttgtggcgctgggtacgacgacaggcgcgctttggagtggagagcgagcggctggtcagatctgcgcgctatatcggcttggccctgtggggatgggtggtgagcgggacgatagcctgccgagtgggaatggaaatgggagtatgggtgtcttcagtgaaggggcaaatggaaaggggggaagtggctttctagttgggggtgggagtgccacaggggttaggaatgcaggggaaggggcagagaacaatgctttgttttcgtagtttcgattggagtatcgttaggagaacagaagggcagaactagaggggtcttgttcgggctgcaggtgattgatgagtttgagcctggcgtcttgtaagttaggcagttggatacccgtcagtatacgtgggtcgcaggtatgtgctgaataggttaggataggataagatgggcaggagtttcttatcacccgcatggcccgtcccttcttgctagtaccacttcctatgcatcaaactgtttcagagtatttactatccatatataggtccatgg

SEQ ID NO: 5658 - DNA, 3443 bp, Emericella nidulans
ctataccattcatgcatccaccaggggctgaactggttggtgtgatcgcgagtgctctcacattctttttttgttgttgcacagctcacagcatctatcagctctcttaaggacttctgtgagcagattcgcgatttacctagtgatattggttggcttgtgcaagacatcgaggtccttggtctcgtcctaggtgacatcgaggccgacttagtgcgagagccaattaagtcaggcctaaacaataataagcatgtccagcaatgtcatcagttttgcgtagaagccgccgcaaaattggaaacaacgtacagggccctgatgcaagatattcaatccggcgctcgaatacctcagtattatgctatgacgaagctcgtaatgcggaggggaaggatagagaagcataaatcacgtctacaggatgtgattcgtttacttttattatctcaacaatgctacacatggtcagtaatgcaccttcgtctatttggatatatgaagctgacatctttattgagagctcttttacaaatccagcctgagttgatagcccaagagttagtacgccagcaaaaacacttttcgagtgaggcgttcgattatgaaggtgctgagcctggcagccatataaaacgctctctgttaatttctacaaaaagaaattatcctacagctggagtaggtgttggcaggaaaccatccagctctcggtgcaaggctttcgtgtggcgtgcttctctgccgcattgggtaactaccaaagccttggaaataagtggtctgaaattccctgacggctggcaatggatctttcggacgtacaacacaattccactcgattcggatgtggtcgatctcaccatgtatggcgacatccaaggtctgcggagactttttgcctctaagcaacgtcgccattcgatcgaattgaggggaatggatatacattactccatgtaagctcataaataacttgtattactgtaaaaaatcaggatactcacaatttctagtatgctgtacctggaccaaacgggcataaagttttttagttccttttaaatgagggagcggacgtgtctattgcgggcggttctcgtaagcccgtcacacccctttcctatctagtgtggtcgggaagtgtgggagggggtcaggggtggactctgctcccttctcttcaggtccttcttcgtcgctcggaggagctctatgaaactcctgaagaaacaattaatggatttctatcagagtttcacggaacagctgaagagtttcgtttttgtcaacaaaggtgctgtccgaacttttaccaaatgccacaatggacacgagtggcagtggctgctaccgcggcatccggggtctgggacgcctaccatatgcctgaaacgattcggacaattctaggagagactgaattgggagcagaattgctcggacaagtgtgggatatagaggcatgcccggggaaagtaacattggtgcacagtgtggcacagaaacttggcacaagtctggctgaactgcagctctgccatcgtcgtgcgcagaaatcatcccagggggcaaaaaagtttgaagctttgtgcagcatatgcaataaatctgaaaggcaaatggaactctacaagtcttggaatcgtttgtttcatgaattcttgctcacgggcattgatttgcaccaaatcattaatgggaagacacccttgatttcgttccttgaaggatatttcctttcttcgaagagaccgaaaactgagtcatcagcctgtgtgattgctttaaggtcctggctgacaggattggaggctgctggttttagcctcattggatacgggcggaaggaggtgaaactttggagaagcggcaatgtgaaaaaatttcttgaaaggggtgcaaaagggagtatacaactgatcaatgtcgtctatggcgcgtccctttctgaatggaatatatggttttctgggtgttttgattcttatgcaggcgagttttgggatctaatagagcgggaggtggaagccatgccgggtagttggccggaggaataatctttgtggatgctcaggaagcatggcaacagtagatttggagaaaatctacatacaggtacggttctacgcaggagatggaggactatatgaggacgttcattatcgttgtaatagtttcagatcttcacgatcagtccagattgttattccaaagttaccttatggcatcaactcgtcagcgccagggttaggaaagcttgggagccaaccttccctaacaccaggtatgcctgcatgttcgttgttcccgacgtctccgccatgccagaccttcctctcagccatatcgttcacccaaccacgctagtcattgtcatccaagaagcaacacaggaccgttgtccgtgcgaacgactggtctgcagcaccctggactggcctcgagacctgactatggctacgccagctgctttagagtcgacttggcagaagctcagccatgagcttaaataatcgaggctcactttatacggacctgttccgggtgtgctttcactatatcctggacgatctggttgctctcagcagccagatgtggctcagctcgagccacaccttataaagctctacgcatgtatgtagcgccagattgctctcgccgcatcaggccagttgaggccagacagctaaacaacggcaagatcactggcatcgactttttgtatccggcgagcctcaatgggtcggtctgggaggtgctgaagagcttcgacgatgatatgccgggcgagctggttctaatctttgcactttctatcaatctgacctcggggcaattggtaattattgcaaatgcgtttactttgggcctctggagaggcaaatgagctcgttgttcccttgcgcgccctcgggccgcttgccacgggcgccaatattgttccttcaacgcagctgcagcggacagccttctttgggcaagcaaacagttcggattcgctgaatgcgccgcagggcagtcgtcggatggatacagcatcggtatcaagcagaccgacgtacccaccctcgtgtctttcttcaaccacgtccatctacggccagcacccgtccatcaacggaagcgtgctcattgagcggtagccgaacaccgtgatgcggcgagggaacggctaacccgctccgcgagatcaaggttcaagtgtgcgtttccatatagtcttccctcgacccagactgatatcttcttctccctgtcgcctgctgcgttgttgggttttccttcccctttcgggcgcagatggtgcggtgtatcatggtgctctatcgctttttcatctacgcggacccctttgggatcgctcagctgttcgtcggggggttgacctgcctccagtgtgctggaacgtatcgcgaacatcatgcagcaaaacggtgctg

SEQ ID NO: 5659 - DNA, 3338 bp, Emericella nidulans
ccccgtgtctattcccgacaactcagcctgacagatctcaggcagccactttttaccgtcccaaccgcgaaggcaaaatgatacttgctgtcagggtcctccaaagagatggcattcaactcttccataaggtagttggcgttctgataagcacctggcatccagcactgttcgattactgaaccaagccaaacgttctgtgtactcggaagagtttccctccgcggcaatgttgctcgagatacgtcgttcttagtcgcacttgagcgtcgtaccactcccaggctcccatatactccagcatgttaagaatagtaacttggcgttgccgggaggttcccatctcaagtacgcgtacccatatcgacccatcggaccacgcggtgctggtaggctctaggcaagaagagcccctcctttcgacttcaagaggtcagcccacgatggtaacctcttgcatatttctctaccctagtatcaggaaaggagtcccgctggatggaaacatagatcaaagcagttatgtcccccggtaaaagaaggtacattatgctacctagcagacaccatcacccccaacagctacactaaaattccggcaccggctctccaaccaaagccaaccaccgcgccgccatctcaaaccaggaaacatcgttctcgcccgcaaggccacaatccctggggagcgagcgcccatgaaacagccccaccgcgcacaagcggaacgcatcccaaacaacaacgccgagccgccggaacgggcgcattcggatcataccacgcgacgggttcctgtgccgcgaaatctgggccccgtatgcgcggaacattggcgtactgggggaagccgtggcggcgtagctcggagaccgtccgaaggactctgagggccaatcttctcgatgcttgactaaaggcggtgtccagagagcatggttccagacattgcaggggagctatagagatggaaaaggagccaccgtgttatggtatgaagttgctccatgagtgaatcgaggtttgatgactggcagaggtaatatgagttgtagggctgcgtgtacagttcatgtcttaactgcttggtgagaggagtcaaacgggtaccgtgaactttcttagaccataggtatgacatgggcaaaaacacctggcgcatatgaatccaccagcgccagggagcgaaaggtacccagtcgggaagtagcctattgagattagccctaacatcaagagccgcaatattgacagtcacaaaccagagctcaggggggacaggatttacacaatcccagtccatgacaccaagtatactgagccagaatttagaccagtgaggtccatagacggcaccgccaaagctatgcagcagccctcgagccttgatcattcgaggatcatcctcgccaacgcctaaaaggcgcagcacgacataattcatgctcgtgccgaagaccgagctatgagcctcaatgtgcagcccccagccaccgtcttccgggtgttgccgggcaaagagatacctgataatttcagtcgcatactctggcgggatgggtgtattggtgacatagtatgtgatgatcagccccggaaggagaaacattggacccccatactggcatgcccagttgcctggaggcagctgcaacttgaagaagaattccaggccattctcagcacattgcatgggagtcttggctttaggcagctgtggaaggccctaaatggagttaggacgtgccgtggtagtagtatgaaggtcttaccgtaggaagccccagaaaatacttgtcagcaattgattggggccattcatggttttcctcatcagtttcaaggtaatgccatgtttggcggccatcatcatctagcaatcgccatcttgagtagtcggttttaagatcgccgttagcgtcaggggaaaggtggcctccgtttttccagcgcccaatgtggtctggcatggcccgtgaagtcgatatagactgacaatggctcagcgacgtaacaattattataaataaacttggaaccgatgcgcgaggaaagggatataaatatgaattgaaagaagtcttggctgcagcggatctagctactggccgcttagtcattgttgctgcgtcagtgctactgtgtcagctttcccaggtattgttggtcacctgacactctgctcgattaagggaccccctaccaacgccaataaccatattatcaccaggaagcttttaattccacatatgatgctacgggcaccaatattgactatgcaaaaccggacccccggttacagttgtcgcatacatgcatgttggatcttcggcgagcagatatacagagtatgaccggcacataacttcggccgactcgtagagcaaaataaaaaaaggaaagaatctggaaagtgcatatattgtcagtagaagaagtagcttgcatattaaaaggtgcttgggttgtcggaagtaatttctgatccaggcagagcccacgttatcctcactgactccacaagttttcgaattcataggtacgtcgaattcataggtacggtatatacgcctgagtagccgaggagctacacaacgtcgcaggctaatgcttgaagaaagacatggtgacagttattgaaggacatagtttgaagaattgttgcaacggactagggattgtggtgaacgaagtaagggacaaaggccctacgtccgaatgaatccaaactgggtcattctccccagaacacgattcctcagtgaaccgacttctggagggaccattagcttggatcttcaatagtagcttctatcaggaggatacagatactgtctcggagcccagctctaactcgcgtgctggcccagtgaggatacagatcagagcaaattttgccaatgccttcatcctggaatactcgagaaaacattttcaattgggatacgtaaactgtcgagtggctacgaaaggataccaggccagcaagagccatggcaaccattcgcaacatctaatctccgagtgtctctcgcattgatatcgctttccaggagctgtttgagcctgcggccagaggcgatgagaagatatatatgaatcccggaatgcggcctttatagcagttcttcgttctggtccggctgcagaagtggtgagccggaacccaacttactgcggacattgcaggagcagaagatctgcgcaggtagagcaggtatcggctcgttgttctcaacgaacgcagagagccacccaagtggacaaatggacatgtggatgctggtgagtaccatattgattcactccggtgttcctgtcggcaatcactggggaca

SEQ ID NO: 5660 - DNA, 3730 bp, Emericella nidulans
ccatatggaacgcatcacagttgcccaccattcccggtcgaataggcgtgggggttgtgactccattcgtagatgtgcttgtcgctgttgtgattgtcgaagttgggtcaacatctagagttgaaacgcagacgtagtagccaagccacagcgaggaacagccagctccaacgcccttattccattctaggaactgctcctgggtaatgccgttgcttgaggcaactgttgcacagctatcgcctgattcgacgaggtgaaaggcgtcgcaattcgagaccatgccaggttgcgtgggtgttggtgttgttaccccgttcgtggatgttgctgtggcagttgtggttgttaccgttggcgtgaagcctgatacgcccgtgcagatctatccaccgatgaaatacatgttagctttgaaccaattttataactacatatatgaaagaaagcgaacgtacataatacccaacccagagatactggcactgcgccccaatctccgagttccaggcaatgagatcttccagcgtcacaccgggatacttagccgtaaacgtatcgcaggagtcgccagactcaacgagatcccagcgattacatgtctcgatctgaccgggctgggtctcacccggtggaccggctgtcgtggtcattgtagctgttgtgctggtgggctcgggctcaccgaatgcttcgacgcagtaggagtgctccgctaggaaattgccgcaggaagcggtgatggaggggttctatatccatacatatcgatacatagtcagctttatatcccgcgaatacacattgctgaatattccttagacgaagaacgcgaggagggaggatgaacacacccatctcaaaaaatcctccagtgtaatgccccaaacggtcggcatatcgctgcacggaatagacccgtcattatcccaccaccaggtacagtaggaagtagtgtcagggtcgtaagggaaatttggcgtttcgtctcgcctgtacttggctttcccagcgacggcggcgagagcaactgagactaaggctgacacagtaagcagccggaagaggacagccgagtatctgcccccaaacatcttgacagatgatctattcccttatcttctgaagctctaattgagtcttgcagcgaggctgaacactgtgacagaattgagaaagagactttactgcctggtgtatatataatttcttccatccgcgtcgagcggggcgtcttacctggccctactctctttgcgagtgctctctatacgatactagccgtagttcgtactggaagggatgaggcgataatcgattgattaattcagaagctaattaccagctgctagctaagtgctaagcaggtagttggtggctccagtgtaggaagtctcggatgactctattctttcattccacggtcagatgagctgaaggacgaaatggagtgagactgtaacctcgcttctgcgatgtattggatggctgagattgagcccccaaatttagtcctggcatatttgtatacagtagctcaagtaggatggtagtagtagtactagtgtccgactcgagtccgtgagcgattaatctctcccctccacctctccatgacactccacccggcaaatgtgatgtgaagttactgctgggctaactatgcttggctggacttctgcttgaccggaccgggtccttcaaatggccatgttttattatcacattatcctgatgggatgcggcgtaagggtcaagaaagtcgttggcgatatagagccgatcattggatcaccacagatccttaaacttcagtaaattcggtgatccgggagactttgcttacctttagcctcgctggattttggcgagtcagagctgcagagcagccgctcagttcgatccttagttcgtttagcttcatagtcagttcgtgtgttagggttacatccttcatgcaggggttctccacccaccgcactctccacatgttagcctaggcattatcccattcctttctcctcttcggcctgaaggaccctgcgtgatttaggtactattggtcagagcgtggaatgatgttggaactactctaagaatctgcaccacgaaggggtcggcttggaataagcgcctgggcacgacgggaatggcccgactatcctcgtccctaattaaggctagacgaggggtttccgccccagggccttgcttgatattcaaaatctttgctgccaggaagctaagcgctcattatatcttcaatcaattagctcaggcgggattccggctctcgcatggttagattctgagtcctaaggatttggggggccttgcatgctgttgtagccttgatgaggtgagacgaaagtcctagttctagtcttcgcgagcgagggacgacatggattgcaaggctagcgtgaccctgcaatgtgatatgtttaatcatcataggattgaataaactactgttcagcctatcaggctggttctgtgtcacgtctatcagatgagccttcaattagcagtgtgcatgtagaccatagcagactcgctaatagtcggtaccactactcatgactgggcacataataaggtgctaggcaaggccgaattaccctacgcagtacgcattccccacaaccaaggttgtgcactccgaatccacgctcctgttcaactgcctgaagcgagacaggatgagaccgtacttggcgatgatggagtcgcacgtatcgcctggaattcgttagcttgatcgctccatggggttctagcacagatgagaaagaagaagcttacctttctcgagaagatgccacttcgtacaggtcgggctcgtccccgtccccgttggtccaggtggtcccgcagttgtagtggtagtaggtgtaggtgtagccgtaaccgtgtccacccaaacccgcacacatattgcaaaggcccctcgcaaattactacactgcgcattaagcgccgggttgagctcgctgagcttatcgacagacaggtcatacttcgccgcaatccccgcgcaagtctcgccatttgtcacaagatgccatttattgcattgatctgggactccgctttccgtgggccccggcggctcaacccaaccttcggggataattttcgtaattgttggatagcatgaagatgggatttcggttggactggggaggatgggatcgttggggcctgggaggcagtacgggtcccagtattcctctgtacactcgggatcgaggtcccaggagtgcaggtgatattcttcgtcgcctaggccagcattccagattgtgctgttatattcgtctttgaaaggacagtgcgctgtgcggtctctcatggcctgagtgtctttttttgaggggagtgagatcgctgtatggacggggattgagaccgtttcggtgaggaaggctcaagtaggtgttatgatgacagagttttgcaggcttgctgctgctagctcccatgtttacgtttctgtagccgttgcgatgaaggcgatttgttgacctaggatactgggtcaacttgcttgctggtcctgagcccactgtatattttttcttttctttaacaagttttggttttccgaattttggtatttggtttatgaccctaaaaaggttttttttctcctttgccttgagaattttcatttctagtcctttatgtttgattttgtaataaaagtctatacccccttatatttttt

SEQ ID NO: 5661 - DNA, 5780 bp, Emericella nidulans
accacataatgaattcggatttggttgatatttgaacatttcttttcgctccttgtagatccttcaccagtttgattgtatccgtacttgggacaccgccctcaagcgcccaccttgaccgcccggcagaatagacttcgtgcgggccccaatcatcgtccgttatgaccttattgttgttgtggtgtcgtcttggttgtgctcctcgtcgttagctccctggtggaagacaacgcaagggagctctctccagaaccatttattgccaatactcttcaatgactactcacatttgcctatgattcaagtctcagtttaagcaaggaaggactggcaaggttgagccagtcttgctttctagacccagtttcagccgctcactgcccgcttttgttgacgtcgacggcaatccccataacgatagctaacgaacgatcaacacttcgcttctggctgttttcgatagccatctttattctctgagctgcccaagcttcaaactttcgacctcattcatgttgtgcctcctccttaccccacttgttgagacttacaactatcggtaggtgagtaaacattcggtcgttcctagtcgaggccgatgatcgcctatttactacgccccatcaatctggctatgcctatgctggcaatgcaacgcactctcttgtgctaatgcagtattcagacattgcaagttctagtgggtgatcgagagatactcacagcgtcgccaaaatggaaggcttggtggatccagagacgctttacatgaaacaaaactgcattggtacgtattgagcgcactggctcgcaccgttcttgtaatgtttctgactgccgatttaggtggtggaagcttcggacgggtgtataaagggtatgacacttgacctccacgcttccaaagtacattcttgatacgaacagcatactacagcgtcgataaacgcaatgggaaatcagtggcgatcaagataattgacgttgaaaacgccgaggatgaagtcgaagatatcatccaggagattgccatcctgtcggaactcaactcgccatacgtgaccaggtaccatggatcatatttgaaagggtcgagtctatggattgtaatggaattctgttccggaggcagttgctctgatctaatgcgcccggggcctattccagaggaatacattgttatcatcattcgagaactgcttaaaggattggactatctgcacagcgacaaaaagctgcatcgcgacgtcaaaggtgcgcaatcacccgttactattgggaatatggttcaatactcacgattaatagctgcaaacatcctcctaacgtcgggcggccaagtaaaactggcagactttggcgtctccagtcagctatctgctacaatgaccaagaaaaacaccttcgtaggaactccgttttggatggccccagaagtgatcaagcagtcaggatatgattacaaggccgatatctggtcactcggtataaccgcgattgagcttgccaatggggagccaccgtactcggatatacatcccatgaaagtcctttttctaatacccaaaaatccaccccctacactgcaaggtgcatacagcaaagcattcaagaactttgtcgagctctgtctacgaagagacccgcgagagcgaccaacggccaaggagctccttgagcatccctttatcaagcgagcaaagaagaccaattacctaacggagctaattgagcgctatgagcgttggcaggcagttagcggaaatcagaaggctgacgaagatgacgagctggatcaggagcctgcagctgcgccgaagaccaccgaggaagaggatgacctttgggattttggcactgttcgccctgtgggccgagggcacgctttaaatccgatgagagtgacagatctcaacgccaggggctatggcacgaaagatcgggattccaaactcgaaccgcgaatcgaagcaacgagatcgaataatcctatgacaccatcatttgctcaacctaagagcacacctacctctccgaaacaatcctctccatcgaagattccactacctccctccccggtgaaagcgacgcatatggacaactgtcccagaacgccttcgtatctgaccccacagaaaccaaaggaaagtcctgggagtgaatatgacagagctttacagcaatctttagcgcaagacctgagtttcctgcagcttgaccgctcgccaggaagctctatggcaactatgatagacagggaaagcccactctcaacacctttaccccaccagccatggtcatccacggcagcggaagcaccgacactgcaggcatcaccttctcgacaccccgcggaacaacaagtcaggccagatatggagccgtcccgcgctcagcctccattattttctcaaccgcaaactcagccgcagcccccttcaccaatacccccaccaacaccgaagcatgcctctcctccgccgcaacctaaacaacaaaagtatgtacatgcaccgttgcagaatcttccatcaagtcatgtcaacccaaacagcccttcatacaataagcccgccaactcgaacgcacaagacatgaaacagtcacgaacgcctcacgaaatcactgccctgaacagcgtcattcttcctgccttgaaggaagctgtccaacgtcgagctcgccgtgtagatattgctacccggtcgactatagcccatgatggagagagtctgaaagcggcattggagctccaatcgcggcgtgaacacgctcaagaaatgatagaatcattatccaacgatctgggcagtatcctcactaggatcgagcgctgggacaatgacgcagccgtgggcatgggtgccggcatccactcctttctagaagggtttcttgaagagatcctcatcagaatagaaccaggcgatgaagacgagctccgatgagcttcagtgctctctttgatttctcattcacatgcctcgctctagagccgttactgtgtttctttcttttcctgtttctcttaggatagcacgcatgaagatccattgcggtgggcgtcgacacggtgcagctgtatgctcaggaacacagtgcagaagatctcgcaatttctgttcagactttccttctgtttccattcttcactatctgtttatacagggctggccctttaaatcttccaatttggaacgagatattacgcagggggtctaaatctgccacttttcatgatccagctccagagacctcagtaagcaacaattccagcccattcccaaccgaatttggatggatgggcgctgtaaccgacaagccagctactggaaaggagaaaagagcgtattaaccataatatatttcctcgcgaaagtatcagccttaatcgaacaatctccgtcacctgcttccgtcacctgcttacggcaccgacagcccagcccaccaagactacctgcccagctgtatctgcattatcagatgattgcattccatcacgttttgcaagatatcagagcccgctcgcatgctttcacaacatcgctaggctctaaactctaaacccactcttgcgacggatttccattggacacctgaggggaggttgcccaggcctgcgtgaaaggctgggccctgcaactccaatatattcgtgacttaagtattttctttctgccctctaagtacgaggtttctctagcggctattctactacacaggggagctttcataaaccaacaggaagacaagtggtgaaagccgagacattatctcatggcagaaaaggtcaaccattatacactggtagaactactttggtggaccagacctgcgccgcacctgcaagctccagccagtcctcaaagtcaggcaagaacatccagcagccgatgaatggctcctcggtgtcagggccaactactaggcgtataccttgcgggagcagtaagagtagccggtgtagtcgaggtatgcgtggctgccggccgtcattggatgcgtagggtattagggaggaaggggttgatcgtaaatttagatgatgacatcaatgctgtcgagcggcacacgatgctcttccagtatctcggcaacgtgcttgtctttgacttgtccttgatagcttgggcaattctggggagtcgtaaccatgtccctggttcccaggtcaaggttgacatttcactggtcctgttaataatattactaataaaattacagaacttaaaaattaattcatgactaattaattgagctgtacttcttaatgaacctaaaaatgcatatttagaattagctgatcaaccagctaataatataccatatgtagctaaagaacagctaacatatataatatacctaaattataatcagatatatataaacctgaaccaaatgtaataacaagataacctaataaagagaaaattaaagttattataggaccaagaaagaataatactatattagcttgagttggcgctatatattcctttaataataattttaaagcatccgcaaatgcttgtaataaatcataataacctacagcattaggacctaatcttctttgcctacttgccatagtttttctttctgctactgttacaaaagcaactgataataaagcaggaacaattactaaaagacctttaattgctcaagcgtagaccacagcgtccattcctcgaagcttctaatgggtggccccattcatggacctgttggcgctttagggctgcaaatagtgtcggagatggagatctgtactgtcggcaagggccgggggttagttgaccgcgctggccacaatggcgaagttactgtgtacgtcgggccccatgctccttacaccttgcacatagaagccggtaaaactctatggtgtctttgctctgcttgacgcttgcgcaagaatctatccgcttgctgctgcggcttggtaaagtcgcggggatcacatgccatctaccacctccaccccatctcagctgtagttctgtatatacttagcatacctgagccatggatttctcacattcacagtggatatacactctttgacctgtattgaagaggactccactatggatccattattcataccgctagccaacactagttatatctctattactaatgtttaagcattttgggtcgtgtatgtgcataggtgagatatgtgatcttttccgtgtttgcatttgacttcacctggtacctcccttaccatgggctgcgggatcggaagggagacagggcaacggttctccggtacaagccacccggaagttgaaatgctcttgggtgagctcctgccaatcgacagctgtgcgcggtggatgcattgaccctgagctgaccttggccttttgcactaatgcgcgagtgataattagtggaagggaggtggccttggagcagctaagaccattgagtcttagggctatgtatccgaagattcgttgattggatttgtggactgcattaggtggagcggtagccgcggcaccattgttacagtatcgcaatgcatcattccatcgttcaaagggcgtcacgaatattggcgtccggctacatgaccttcaaagtgagaataagctgtttttgcgtatgctaacccccggggcgaaacagccagtccgtttcgggggtgggtatcaaataattcgtgatattgaactcgtttgtatgggtagaagcattatccaccggcaaagggttcgaactgccagttccagtcaatccaggtatcgacatggagttat

SEQ ID NO: 5662 - DNA, 2981 bp, Emericella nidulans
tagtctatgtggcttgatcagtcacgataataatacaagagaggtagaggtataccgtacagtccaggagggaatggtggagatatcagtgcaattgagctagatcatgccctagcgagacatggcctgtccgattggcaatgcggagggaaaggtaataggtaagtagcctggccggatgaagccgcacttggagtcttggactcagccggcggaagggagcagttcagtgatggtcgcggcgatctaatcttatctataagcgctgctattggttggacggtctcccgcccagcgaaacgcgaggagagcgacctgaggcgccagagcatctcccgccatcagcaaaaccctacagcacctctttgcaggcattcttttttcatctttccttttttttcactctgaactactctacaacgaccatcagatgagaagaagatgatcgtctcgtttccatacacgtagtggaccattctttctatccagagcctccaacagctgtctcggtctccccgccgacttctcagtcatcgagagctcaggacccaccaagtaaccttctttcagacctgactgttctcacagtatcagcctttcatttgcgctgagttaacatgagtgatctggataggtaccgtgccacataatccatgcgatttccagtttgaactaacgctgcctcctccttgcagggcgatcgcccaacttcgcgcctgtcgcttaatccccgaggcccaagtccgcgaactctgttacaaagcgcgagaactcctgatagaagaagggaatgttgtttgcgttgatgcgccagttacgatatgcggggatattcatggtcagtttcacgatttgatggagctcttccgtgttggcggagacgttccagacaccaactacctattcatgggcgacttcgtcgatcggggattctactcgttggaatcgtttcttcttcttctctgtctgaaagtccgctatccagaccgcatcacgttgattcgcggcaaccacgagtcccgacagatcacgacagtgtacgggttttatgacgagtgcatccgcaagtacggaagtgccaatgtttggaggtactgctgtgaggtgtttgactatctagcactcggggctttagtccttggagccagttcagagctggagccgtcaggaccaagttacaacgacacgacgcaatcaaccatgtcgaccgatgacagcgagctggagaccgaggtgctaaactccaaaggggaagtcctcatgaacacctataggcccagatcaagaacgtcactagataacggaaacacatcaccctcaagagatcaaagccagacacccatgcgatccggcgcaccagggacaggcgcatccggcagcgcattcggcagcaacaatagcagccgaaccggtgccgtcctctgtgtgcacggtggcctttccccccttatcgatacagtcgacaaaatccgccttattgaccgcaaacaagaagttccccacgaaggcgccatgtgtgacctcctctggtccgacccagacgagattgatggctggggccttagtccccgcggcgcaggctttctcttcggcgccgacatcgtcaagcagttcaactacaagaacgacctgtctctcattgcgcgcgctcaccagctcgtcatggaggggtagaaggagatgttcgatgctgggatcgtcactgtttggtacgcactgaactagtgctatggttgcgggaatgctgatgctatcctggaattaggcgaagatacgagcagcggtggcacagtcacaaggagcaatggcgaccaaggtcggagtaatggcatcttgtccagtggtgtcgataagcaggccctgcgtagccctggacgaagatatagggtctttgaagccgctgcgcaggatacaaggggtatgcctgcgaagaagccagttgctgattatttcttggtgagcccttttcctgtcctctttactttctaaaccctagtgaatggcttgctgaccagtctccattcatagtgatgccagccactatacatcgctccatgattactatatcgagagccaacatctcagcctactctcttcacacatcactatatatgcccttatctcttccatctctcgaattcctctacggctcttttccccctcaaatcttctccgtctaagcattttcatttctcaacgtactttcctcgaaacctacttccagcattgatgacgacactagatatctacctagcctttccactcgcacgctttgtttaacaaaatggatgagaattttctgaacatcaaaaaataagtcctagttgagttatgagtagaaattcgcagttattgaacccttcagaatagtattgaactacacacgtttcctcggcccgcggctcattatgaagagttccattctgccctcaagaatcaatctagtgctgccttctattgtttgagcgatttcgttctggttagcccaaaactctcaacaagttatttcaaaaaggcataaatttgctatacagattgtagttacaatatcatgctatgggtccttgcttataaaagtaccttagacctcatgactcggccaactgccttcgttatcctttcagaaaacaatccacaatcaataatacttcatacatcgaacgaaccttgctcattgcaagaagaaataatgagcattctagcctgagatagcagttagaagaacataactcttcaactataggaataatagaaatctcagcataagcatcggcaaactggagcttgcagttcttttatccaaaataggaaaattctatgtatggcaagctgtcacatacagtcgatatattctactctaagtaaccgccctgatgtaatcaagtcctgacattcaatgttagctcttacacctagtacgcaacctgtacagccgaaaggaatgaaaactatgtagtgcgaacaagtatagttgaatgtga

SEQ ID NO: 5663 - DNA, 7247 bp, Emericella nidulans
atctagtcaggacgatgaaagtgtagaagtagtagaggataatcccaaacggaaaggcgaagtcctcaaacatcccgaactccggactctgcataatactgtttgccattgcaataacgatgccctttgtaccgagtgggccgctatcgacttgcgccatgcctgtgaacgcttgaaagaatccgaccaggacaacaaggagaagggcgaagaagatcagactctccttcatcattacccggaggacaacgaacatggcgccgaagaagcggagggtgtctaaataaagcatcatgcgcatccagaacatgggacctgcaaaggctaggaaattataacttaatttgtttagcgtctgtctttgctcatcaccagcagaggcagagtgtgcgagggccgcgactcgcaggaagaacgagacggcaagaatggcgtatagtgtggagttgaaggcattccagaagtcgaagtagtttcgtccaattttccagagcttcgtggcctcatcacagatgaatgcaagtgttatgacataaagtactccctcgacgacgtctaggtcgccggttgggttaacggtgttaataacttcagtgtacaggcctagatagacgaatgaaaacaggatctggcatgcgctctgatagatgggcgcgcgcattcggtctggatgaaaatggactgcaaaatcggtactgtctctgtcttgataggggacaaagttggttgggttgccttcttgctggcacagccagccattccagaggtacttgatgcacttctggtacccagaagagccgattaccctcaaggcatggaggtcaactgctcgctcaatgacgttggcgggggcgctttcttcgccgtcctggaagatagagtagcgcttgaggaggacatgaacgagaagatgattctgatcttcgtcggcttcaatactgctcatcgtcaggaaattcatgcagactgattgaggacgagactaggatacgatacattcgcttcgctatgacctcacaggctgtagctcgaagctcatggagttcggaatcccacagctcctgctgtgcttgacgcttaaaccatcgcaaacacacgagtaggcagaacggcacgcatgcgcgaagatgctctcctccggcctgcatcgcagtatggatcacatcctgagttatgacccggctgttggcgctagttatcgactcttcttccaactcacatggaatgacttgttcaagctggtatttcagccgcagagcaagtctagtcacttcctttgcagggtgatcagttggaatctcgtctccttcgtgagttggaagcactagaggttgagttagctgcaggtcttggggagctgctattgcccggtgacgtacatcgatgccgctgcatgtcctggagaaacccggaggcctcagaggcgaatatgtcccgccaacccattccgaggcttcgaggatggaaaaactaaacaatggatgactgctggatgaaggggtaaatgatggtagagaggatcatggatctttcagggcctaaacttataaggatcaataaagcggtgccccaccttcagccccagccacattctacactggacgaactctcaacattcaagcagcttgatagggtagatgtctaagccggtcaccggcggtgaatcacagatgaagaagcttatgtacatcggaactagggtaacgatcatggaagtttccaacctcagagaaagaactcgacgcagtatccacagatcgaggataccgcacgtcgcactgatagaacgaccgaatcccatccaaggagtttcgtttaagactctgctgttgctccaaattcctcctcttcgcaagctaaaacgtcaatagtctcataattcgtgacacgttcgaaacctttctaatgaactttttgtccgtctacttcatctcgcagcgtgccaacccgactcagaactgcttacagcatgacacgaacgcgggaggcgtctgccgaccaccccatcttcctgagggaagactcaaagcggcacttaaacaatgacgcacatatttattcggggacaccctcgtcgctctcagactggctctcgtctccgctgacctccatgttctcacgctcgcgcttctccatgagctcctgaagagcagcgtcatcgtgctccgtaacagccttgggagccatcttaacagtgcagccaccgccagacgctttgatcgtggtctcaatccgttcaatggcttcttcaagcatcttgataccgtgtgtcttgtccagacattggctagtcaagacatagagcggaggagcaaccagtttgacctttatttggttctcaggagtgttctctgcctcagcggtccgcagagcgttcttgaccgcatcgataccatcataaccaaagcaggtgacttcaatatccgcgcgcactttcgtcgggtggggtgtaagtcgcttgccaatgtactgagtcagctcctttttcacggcttcattggggaattcgacatcggcccaaacatcggggttcctataagaataatatgagttacgcgaagttctgacgtctagctggaagagccttacgtgattgagatcttgaaagcatcgtgcgagtggccgtattttcggttcaacggccaggcgatctgctggtatagcgtctcaagaggggtctgagttgcctctgcaacatgtcgcagaatcgagtggacagccttgctcttgttgtacctctcttcgcatttgataacatcttctggagaaactcgtcgcttcgacagatcaatgtaacctaacgtcgaagacaaagggttagaaattctctcgctagctgctcacgttgcactcacccttctccttgtccacacggagcacaataacgacctcgttgcggccaatgcggatgagcttctggatactacgaatacgtctccgcgaaagctcagagagcagaatcatgccgtcaatgttgtcatattcgagaagcttcacgtaggcacccatttcggcaatctagatatgaggagtcggtatattaatttgctgttccaaatggctatatttgcaatccgatctcatacctgcttaacgttgaccataacataactgtcaacctccgggtacttctcctcgtagaaccgacaatttgtgagcgacattttggcggggttgcgctttttgcgggcgaagttgtggattcggctgatgtcaaaaaagagatctggaaaaagcagtgacgctctgaggctaaataatgcttcttcggaagatttgccgagggagaatttgctggggaaaccgagaatcgtcgtggatgattgtgcttgagatcgcagcacaattccttcaaatcgctttgtggcggctcaaacccactttgagttggatcacgtgattctgttactcaccgcctgggcagttttgatatcgcggctcgaatccgaagtaaatggcatcatagaccttagatcattacaagtcaaaacatacttctctgtgacgcttgctggcctgggcttctcattgtaggagctgagatacttccgcttcgccgtctacccaaccaaaagccatgcattgtatgctcccggctttatctttaccctcgactccaactgacactagcggtgtacccacagcacggtatcagcgacgccgatttatctttatttcctagtcttgggtttcgtttacttctggaggcattctactttgctagattgttatcgttccctagacacccttctctgactgcagcatctgcatggcttgtcatcgccgctcgccacgatgaccgaatcggatcacacccgctctttgcgagatcggatcattgaactctttcgtcccccggcgtccgttaccttcttacctcgcatgacggtgcacaacaatacaatgggcgattttgatgagtcggccggaagcaattcatcacaggtcgactcccgaactccactgctaggatcgtacgaccgtcgagagcctccatgtggtatgggtaactcctgcaaccatggcacattcactccgagggtggagtctgatgactggcgtacaaatgctatgccagaatatggaggcgaacgatatcccataggcagcactagccggcgctctaccagtgctgcaccaagcgctcagggcttagagaattttccagctggagcttcgacaccgctcactataaagtatagtaaatcacagtaagtcaacggtcccgtctatcagaactccttagtaaatatttctaggtatatatcgtattacattccattctttacttggatctctcagtatcgactatcgtaccttcgcggcgatatctgtgctgccctgacagtcgcttcaatttacattccgatgggtctttcattatcaaacatcgcccacgcacctccaatcaatggcctctattcattcgtacttcagccgttcatatacgcaatactagggagttcccccttgctcgtcgttggcccagaagcagctgggtctttgttgactggagccatcgtcaaagaaagcgtcaatcagggatcgtcaggagaggatgacgaagccgcaaatgccatagttgtgggggtagctactgcgctggcagggcttatgatcttagtcgctggaatattccgactgggtttcctagacaacgttctcagccggccgtttctgcgaggctttatcacggccatcggcttcgttattttcgtggatcagttcatacctgagcttggtttggcggctgaagccaaggctgctggtgttacacatggcagcaccgtggacaagctgctattcataatcagaaatattactcactcacatagcttgacggcggccgttgcattcacgagtttcgccataatcatggtatttcggtatgtttgccggtccagggaaagcacaattctgattcatctttgtagtaccctcaagaagcttcttcagccgcggtatccgcaggttatttattttccagatcgaatacttgttggagataagccgacacaagggatgccttacgttgagaacatcttccttgactgcttcaggcattgatcgagaggtctctcgttcccatctcgacacgaaacatatcaagatggaacaggcagttttctgagtaggagtatgctcccttgtcacaatataatcctccacaaaaagtttcaggagctgtggacttggatcagggtcatccttggaaaagttggcattctgtggctcgttccgagagagtctccatctagcagctgttagtgcctttaaggaaaatcttgaaacaaataagacttacaacttccaattaagcactgcgtactcgtatttattgaatgtcgcaggtgctagttctcgacggcatatgacgttttcctgttgttcctgttcgttttgatactcgagtgtgaatccacgtgacttagcacgtgcaatgcgatccgcaagggctttctgaagattatcagcgatcattttctcgagagtcaagaagagagcgaggcagataggacagaccctgaaagaagcgctccatgccatttatgtgtgttcgtcttgggtgcagtcactgccttgagtagagtgggcctcttatcaccctgtgggtgagaatcgtcgcccgttctcacctctctcacccttggtctccagaattctcacccatatcacccgcactcaccctaaggacacacacctcgctattttaagatggcaagggcagtgagggctcatggagaattgaccgtgcggaatatgtggcttaagtacggctgagcggacgggaagccctgttttccacaccctatggtcgtatgtacctggttacgttaagaaacgatctctattgtgaaaatttactacaatacaacagcgcacatctaccgcgattcatccactttatccaagacaaagtaacatcagcggctagcccagcttgcgactgagtaccgagaatggcagatgacctccagcacggtcatctgcccacagccgagcgggagcccgggtcgatcaggaccgtgcgttccccctccattatctatccgttcggctcactgcactccagtccacgggttccctgaattctatgcaagatacgccatggatgcgggcacttgtccgaaacatctagtctactttactagcagtagtgggtaggctaagtcgcgcgcagcccggacggacatgcaggagcgagccctgggccaatccgggtaaatcgctgcagactgcagactgcagattgcagattgcagactgtaataggtagtaggtagtagctaggcagcgcaacatcaaaaactctcgcaacacgaaacatcggctccgtccgtgtgagtcacacccagagccactcacactggacggcgatcgcagtggtggacatggacagggcaggaacgagcaggcacggacagggcagggcagggcagggtctgactgcgaggtgcaatgcgatgcattccaaccttctctttgtccgggagatgcagccaataggaacaatgattgctttagatcggaacgctacaatgtcacctcatgctactgactccggtacagggttggcatctgttctaccgtggctttcagggatgcggtgacaagttcgtgtttgtaccttgactcgatgcttggtctgtggctatctggagtatcagcatgggcccggcccgctatggtatcgcggtacttgctgaagggtctgggaacagaccttgtgggcattgtgcgtttcgcataggggggtttaggcagtctgcaggaagtcatgggcgtaacaaagatgtcaatcttcagggctactagccactgtagcccttaagcgaagcacagctcgattatccgtagctcgatcccgtaggcacagatgatattgccagccaatagagtcattgtagttacatccttgttcccggtcttgaagacacctgaagagaacagctctcgtaaagctggaaaggtagtatctcgtaccgacttggcaagcctccagttctgagctgtgcactacattgactcatatcatactgaagcagtctctgaacagaagcccgtgtgcttccttttttcgcctgattctagaaaggtagacaactttgaaccccctcgaaagcaagtgataatgatggcggcccagtactgagctgctgctctgcgtagcagaggaacatgtagggctaatcaagacaaaacaaatggaaggtcaacggtggtaaggcagcatccgagttagcgta

SEQ ID NO: 5664 - DNA, 7672 bp, Emericella nidulans
ggggattgagacatgctgaggaggagagtctgtcagtacatgtttgcctggacgatataacactggatgttcaactgacgacatcgtattcgtgacaaatcttccgtccctagccccagtaagacaaggaccgataacgaggcccgaacttctagagcgagattagtctcaatttgacagcagaagtgatagtcaaattcgaccagaaaaggataatgcgatgccctcgtggacgaggattgaggggagacggaacgtacgaccggccagggatcgcaccgggagctggatgtcgagtcgttgcacatcgtgagtgtgctaggatcgcgaacgatgagccaatcgatgacgctttccgcgtgctgctgttgtcgaagttgcagaatggtgcggggagttcgtcgaataacaacgccaaagcgtgtgatgaagtgcagctggagagacgctactttagcgccctgagccaagattgcctcccggggcccccattggccacccgcgtgatgaacggccctaattagcaacatttaccgccgggagaggatcataaggtattctggctgtcctagatgtaccgaaagttgctattattaacatgcattttgcgtgcagctcttgccaaattagcaaattagcactgattaactctccacactcgggagattcagaatcttcagcctgcaccctcaattatctgtcacactgtcacattgtcggtcactctcggcgcatgcaatcaaacttgtcctgaaaaaccaggtaatcctgtctattaatatctgctatggataaaggctacagtgatcttagtagcatcgcgcaagattgcaagtaacatgacaatttggtgggttatctagagacaaccagtgagacctcttatcttgaaataacattagattggcccttaactatgaactctatgctgagtcagtctcatatataagttaagctctttgtgccaccaagtatgtacgccggaatacaacgttcaagcaaaccagcagcatgtttgcttttgacacctggcagtcaatactaccacgagttactgagtgcccaagccaacatcaacattgtttgctgcttggcttgaagctgtactcagagcatgtcacccgttcctagaaggtggtgcggggtaacagtgctctcccaagagtcacgcgctaatgggagaccacatattaaccatattgggctgataatggtcgctccgcccttccaagtgtatgtttaatgaagcgggacatagtgatcgcacgtccaatctacccaagcacacgataagcgccgaaccagagactagccctgaacactctatgcaggaactgcatacccaacctcaagaccgaggcgtgcatacgtagtactcgccggggctcagtgatcttttctagaaaccatcgatactccaacgttcgcactggaaggagactttcagcctcacactggtcgaaagtcttggccaattcgtgactcgcttgccgcccgtttcctgcatatctctgcttatataaatatccagactcggattgcctatcgttagccgcccagtatgcaggctcgctctgaagtataccacgaccaacggttgcgaggcccgctaggcataggcatagccgcagttagtgtagagtatagctggccgagttatgatgatacgggctatatctgttgagcgagaaagaagtagcgaaagcaggggaagattgagtgctcactgcgaatccccaatgtagtcgaaccatgctttccaggcgccaggttcattcagcaaaggactgaaggatgggacagggtcaagcagcgagaaacagtggctaataggtttatatattgttgtacctaaaatagccagagctgtcggtctgcaagacatctgtataggctagtttggtggatccatttggctggtgtgtgtctttgacaaaggcccaaacactctatcagatagaagagcgtcacgcgggtcttgccattgcttcttttactgtcgaaatgctcttctgctttattgtcccgtcaaacatcctgcgtggccaatttgagtagagccgcattgatcagtgtcactacatcgtacagtacgcagttcgtatggtgggcatcgtcctcacattggacgtgtcctaggaaagttgtccattttccggttcttatgatggtcgaaacagtcacttcaaagtaccggcaccgtaaatgaagaaccatccaaatgaacatcgcggcttcaatcacggtggaatcttacactctccctgctcaacgttagcctagaactgaagaatatgtccaagaggaacccacagcattttccctgctacttccgagccagttctggagccgatttctttagtattattgttgccgcgccgcagaagctgacttggggttacgcctttcagtcaagctctataccactaccacaatgccaagaccgttgattgaaccactcagagcccccgggaacgttgcgttgacctgcatgtcataagtcgaccaggaaacagcttaaaagacaatgggcatggccccttcatacccccagggtgtttgctacaggcgagagttttggatgaacaccacagtatctttaacagtactgatgatgcaaataagcccttgggacaacactgaacgcgccgcaccttctacgagtcactcagaagatccctatatctacctagatctgtgcctccctacattactggttcaattgacatggccatctacagtcatactgcgtatttcgtcccgcttcctgctgacttcgcgctgcttcatggggctgaggatagatatgtccttcacatagccgttaagcgcggatctctgcgaacatggccaacgtatatggctgtattgagcgaagcagtatagtagctttcagccgcttcagcctttccaacacttccaggtggctgtcccgtcgagcctcagggccctctcagcactcgtctgggaaacctgctatccgagattgacaaaagctcagatccgacgataacttgtagcatcgacaaatatattgacctagacggaactgctcaggtagaaaagaccgtcgacctgccgcctttgacgggttctgcttcgcgtgcgccccgtcctgagaaactgttacaacggacaccgggtcaagaatcacctgacaacccatataccctggctcactaacagaagtagaggaccttccagaagctaggtcggtggatggcatgagaaacaactgctgtctggactgttctcagtgacgatgaagctcggcttaaccctaacagctctgaccatctatgtcagtataaaaatatttacatcttgtgttatacaatcagcccatcattctacttccccagcctcaatctctttcatcattgtttccgcatcttgtgctaccttccttaccccctccgcaagctccccctccattctggatatctcgccaaaccgcttccgccagagctcccatctccccttgcagaagccatgtttcccgtcccacagcggaccgcccttgcccctcgcgccgacattaggcccagactcaaattcctcatcccatttatagatttccacacctaaagtttcaatccatgccgccgctgcagggatccaagcctccaagggctctgccggccgcatctgctctgtcggtgtttcgagcgcactgcggagagttaccagagcaaaccacgaaaatgacgcgaagacaggttcgtcggttgccgtaagaagggcagcgaatttgtttgtgttgatgatatctgagacggctttttgtcggtcctcaggattgctgttagggcgtattgacacattccagaaatcccggaagcgccagccaagcattgggaggtctttccagacttccatgccgtggattgttaaaggttctgaacctggttcttctcctgcctctgcggggtcgggactggggagctcggagagatccacgacgacatcgacaagcttatcttggtgctcaggatgctcgcgtgctagcttgataatcaaatcccaaagccgattaaggcgctcctcaagcggttcgttgtcagataaggaggattcagctagttgtttggcagccgttggcgcagatatgctgttggcgaacagatcctggaggatcgttagacgggacgcgtagattgggtctgtgatatccggcatcttgtcgaagatgtaatatgcagtgagaaaagatgcgaaagtgcgatattgagagagtaaacagacgggaagttggggctataaaaggggtccctacggagtactccgtacattggttccttatcggccaatgcggggacagtccttcctcacatgcaaccttcaacgtcatcctacgttcctggatctcgccgacgcaaccaccgacggctctcttcgccggccgcaacaccaaccttgcaaccgctagttcgacataaaattcgcacgcataatatgctaataccgcaaagatgttccgttttccaataacaccctcgtgcgcatgagccgtgcgcctccggggcccaatagcccctcgtccctgtatctccaaatctaccttccgatgctcctcacgatctgcattagcgtcatccaagagaacacagcctccgagatctttcatatcttactcgcgacctgtaccccgggcatttccccaagcgcatgcacggtcattctcaagctcaagccatcgacacttctacaatggaggcaatagatacagacggtttgacgggccaggaagacagccgttaatagtgcacctattgcagaaagcgagaccgattcactttgtgatggtgggaggtgttattggcggcgtttatgtttataacacggatactgtggaggtgagctgtcttattcggatacaccctccgccgtctttgcgcgcgcacattgaatttgggcttctccccagcttctttggaattatgctaaagggacaaatagatgactggtcggcgacggtttaactgtgtctcccatcaacaggagctaaagatgggcgaacagagctaccgagaggtgcttcgggattgtcaaggacgcatccttccagaatatcacccgctcaccatcatggttaaccgcgttctccatcgtctggttcctatggcgcctatcgatggtgctgactggaaggtccatgttattaaagatgataacatggtgaacgctttcgtcctcccagggtaagtttgatgcttccctgcgctctaccgcactgtgacaacctctaattgcgcatagcggcaaggtttttgttttcactggtattctaccaatttgtaaggatgaagacggtctagcagctgttctcggccatgagattgctcacgtggtggcacatcataccggagaaaggatgagtaacaactttgtcaccatgggagttatcttcctcgctgctcttctctttgatatctccggaaacatcccatctttattactaaatctcatgtacagcttaccaaactctagaacgcaggaggtaagaacttgtcaatatcatagggtcgaaccaacattgctaacccaaattaggcggaggcggataatatcggcttgagtatgatttggcgttctgccttgctcttgggttactactaatcctctctctcttagtgatgatgtcgaaggcttgcttcaaccctgaagctgcggttgatttgtatgtaatccggttctgttggatctagccaacactattcctcgagcccgagaaattgctaacggttgtagctgggcacgcatgcagagagcagaaaagcaggcgcctcctcaattcatatcaactcatccttctgtgagtgtgtcgatagatacaggtcctgaactcgagctgactctggagtagaactataaccgcatggaggctattcgcggatggtacgacttgttctcaaaagaaatctcagatctgaaaattactgactccgcatctaggctagataaagcccaggcagaatatgagaacagtggctgtatgggcaccggttcttggagtaagtgttgtcctccaatgttgttctgtttaacatgattaacatttggcctacagtgccagggtttcgaaaagccagcaacgacttttggtaaaagtgaatataaatcggcttattagctgcctatgtaaattagtttatgatataatgaataatctcctatcaattgtctttgccaatacggagtgtaacaggcgataatcgacagggcatgccaagagcccctcgtggtgcaaaccaagcaaactagtaaccgcagaccatctcgaagctccaccaaaaaatccccaagcagcagcagctaactacagcatcacggtatctcccctttcgtctccttcttccaatcagtgattgtctaacccgggacaaaggactcatagctatcatgtccctgtctttacccggaccttcccaggccggtcttttcaagcctggctaccaaaggtaagcgattcccactcaggactgacccccgcgaactctccacgaagacaacgagacacgcagccgataggcgagaaaactcatcatcctaactggaaatctttagccatgacgccgaagatggtgctgtcattcgcaacatcgaggcctgccaggccatctcccagaccgtccaaacgtcgcttggtccgtacggccgcaacaagattgttatcaaccacctgcaaaagatgattctcacatctgacgccgctacaattctccgtgagttggaagttgttcatcctgcagccaaactcctggtcatggcgagtcaacaacaggatgcggagatgggcgatggtaccaacctggttattgttctggcgggagaactgctgaagaaggctgaggaattgctgcgcttgggtctgaagacgagcgatatagttcagggatacgagaaggcacaaaactttgcgcttaattttgttagaaggtgggttcttgatctttcaataaaatgtccctgaatgtccccgtcttagaggccatatctaactgaaggatgcaatagatcttgaagtcgatcgtttgcaggatttacgctcccagactgaactcactaaggccctacgcacggtggtcgccagtaagcagtccggtaccgagcagctcctcgcttctcttgtcgccgaggctgtcctgtccgtgctgcccaaaaatcccgtcaacttcaacgtcgataatgtccgcgtggtgaagatcatgggaggaagcttggaacagtctcgtgtgattaagggtatggtgtttggccgcgagcccgaaggttcaatcaaaaaagcccacaaggccaaggttggagtcttcagctgccccatcgatatctcccagaccgaaaccaagggtacggtcctgctcaagaacgcgcaggatatgcttgacttcactaagggtgaggaggagcgccttgaagccgctattaaagagctctacgactccggtttgcgtgtcgtcgttgcaggcgctcaagtcggcgacctggccctccactacctcaaccgcttcaacatcctcgtgatcaagattctctccaagttcgagctccgccgcctgtgccgcgttgttggcgccactcccctcgcccgcctcggtgccccaatgcctgacgaaatgggctccgttgacgttgtcgaaactaccgagattggaggcgaccgcgtcactgt

SEQ ID NO: 5665 - DNA, 3833 bp, Emericella nidulans
atccgatgatgcactggtcgatatccatcttcagccggccaagcatgagcgccagcaacctatccgttgcgagttagcgggcgcgatgactgacttggtggttgtcaacgaacccgccagaccctgttccaccaatcatatcgaaaaagtcgcacggtttcggcggatgctcgcgatcgattgcttccatgatgctcttgaggatgtgcagcgttgacaagccgcgcacgccgccgccatcgagggagaggatgttgagttcgcgatctgccattgtcgcgtaggatctcaaaagcgcagggtcctgcccgcaggcctatggcgacgatatttactttatatatggcggcttagccacgcgcaaaagatgaggcttcgaagagcctgagctgccgcgctgcggtgagtacgacattgtcgatgcgctacacagccacgtcaatgccaacagtaaatcttatttgtggctacccaacctgcaggagcaccgcgcttcatcgctgattggctcagatttaccaagttcgtgttaacaggctattcacagtggatagcgtctctgtcatggctttgggatcgctgacgcacaatgcactgcatgtcctatggctgcgataagaacgcaggagcctaaaagcccaagcactattaacgggaacccgctagtattcctctgaatttgcagcctgagtcaggctaggctcagcacagcctctgactctgttgttggttcagactgggcatccgggggccggttgggcccttaaggttgaggcccgggcgaagggtcaagttcaggtactccctccacgacatctccacctcgctgcccatcaccatcctcaccctcaccgttgatgttggcatccgcggcaaaaagctctcccaaaacgctcatcagctcctccacagcctgccgctcccctcccggcacatcaacatcgccctccaaaatcacacctgccgtaaccttctttccataaaacttcgtatttgccgagcgcctctcaacgagaaccccagactcgatactaacacccccaaagagtccctttgttttggcaaagctcatcatctttcccccgccattggtgctgagcgtccggcaatttccgcgttcctgccaagcgggccaaaggcgatactgaggtttccagaaatcgtcaaagtcccgagcttggagaatgtggttaccgagtcggtgtcgttgagtacgaagacgaaatcggtgagttcgaagcctacttgtccgccgaagccaagaccgaaggtgcttatcgcggaggggggcgaccatccactaccaccatctggacggtctgtatcattactttcaggaagacgcgcgatgaggatgcctgagccaaagcggagggagccaagaaagcccgcttttgtgacggttaaaattgcgagggcctttcataagagcaacgcgttaatcgaaaacaaacacaagcgtagttatattgcgtggggaaaaacctttgcatttcgcaacacgtgcttaggcagctcgcgccctgggctcccacgccacgagccgttgatgaaggagtcgagaatctgggttgcttttttgcattcgccttgttgggttggtcattagctggagtgatcccgtcacagcgaacgaagaactcactgcccagtgatgcgggcagcgggttgtgcatgccctttggcatgtcgacaggactattgtagattccctgacattcagcgaatagacacggagtaatcacagatgttgatgtcctggagactggcggtgtgaaggaggaaaagtcgactaggctcaaacgaagaagccttggcgccgatttactgggaggtttgggttttgctatgactgaacaataaagcaatatattagatgcctatgcctactccgtatgcaataataacgccaatgccccaatctgtgtacacatacaacgccaaataataaagcagataaaatgctacatcccaaaagtccatccgccgttcagacgcagacgctgccgctcagcaacatccctccggatttcctcttgtgtcagtccatccggtcctgcccagtttgcgctgcttgtccgctcgcggaacttcttgattctcttatccgccttgaatgtttcctccagcgagaacggcgctatcggtccgaagatagagtcaacctccatgccctcctgatcccgaaggagcgattcgagctgcttcgggtgcgcccagctgggcacagggagcatttcagcctctgaatcctggtcttcactatcagtcgcaagctccggaagttggatcttctcgccgtctgggtaattgggcgacggcttcgaggctttgctagaactgggtcccggagtacggtgtgattgtgacggaccagcgtttgaaggttctgcgaaaggaatcttgccgctggcatattcggccatgtccatggggcgccctggccgctgaggctggccagtcttgaaaatcgtggagccggattggggtgcggcggagtgctgggcaggtccatacatggaaggcttcttagcgggctcctaaaaaacgtgagtataggcattttcggcgaacattcagagcttagctaccttgcggatgttagactgtcgaatcggcggcgccattgtgggtcgcatcgaggcacggttttgttcatcatcggtccttctccgcttggtttccccagacggctgcatcgctccaggtttggcggctgcggagcgatgattctcctcctccattcctctcttcggcggtttagctgggttaggtgcaggggggttgattgttcgtccaagcaccgatcccagtcgcgacgcaggacgaggagcgcccgtctcgcggtgcgacgtttgggttcctgtcttctccgcgtatgtcggagcctaagccgtcagcactgattgaccattacagaaacaacaacttaccatttcaggttgctggctgccctgcctctccagcctccgagcgttttccagtctccgcttctcaattgcttgcatctgagccgccttcttgggatcctcaacctgtcgctcgcggcgctcagcttcagctcgactttgctgagctgcccgcttgcgctccatttcgcgtcgctgctcctcctttcgccgcgcctcccgctcctcttgctctcgcttcctttcgctggcaagctgtgctttacgctgcgtctggctggatacagagctcttgaagctgctgttcgatgaagccgtatgaagtgactggttgcttgctttcttcttcagcgacggcaccttcgatgctgatggaggtggcacgggaatgctcgactcggcactggaggcaacagacgaagccagaggcatctgtcgggaaagagcgctgccaactcgaactgacacgggttgaggttttggtttctgttgggattcacgtgttgctttcggcgggcgccggtcgtttggcctattcgcctgcgtagctttcggtgcaacgtctaccgccggttcgggttcccgtgatgatttttgctgcagcattctggatgggctcgagggcacagccggggctcgggcttcagattctgtgtgcgccctttcccgtgtagccttttgttgcgtcatccgtagcttctcctgctgccttgccttttcagcaagctcctcctcctgcttgcgctcctcgagttcttgttgccggcgcttctcctctcgttcggtggaactgcgggttcggcgtccttcctggcgcggagggctaaataccgacaatggtcgctggctggtcttatccgtgtctgctcgttgcaaaaaagtcctgggcctgtcaggcgaggaagtctccattcgggcagctgc

SEQ ID NO: 5666 - DNA, 2650 bp, Emericella nidulans
  unsure (1)..(2650): unsure at all n locations
aaaatcgtgagctacacagcctcatattgcacgaaagtcatgataaagcacagtagcttgaggggttgcaccaagccctaatgaatctatgcacgcatgcgatatatgcatattccccagcctttgctcagatatacatactagttgatcacgtccagatggcactcctttgaccggtaacagtgcatttgatggcatgaaagtttgttgatttggatgaatgcagcagaaagaccacattttgtacaagtcacgtggattgtctggaatccctgggttctgatccagggttcttgatgggtcgtggcctctttcttgaccaatcccaaggtagacctttaccataaataagttttaccgtaccttaccgggttctggccattccagactcaacaagcgattgttgatggctgaccttacagagtacgtagaactacggaatagtacttgcggtatacgcagtcaagcactgccagctggctgtgcaaaaaaggtgctaaaaactgactctccccgcagcttgctcagagaccgaaaagtgtaggcagaaataactgctttgacagagtattagtaccttaggctctcccggtgtacggatagtcgaatatcatgacggcggcgctctgagatatcgtgataggtacacctttagaccctgagtgataccgctggttatccaagagtttgatgagtgaatagttgtcagccggctcaggcggctgtgtccgctagtaataactactgacagataggcgggtcaggggggaactgaatgcagggtttcttagcttgagctttgaggacaacgtgttagttgtcggtcttgaagtcgaggaatttcaagagccccaacaactgggacgaggaaaataaggacctgtatgatcatttcatactaacattggaataagcaccttcaaagaaagtgaaagtggccgtagtaagcgacgaaaaagtagatctctagaggtcgatttgaacttacgcggttgtgtgaggaaaaagatacggtaaaataccttacaagagtttcagcgccggttgccagcgcccgcctccttacgcttggcgactgaccttccaccatccccgtccgtccccaaaatcagcagcctccttggtctacgacctggcctcaccaccatcttttcattccgattgatgatttggtcgccgcctcaaatcctcgacctccgcgttcaggatcaatctcgtccgcgttggtatcaacgcacgccctgcctaattcgtctctgttccgtcaactgaagcaaagctgcacagaaaggaggcttgcctccggccgctcgttcatctactttcgcatagaacccttcctcctctccgactctgtgcgtctgtctatagtcacgtcgttagtggtattgtcagtattattttgctagctcgctgccgactcggaccgccacgaaaccgtttgctcgcgtgcggctatttgacttggggcgaaatcttacgaagagttagccgtctgatctgaagcgtcctcaaatctgggctggtgcgctacactgttgatagagatctgacattgctctcgcgagtcgacgcagcgtgggcacccttgcacccatgggcgtcgttcaacgagttcgaaaatggttgccctcaacaccgagtcttccccttgatgactcgccgtacgaaaaaggccacaaatcctcgagatttgcatttttcaggcgcaggatacggttgaagggcaactcctctgtctcgatacccttggggttttgttttattatttccatgcattgtaatagttctcattttactacttttcgtccgacatccgtcatccccaggaggtatattaatacccgcgggcacaccgccgtctataaggttcgtgatatttctcaagaatttcggttcgtgcacctcacgtgtctaactatcccattttacaggaaaataagtgagaaatacgacaaagttttcgcgacgggctgtcagcccatcaacaccgatacaccccgagcgaacgcggctttcgtcgtgctcgcaagaaataaggaaatcgatggcgttatccagtcaatgaagtcgatcgagcgacacttcaaccgctggtaccgctacccttatgtttttctaaacgacgccgagttcgacgataacttcataaatactgtgaagaactatacaagtgcgcccgttgagtttgggaagatcgatgagacaatgtggggttaccctagttgggtcgaccacgaggttgctaaagaaggcatccggaaacaaggagatgccgcaatcatgtatggaggtatggagagctaccatcacatgtgccgcttctactctgggtaagccaccttcggacagcgcttgccgtcaaatactcatcctgcccaggttcttctacaagcacccgctcctcctgaagtacgagtggtattggcgtttggagcccgagatcaagtacttctgcgacatcacctagtaagggcttatgaatccttgcgctttactatgactcacatataaatagtgatcctttcctcaggatggncgaggccaataaaacgtacggattcaccattgctgtgaaggacttcgcgagaccgtgccgaatatttttttgtacggttagctttcaaacgaagacaatttagatcccagg

SEQ ID NO: 5667 - DNA, 4367 bp, Emericella nidulans
tttaggcaggcgggcgtcaagtggaatatggatcataactcgggcgacccgatcggtgttgggttggcgatcaactcggtccaccggggtgtccgtagcacggcgagcgatgtgattgatgacacgctggcgaagcgggcggataacctcgaggtccgcacaggaatgacggttcgaaaggtggttttcgacggcgacaaggctgtcggcgtccaggtgggagacgaagtttgtatgtatacccaaccgcgtccctgtttctccgggaccgggggccatggctagggctaacaaacgcagtctacgccagcaaagaggtcatcctctctggcggctctctcgacacgccgcgcattcttatgcactccggcattgggccggcagaccacctcaaagaattcggcatccccgtctttaaggacgtgccctgcatcggccaggggctgcgagaccaccccttcgtcccgatctgctacctccgcaacccgtccacaaacgaccgcaatgcgttctacggctcgcaagaagccatggacgccgcaatgaaacagtggctggtcgacggatccggaccttgggcacgccatggcgcccagctgatgatgggctggctgaagagcgatgcggtgaccaagtctgccgagtttgccgcgctaccaaaggacgtccagactttcttgaacagaccaacagtccctcactatgaggtctcggccgggttcccgctgcatatgctggcgccggaactgaccaaggactacagctatgtctgtcttcttgccttcctgatgaacgagcagagtgccggcgaggtccgactgcagtcgtccaaccctgaagttcccttgctctttaacgccaacttcatggcgcacccgtacgatcgtcgtgtctgcgtcgaggctgttcgggaagttttggctgtgacgaaccaccctgcctttgccaaagataccgtgaacatgatccttggccccaagtccgacagcgaagaagatattttagaccactggaggaacacgatcgtctcgtcctggcatatgacggggacggtcaagatgggcaagcggggcgagcaggacgcggcggtggacaagagcttcaggctcatgggagtggacggactgagagtggcggatatgagtgtcgtccccgtcctggcaaacaaccacacccaggccacggcgtacgttacgggctcgacggcggcggacgtgttaatcaaggagtatgggctggactcgaccgtgagcaggctatgagttttgatatgttgtactagataatccgttcataaaagaagttaggcaacgatgatcatgtcttattatacccattgcacagtaccggtttattcagcccaagtctagcctctcctacctaccccggcctgccaggtgtattgcaggcgggctggttcagatgtcgaatggtccacatgtatatagcgtataatgattggttacattggtgattagcaggattgcttgaagattagtccgggcctccatgagaaatctaggaatgtagtggctccgcgtgcggcgggtgttggttcagtcatcatagtccattcctgaattatcgtcacagtcgttcctaagcggcaatatccggaatgaacggttcttccatgagtgagatcggagttacattcggataagcaggaaagagtgtatgttttcaaggctggttgcctctcctgtcagcctggagctactcaacaggctccattgctatagagcgcttgtaatcctgcaggcggggttggccggttatctacggagtaccggtatgatatcctgacaagatacgatctcgctgctcgcccctgtctcaaagttcagcaatcaacggcagccaatctgcctgccctgccccgtacatgacgcaatcagctcgtctgcttatccttccgcgaaatccctttgctagccgcccaaacgtagatcttcatcagcgctgcgcatctcaatgcgctcctatagcacgtctgcaaccaggaattccttcgtcgcagctgaggacaatggtactgctcgcatatatgcatcaacactcaatgttgagccacttaccagcaagcggtaatgtcaatcatatactgcgcttccctgctgtctcctctccgcgcttgggggtatcagatactatggagaactagcgttagctgttaccccaggttcggtgtagtgggttcctcgagttccttaaccaaccttcagaccagactagcttagtaagaggcccctggagtaggtttcatcgccccacgtgacagatctgtaactgccaagaataaatgaaaatttttgattggtccagaaagccgagatcgccactaatttattagtcattcctcagatttgtatactattcagagcctcggcaggccgcgaacagcttggctattaggtaacaggtcgggagagagtggaactggcagcacacagagatttcatccagatccaaaactgaagctgaaaacccggggtaggccatgagtcacttgtcatttgtccctgccgctgttttgctgtcaccgccgtaactttctcttgcatcggaattggagtcgcgttccgagttctgcttataaagtacagatataccattgactgtgggcagtcagttgggtagggcctacgtacccatactgctactccagttcgcaaaccgttcattcgcaaacagcgagtcagtctcaagtgccggcgggtgttgaacaaagacagcatgttccagtcgatcgtcttccagtcccgcatttcatgactatgatccgggcgcaacggtgacggcagcaggacccaggctcaggatgaagagaagcacgaagataaacaggccctgccgcaagacgtctacggggatgagcagaatgcagagatcaagtacaaggtgctgagctggtggtatgtttctttttctcttcgtctctttcttatatgtcttgctttcttgattcttatgttcttttattttatcttattttttccttactttattttgattttgatttcattatttttctttccttgtcttctgctcagcttatacaatattacaatgcttcctctcagctactaactgattaccaggcaagctggattccgtgagttagacactctggggtgcctggagcagcgcgtttccagctgcttgagcggactggagtatactgatgaagcgcagtaatggtcgccgaaaccgtctcaatcgggatcctctctctacccagcgttgttgctgctttaggtcttgtcccgtaagtcatgcctgacccggttcctgtccgcgccattctcaccccgctagggctgtgatcctcctcgccgccatcggactcatgtccacctacacgggctacaccatgggccagttccggtggcgctacccgcacgtgcagagcatggccgatgctggtgaagtgttggccggttcgttcggccgtgaattcctcggcatgggccagctactgctgatcgtcttcatcatggcctctcacctgctgacgtttaccgtggcaatgaatacgattacggaccatggaacctgcaccgttgtctttggcgttgtgggactggtgatctcgtatgtgctgtgcttgccgaggacgagtgcaaaggtctcgtatctgtctgttgggtgtatgtctagtccagccgtcccgtcacgctctactacacttggtgagcttacatcatgtgctgacccggtgcagcgttcttgagcgtcctctctgccgtcctgatcgtcatgatcgcagtcggtatccagaagccctggaagggtgagctcgacgccgttgtcgacacgaatctttaccatgcgttcctgggagtgtgcaatatcgtcttctccttctgtaagtcgtgtcgacccctttgatctcctatggcctatcttctaaacatccttagccggccacgtcgctttcttcagcttcatttccgagctcaaagatccgcgcgaattccccaaatctctctttctcctacaaggcacagatacgatcttgtatatagtcagcgcggtcgtaatctacgtctacgccgggccggacgtgacttctccggcgctgggatccgccagtacggttgtcggaaaggtcgcgtacggggttgcgctgccgacggtgagtttctttggtttgcccactggcgctttgtctattggaggtgaagtgcgagatggctaaccgttcaacgcagatcatcatcggcggcgttgtcaacggccacgttgcaagcaagtacgtctacgtccgtgttttccgggggaccgatcggatccacaagaaggatatcattgctgtgggatcctgggtgggcatcacgcttggcttgtgggttgtcgctgggtga

SEQ ID NO: 5668 - DNA, 2729 bp, Emericella nidulans
gttttcttttggattaggcgcggtaaatgcactataatcaaacgccggtggaattggtgagcaacagagctatatatctagccgtggagtcttagattccgaacagtaactatagagagttcctagagttcacattcagttccttcatcaccaagggatcgatttaatgccatcttgcaatcaagccttgacatgaaatctcgggtaggcatgtctatctaattttcctgctgatgctcgtaaggtaggagagtgcacttacattctgtcagagaggtaggaacatatataactttccttctgtttcatagttcaggaaatagtactgaccatcagcttgattatccagctcgaaagctgctaactagctaggcagctagttctagttgcatatctaaacacgagagaaccccgagcatctacactagcctgagacgccacggcctgataaggcagctgtttttcatccctatatatacggagaaaatactccattagcgagctatacgggttaggctaagtcagagcagtgtcatggctctgcaggccgtgatttcgagttacgattgcaagcaccggcaaaccccattttcgatgtcagtctgctattaccatcctaagcagctataataatgacccagaatagactccaaggtgcatcctgagcatattcttggaatagacagcgcgctgttatccagcattattgttataccagcgtacaggataaactactgccatttctgactgccttcctataaagctaactttgcttttcaaaagcattctacgaacgatcccttcatgtacagagtcctcttctccatgcttagggttctgaaatgaggcgccaaaatggttgtttgatgttctgattggctgccgtctcaagcaggatattgccttacagtaatcttctcagcgttcttctgtgctactgaatagagtttgttcatttccaaatgatgtacaatagaaatgcagaacatatacttcaaaatgaatgtacaggaatcatgtcaaatcaagatgaacataaacgccacttgtcatatcatcataaccatgtattccggtgcccatcagcttaagccctatccctcgcagccttatatagccctctgatatcctccttccactgctccacatccgtcctctgcactcttcgatcatacgtgagtagcccgttgacttctccctcaacatcagtggtctgagtccagaccgctgcgctgcacgcaaactttgtaacctgctcagtcaactcagagagcagatagtgcgcgcggtagttccaagtatccaagtcctcgtcaatctcgtatgtttctgggatggtgttgattgccgcttgtacgttccacaggttctcgatcgagacattgtggccgatcccgccgaattcgccctgcatgccgattctttgcgggtcgtaggcgactgaaggggaggagtagaagggggtaccgcattgcgggttggcgtagtggtggttgtcctgattggtacattagcaggttactcgaaagaggtagaaacgaaagagtggaactgtgcacacatacactgtagtctccagcgccatggtcattccacccggaggttgagtctacgaggcgtgttgggtctaactccctgacgcgctcggtgagggcgatttccggcgctgtggtgagctggccccagccttcgttgtacacaacctgtttggttatactattaattgcgagttcaattgcaaacctgaagaaggcttgtcgagagaggatgaacataccccatgtatagatactaggataattcttgagctggttaatcaagagctcaagttggcgggcaaactcccacctgctgcgctgcgttaggagtgcgcaggggcatagagggcatgtcctggatgacgaggaggccgagttcatcgcaggcgcggtagaagagggctggctcgactttgatctgtcatcatgtcttattagagcctatccagacaaactccagcaaagggaaggaaagactcacatgcttccgcaccatgttgaatcccagatccttcagcaccttcagatcataaaccattgcttctcttgtgggtggtgtgtaaagtccatcaggccagaatccctggtcaagagtgccaaagaggaatttgaattccccattcacaagcggacggacgaccccattgacctcgcctttggagatggtgcgaaaacccgtgtagctggtgactgtgtcatctccaagggttacagtgatgttgtacaagttcggtgtatcaggagcccagagcttgacgttatcaactttgaatttgaactcggtgtttgcggatccggagtgtgtggcgactgtgtctgagccatcttcaatagtgactttcacatcactagtgctgtttgacgtgctatggacggtgacggtgacttaaaggaattaataccagtgagaaaatagagaaaattgggacttgagggtgcttaccctcgccgttcatatcagcattgacatctagcttggaaatgtgctcggccggggcagactcgagccagacgctttgccaaatgccactgcatggtctgtaaaagatgtgcgaggggttcagtgtctgcttgcccagggggaccatagtgccagacgtgtctgttgggtcgtagacaaaaaccagcctgactgtcgtcagtactaacaaccgaagaagatgtggagggacttacagttcattagacccc

SEQ ID NO: 5669 - DNA, 7252 bp, Emericella nidulans
cgccgaccggtgtgatccggactgaacatattattctccttaatgactttgatacgtacatatttggcatatccggcgcggcgggtccttttctatcttgacaaatggctaacctcatgactttacccctctattcattccttttttctttttccttctgtctttctatctccaggattacgggtttgctttacttttgggaatagatgattatgtggttgaatgaatgtacaatagcctgagatgatgaatctcgggtgaatctgatcattttctgatcatccgcaagaaacgtcaggtatattttcaagattaatttatctgcactttctagaacttcctaactcggaagctttgaggacaacgaatagtacagttaggcaatgcgagttgctgccttgaaatccaggcaaagacgatatcttgactaacttatccgcccgcgtcgtggatcatcatgattcatcttcaagtagttatatatataccccacctctgcttcttcttcttcaatgctgtgacttaagttatctatactattgtatccattgctacaccagaatgagtttaaagcaactgtcatcaatcctgcccctcgacgatgaatcattaacggaaatcctcaattataccgccactctctctaaagaagaaggcgcagaccacctcaaaaatcttctgggcgattctcccgccgcattcgaatttatctctgcattcaacgcaagacgagaagatcctacatccgcaagccctttcactttacgccagcaggaagcgtctcggctgttgccaccagagactccaagtccgagttcgaattccgggccaggaaggaagaataagaagacaaaaccaccgctgcatagtgcgggacctgtacggcggccagccgatttcggaaatgttgcagggggttataagaaggcggacatggagcaggattacatgaatgagaggaacggggtcacagcgttagatgttggacttggatcaagctcgagtttgagagtttcgtcgcaccaggggtccgcggcgtcgtcgcggggtcagtcgcctgcctctctgacaagaggaggaaaagccccgccctctgcagctgggccggttatatcggatcttctgccaaatgtgaagtccaaggcggcgaagcaatcgagggctggcggaggaagttcaggtcatggcacagtgacgccaaaaggctccggatccctaactacaaacaacatatctgatttaacggcagcaattgcggcgttagaggtctctacgaatccgacactaagtacagagcggaggaaatgtacatgctacgggatgctgcatcctgtctttgacgcggcgccaaactgcctaaattgcgggaagatcatctgttcgttggaagggttgcagccgtgctcattctgcggaacacccttgctctctaacgacgagattcagagtatgatccgtgatctgcgggccgagcgtggtcagtagaaaatgcgcgcgcacaattagagtcagccccgggagggcgggcctggcatggccgcaggcccatcacagtcgcaatctgcaagtaagctggaagcggcaaaagcacacagggataagcttctacagttccaagcacaaaacgcgaaacgtacgcgtgttgttgatgaggctgcggactttgagacgccctccgttgcgtcgaccctctggatgacgccgtcacagcgagcactggcgctaaaaaagcagcaacggattatgcgcgagatggaagagaaggcacggccggagtgggagaagaaaaagaccatcatgagcctggatatcaaaggcggtcgcgtcaggagggtgtaccaggcggcgccggctgagacttctgcgcccgtggaagacgaagaaactgaggacctcacctatgatgtcggtcgccagcggagcggcggcgaggcgttaagtcgaaatcctctacttgcagcaggtgggcttatgaggcccgtttggaaggcacctgagaacaaagagaagaagggcgagcctaaagagcggaaacagacgtggcggagggttcaggatgataaagatgataacgagcagtggatcttggatgggggtttgcatgggtacacggagtctccgctggagacgtagcgagaggtacacgaagaatagaatgcggcattgtttggactaggggccaggaactctttccttgaataagactagaagatatactgttatctctggaggatttggaattatatgcgactgagtgcggctcaaatgaactcttcgaagctggatcatccccggattttcgaccactccgcatctatcgcctcctcagctttcgcatagtccggatgatacaggagtatggctggccataattccacctgagcggaagatatgcctaaaaataagaggcaagcttcgtctcacaagtgctaatgtctcacattccaggcttacagcggagtatactgttcctgaggacacgtgaacacaatcaacacggaattttttagtactactatctaccccaagtccctagacagtgttgacattcacatatccattcaataccaactccattccgctcattaacttggtttatgttttctcaagtctttctttaattataaccggccaaatgaatccactgtcagcagaataacacacccagccaggactccaatttgccaatatcgttcgcgatcattatcaatatgccaccctaccacactctgctagtcataacagtccaaagtaccattctaaatgcgatatccaatgttctggcgcagatcatagaccagtataagaaagatgtatgtcaactcccctcctagacgcgttgtagatccacctccagcacccacccaacttggaaattaaggagtagtaatcagctctatagaaaccattcagcatgaatattatcgccctcctccaatttataacatacgggatcctcatcgtcccaatcaaccattactggcagaaatggcttgaggtatgtacaatccggtcgctttccgccaccacaccaacctactaataactcagtagatcacatttccgggcttccttttccaagcctcaccatcttccccaaaaggagaagtagccgcaggagcaagatcattttcccattccccagctctaagtaacggcactagccaaaccattgaagtgaaagagaaactcattccagcaccaccaaccaattggaaaccgtcaacgctatcaggcaggaaacgacgaatcttcaacttcagcatgaagttcctgctggatgggacggttggtgggatcattaatattgtcctcttcgtggccctgatcaacctgctcaagggggagagttgcggaagggtgtgggaacttgttttcgaggtatgtgtttttctcacttcaaaattcactggtcgagttcgcgatgatttgaataatgaatctgcaaggttggacagtaagtgctgacgcgagcaggacttcaaaccgatcatgattgctcgattaaaatatcggcctgtggtatccacgttaatgtacacagttgttccgctagataagagagtagtgtttgggagtgcggcgggggttatctggggtgtttatttgagtttatttgcagttgtctaacctacttatcaaatccatttcttttgttacagagttttagggttagcagccatcttcgaatggtttttggcagcgtacggtagtcagcaaggtatttattcgtagagctatagttgttttcgacggagtcaggtgtgacggcattcattgaggtagaagcgtgggatttgtgattcgtcgtagatgatagtcaaagggatattcacggatcaaaccatagtcataatgatacacttccatttctcatgatgcctgcctctttgctgggtgccggggatacgtaaggagcccagctactgcagaccaaatacaagaacacgtggaagcctcaggcggaggcgaagagctaagggagacaaacgggaggtaaagagtatgaacaagaaaaaggagaagtcatcaagatatgtcatcatcacagcgggggctttgtcccctctttgcttgcgacgagagcaataagagccgcgccaactccactgccgtcctttgagatacctatccgcacctttttgtctcccgcatcaccgacctcaggaacttcgcgcatggcttcacgcatatagccctcaaagttggggtagaactcaaccaggctgccgtcaacgccgatgtccaccagctcttccttcagcttgcccgtggaaatgagggtggcggcaataggaacagcagccaggcgggccgcacgtttgccgatagcatgaacaacggtttggactgccttgcagtcattttcgctcgcccgctcaaccttcaggtggtccttcagcgcggatttaacctgctcgaaatccttgctcttatctgcctcgacaatactcagaagactagtgtcaataccccattgtcggtagagggaagacgactctgggatgaagacatccgaccccgaagccggcttaaagagaccttgggacttgtgcaagtcgagcaagaccagacgcagaatctcgcccaagaacataccagagacgcgcttttcgaacatttgaatacccgggttgttgctgtcagcatccagctgccgatcgtattccgtagtgggcagaacgctcagatggttatcgaagctaccccattcagcattgatgatcatctcgccggttgacttgtcgtaatcagagtgctcaatcttggccatcttggtaatcttgttgagtttttcgacgtaggcaccgttcgtgcctgttccaaagatcgcaccgagaaaagttccagtctcgccaggagacgtgtatgaacgagccatgagcgtaccgacggtatcgtttacaagcgcagccacgcgcacagggaggttcagttcctctatggcattttgcaggagcgcacaaacatcctggcctacggcgtcgggaatgtcgaagcccttcgtccagcgaataagcgtacccttgttaattcccaactggcgcacaggaaagctaaatgtgaacccaagatcaaacaaatcctcctccctggctgttccggcaatcttgcgtttcaaatgagcctcaaaatgctcgttgtgatggatgcgcaggaaggactcgatctgacgcgcaagaaagaggaagagctcctttgctgatcctgacgtcatcatctcgcgaggaatcatgatcttggactgcgtgagggagaaggtatggttgccgtgcaagtcgatggagcagactcggaagttggtgcctccaaggtcaacggccaagtacaagccctattgcaacaatgtcagacccggcttcagactgctcacatagcggaatccgtaccttctcagtgccattgggcacagacgtcacgaaggtcgggatctgacttaaggttgtgccctcctcggacaatccctcctcaacctccctgatgtactccttcactccgcgctgcacttgctccggcgagtactcgaactggcgagcaatgcgcgtagcctcttctaccacagtggacatgatcgcggatgtaactagacgaccaaccgtcagataagcaaggtcaaatcaaagcggactttgcagcaattgtaggcattctggagtttactgggacttacctgaggatatcagaaagcgtcaaagcaggcggaaggaccttaagaagagaatatggactggagtaaggaggggaaatgtaggaggtcgttctggggaatgggagggaaacagcggagatggcagtaataaaaataagataagatgaggcgaacggacgattataataattcataaagaggtaaaatgaagcaaggccgagataatttcatcgacacggaggggtcgatgaggtcagtcgagtgggtaacagacctgcggacgactcgggttggcggggttccattcctttttgctcttccggacgcggcttttcatcgggatcaatccccgatgaaacatatattttgctcgggttctttcgtagctcatggaattcttcaagagctcgtgttccgagtcacttggaaatggcggcatgacaggcgaggtaggtggccaaagcgactccatcgcattccatctatgacgctacgagacacagtggggatggcgcgggcttttgcttcaccggtgagaaacaacggttaggattggggcagggaacggagaagcagacgaaaagaaggcatggatgcttctagcgggattcatctagttcgctatacagagtcgatttctacatagcccagggtgacatgacatgcagttggtgtcaggagagcgtaccgtaacctcaaggtgctatctcggcgcctggcatgatcaacaagtatgatcaatcttcttcgagactgatggtcacgcagcctcgctttgactataccgtctcaccatccggagactactccgtggtaccttgaactggcctagctggtcttggttcttggaacaccaggggacgcgtatcagttcgtctctgccacccccgtcattggaccccaccattgagaagagatagactttcaaatgcgaagaaaagaagaaaacatatatgagtattgggtcgtggccagccgaaaagatcttttgaagtgagtgaacttgatggccagtacgcgcacagtaaacaagcagcccatggacaaccgacggtaacctccgtatgaccgagcttctaacgtgagtggaagtcaaaggcaggtttgtttcaggatatttatatagggagctgcgaagtatagttattcaccattgtacactaggaaaatccaagaggacctcaaaaggctcttggaaatcgaagtcgaagttagtcccacaactccagcagatagtcaacttatgtaatccataacctcaggcacgtgacatgccggcggaaatcggctgcagtatcaacctctcagattccggttaacgacctcgaatagcttcaatccgctcattgcgaccaatcgcggcaccttcctagctgcctctagaggaaatatactggaatcccgttgagtgcccgagtatccaatacaacatcacatcatgggcgctggcagctcgaagcccgaggcttcggccgggtcaaaacacattttcgagaggtatgaatgcaacactacactgggattctattggagcaattgacttggttgagagaagtcaaggcacctccccatgtcagagcgcatcgtttgagcgcactatgg

SEQ ID NO: 5670 - DNA, 3964 bp, Emericella nidulans
ctgcctcagatgcggccctaaccggactggctcggttggaagtactgcagttcgcctgtaaccgtgcttttgtttcgatcatcgacgagactaatcagcatgtcattgccgaggcccccactttccatatttcttcagaacgctgagaaacatcaggcgggggatgagttatatctgggaacgagacggttggacttgggatggggtgtggtgccgcgcacaattggatttttcaccaagcggaatccggactttatcgagaacgagaatgtgattgcgaatgacacccgctatataatcaacgatctcaccaaggaagaagcctacaaacaccggccctacgttgcacaatggccgtttatgcggttctacgctgccgttcctatcaggagtccggcgggatacgtgctgggatcatactcaatcgtcgatgacaaagcgcggtcgaactttggcgaggtcgaggtggaatgcatgcaggatatagcagacgccatcgcgcagcacctggagactgttcggctatcgtattgccatcaacgcaccgagacgttggtcaagagccttaccacctttgtgaaggaacacgatgatttcgatcctaccgaatcctaccaagtgaccccatctcagtcaacaatcaatattcccgaaacaaccgaagggggtgaccgtgggatcccagatacccctggcgacagtgatcgtagcagcccagaggctgcggaaggcgatgtctttgaactcctcggtccatgttctccctctgacgggaccggtgaagcctcatcgctattctccaaagttctcggttccgaacagaccgaggtatcttttccgatcagaagtgccgaccgaccgacgtcagccttctctgcgaacgatgatcgaagggacagtgtaccccaaaatgctccagcggtcacggacactccaactagtgagactcagtcatggattaaagagactgtcaacaagaccgcgaagatatttaggcgagcgagtatccttcttcgggactcaatggacttggatggggttctttttgtcgatgcatcccgctgtaacgccggcgtgtgagtaactgcccaccatacatcattttcttttctaactcctgcggcagtgtgctaagcaatgataccggcacgtgggaaccgctgccctctactctgagcccggacttccttgccgatccttatccaagtccggcggacatgcccggtgtcggctcattatcgaaaccgtccgacaaaccatgtacactacttggtcgcgcattaagggattcggtacattctaccgagtcaccccacaactggaacatcaccgagagggtgctggacgacttgatggcttcattcccacagggtcagatattcgacttgagcgatttgccagcaagggaatcgtcgccgtcctccgatttgtgcaacaatttatgccatgacttggctaagtgctttcctaacgctaattcggttctgttttctccaatctgggactggaacaaatctaggtggttagcagggaccctggtatggacgagtgatgttgtccgcgctttgggcgctgaggaattacattatttcaaagcctttggcgattctataatctcagaggtggcccgagtagattggtcggcgactcaaaaatccaagtcggcattcatgtcatctgtcagtcacgagttgcgatcgccccttcatggtatacttgccagcgccgagcttctgggcacagcatcactacagccagaacagcagcatttggtggacatggtcgagtcgtgcggattaacgcttctagataccttaaatcatttgttagtgctcactcccacgatcaggtgcgactggtttcgtcttggacctgatgctaacaccaattctagactcgatttctcagggatcaacaatcttaccgcgctcgaggatccggctcagggtctgtccgatgctggcatgacatctctcgagactgacttcgacttgggcgacctggtcgaagaagtggtggaagtgcagtacactggccaaaaccttcctaaagctgccgttcatctcaaccatcgatcttccccgtcgccacaggatttcgatgctgataatgcagagttgtcagtcatcgtccgagtagaggacatgcccacctggaagatccactctgtgcctggagcctggcgaaggattgtgatgaacttactcggaaactctctcaaatggaccaaggctggatttgtcgaggtttctctgacgaaagtgagacgaaagcgcgaccctctgcatgtctttgcgctcctttctgtcacagataccggcgctgggatatctccagattttctacgacacaacgttttctcacccttcgcccaggagaatgcattgtcagaggggctaggcctggggcttagcaccgttcgtcagctcgtcggctctcttaatggccatctcaacgtgcgaagtgagcttggcgtcggcactcaagttgacatattcgtccccgtacagatactacagcctccaccaaccccccgcccagacctggcgcctcgttacaatccctctcagcggccacctgttcgcgtctgtttgatcgggttcagcgattatccttgcctcaaggagacgccaactgggattttgcctgccgaagcgaagcgtaagctggccattagaagctgtcttacatccatactggcggagcaacgatcttgggatattatctcatccgaatcgtttcacggcaccgaaggtgatatcgcaattattgaagaattcagatacctggatgcactgaagagcggcgaattgccgctaaatgatcctaaaccagccggtttcaggagaatattcgtgattcttaacagcaagaatcctacctctcgccatctggattcatcacgccttatccgtgtctcccagccgtgagttctcaacgcacttcgcgattattcatctaacaaagcccaggttcggttctagaaagttccgcaatgctgtcgtccgtgttgaccagctactgaaggaaccgccacccgaagtttcttccgaccaacatctccgcaagcctagccccgtgccggagcaggaaacgccgcggaagactccatctcctcctatgcaacaaatgcctgtgaacgcaccggtactcgagcattcaacagttgaactgactagccatggcactacggaccctgtgcgaatccatgagaatctccaccttttgattgtagatgataatgcgataaacctcaaagtatgctcgcacttcaacatcttatcaccatgttgggctcttactaataattgcactagatattagcaacgttcgctgccaaaataggttgcgcatttgagactgctactgatggactaatcgccctgaataaatacaaaaacacagctcagcgatatgatctcattttgatgggcacgatcaacgattttcttactgtccttacaaagctaatttcatcctagatatctccatgccggtcatggatggcattgttgcgacgaaggaaatccgccagtttgaggaggaaatgggtctcaagcggtcgcgcataatggctgtcactggagtggcgtcaacagacatgcagcagcgtgcccaagctgctggggttgacgagtatctcgtgaaaccagtgtcgctggttgctttgaagaaagttattgctgcgctttaggagcctttatacctcttttgggggtctcattgcttccatgcgtggttttggattggaactaatcgccacttgcaccacacccggactattacacaagagatttagcctgtgccggggcgccgtcaatgactacggacccccgatcatccgtttaatctggttgaatgaggaaaacagcgcagtgtggcttcttacgcaccgaataccggtggcccattagtctcgaatcacaggatccattcaatgctgacatattgcatgattgaacag

SEQ ID NO: 5671 - DNA, 8771 bp, Emericella nidulans
gcagggacattaagagaccaatggcccatatactactatagattctgggccaattcagcacaacaaaagagcaaacacagagtgtcgatgtaggtgtacaggaaagcaagtatcaaaagagctgtatcttctatatagtctactgaagtcagtggggagccatggctcaataaccacgaatctactgagtttcctgcctgccggaagcttcagtagggctggattccagagctggtcggtaatgtacttgtacttgttgatcccctaaggcagttgttaaagacatgcaatattatgtggtgaaggtcgaaatgctcaccttggccagtgcgtagagatacgggacaaagacaacctcgctctcacccgatcttgtctcatcttcagacatcccctgctcgacagctgccgttctattcttcctcttcccaatccagacatttcccataaacattgtagttaatatgctaatcccgattataggcaggatagcaatataggcccacatgatggcgtcccgacccgaggttctcaccttcgcctgtgcatcagctggaagagagttaatgaaagacaggctgcttgtccctccatgggcgaggtcctgtgcggagacgttcgaagaaccgtacccctggatggaagcaacgccctccgcaagtttattattgaaaacggaccccatgatcgtgattccgagtgtaccgccaaatggtaatgcaaagcgcagcaacgacagcgctgaggcaatacggtcgggccagacgccggaagcatggagggatgcaggcatgagccgtatgcctgttcctgcgcctgcgagaaccatcatcccgtttaggatattggatcgttcggtgcggatggcgtaaatcaatacccccagaccgatggtctccgcaaatgtgccgaggagcagtggtgggaatgtttgcgcgggataggtattgcaaagcaggattgctaggtagacaccggctggatagcttcttgttagggcgaggctgattggtgtcagtggcggcttggacaaattgaacgtacctcctaagccaggaatatagtagagcaactgtacaccagccttactagcggagtacgcctcgacgactgtaaagtaaatcccaacataataaaacacgctgtacatggcggccccagctgcaaactgtaggaccgtaagccagagagtatcgatttttttaaacatgctataggggagcatcggcttctgggctgggaatatgcgaccaaatactccattttcgagaaagtactcgtagacgaagaacatggcaaagcagatcccgccgacgaccaagggtgtcagaacttcagctgatacccaggggtatgttgagcctccccatgcagtgccgaggatgataagaccgacaccgaaaatgaacaggattgtcccgacgatgtcaattgttgccagcgcaggcaggaatgaggaaagacggctgcctcggcgaaaatgagtgccctgtttaaggttgtcgcggaggacgacgtagactattatgtgggagaggaaggcgatctagactgttagcacttgtgctagatcactggttgttggacttacaggaatggagattacgaagcaatagcgccagtttgcctgcatacttagcacatcttctcgtatatagtagacgaatactcacatcagtaagatacctagacaaagtcagccccatgaacctaagaaaccttagactagcaaactcaccctccaataaccggcccaactgcatacgcaacaccgctgacaaaagagaagatcgagttgttctttgcgttctcttccagcgtcacattatctgcaaggataatcatgactgtgctcatcaatcctgccgagcccacaccctgcaacgcacgacctagcaagagcatgccccaagtctgcgcggcagcacccagaacgctgccgacaagcatcaggaatgtcgctaattgtagagtgacgtgtcgtccaaagacatcagagagttggccgaatgatgggattagggcagtggatgtgagcgtgaaagccgtgacgatccaattaagctcggaaagttcgtctgttttgagaaaaatcagatgcattagcacttcattatgtatttcatccaacaagggacgtactaaaatgcgacgcgataaacggaacagcggtcgcaacaatagtcaggtcgatagtggctaaaaagtatggcatgaataatgcgcacacaagcttcagtcggtagacccggcgtctcctcttctcagcttcgacttcatgcgaaatgctcttttcataaagcgcggatgtgttgggtggggtaagactgttgctgtcatgctgatcatcgaatggacgaagagggatactatgggactggcgcttggccgcccttgatttcttgatatgtttatagaggagataaaataccatggtgatctgatggtgtgcgagtcgctgaggaagacattgccaacggggcctgtcacgcattatataacttttgcgtctctggcgacctagtctttcttgagaatacaattcgtaaaccccgatatctcgacatcaagattgaggctgagggtacgaggccactgaaagccaaaatgcacaagcaatgacccacaaacaagcaagcgaaattattggctggaatccgccacgccagatgctagcttacgaattgactgcttcattgggtttagattagtgcttgttacgattcagccccgaggcccattctctggggtgcgcatgctattcccagttcagtatgcgattcgacgcgctagcttagggatacgacgtgcttttttggttagttgggatgtcactaacgggctacagcgaaagactcaatgatgacaggggcatatacgatatacttgccaatctgccttgggttccctctgcgcgtagttatggcatagaaattcagatggtgtggcctgcctttgccgcagaaaaggatccacgctatcttcatgtatacgccattgattagtctgctctaaaccataaaagaacaacctctataatctcaaattgatacttcatatttcgagctgttacaagtgcatataagaccacagttacctagaaaatatcaagcatgacatctcttctatatctttagcctcatggcctttcgaaatgccggctcaagaggcgtccacatcagcgtagacattagaaaactcgtcatcggtataccatcagaatccgagtcaccttcttccaggaactatgactcgcgatagtcctggctagatacagtcaacaactggactatctttgcgagtggataaaatggcattcagtgagtccgcacgtttgagccagagaatggtaagtagtattcgaggtcggttttatgcgcctattcacaggattccaaggttgcatggttctggtacagtcgagaagaactaacaacctggagcctttcggtttctgtccagtgaggaacttgacaagttcagatctgaaacaacatcttgtctggagacaaagagtatggcagcgactagcggctcgagtatggaattaaagacaatgaaactaattaaatatcccacagaacaacagaagcctcaatttgtcccagtcaaatggtctctagatagtaatgtggtaagtgctattacgaagaaatgcttcaagaacaggctggccacctcatagttcgttctgttccatacaccacgaacgccaacagaccacccattaacctacacgagcacacagcaggttgcctgcatcaagatacaaagagcaattcaacttcttaaccatgtcttcaccaccctcccaggtcaaaacattccattcccgatccctcagaactcgttctcgccttcagctactgtcataagattctgggagcctatcggtcatttgacaagggaaatatgctcaatatacaaatgccgcatgacactcatgtctgtctgtctgccgtggcacagcctgtgcgttttccttcgcgtggctaacgaatggaagagtgtagttgctcattgagcccacgaaaatgagaacaataaacggcggcacagccctttttacagtattcctaggtgagggatcagacgaacactttgcaggctactttcaacttcaatccgaatttctacttgaactcgatgaatcttggcttccggacgactacactcctcaggcacacgagctcgccatccaacaaataccaacgaagcacatggtaggaaacaaatgggccgtgccgcctactcttgcttcgacaacgaagacatgaacaatacctccatcgctggacctttcgccaactctctgccactcttctacgtgtcttgggcgacggagaaggaaagctcaacaccagtgatgcgcaaaccgtgtttgtcgactcgttagacggcaagacacgccagaatatgacggggtcctggcatccgctgcatacgtccgagtatgtctggacgaaagtcgcattcccaaactcccttctccgatgtttagacgataacgtcgacatggcgtaccgaattgaatcccgccctgcgttcctcgaccaccaccttacagagtacgcaaactcccacccgccagcccttaaattgaaatacgactacacgacagggaaattcagagagaagcatattctccgcgaggctgtcaagcccttcgtcaccgaggaagtctataaccggacaaaataaccgtatctggggccagtgtgatattcggtcgagggcgcgatgcacaagaagctgaaggagttggtgacgaaggagaacgtcgagatgctggggtttttggattgggagaagactagcgagctggtcaacaaggcgattgaaggcggtgatctgctggcatttagggctgcaatcaccattgcccattatattgttttgggcaggaggttcggggttaagactgccgttctgcctaccatagcccattagtactcggcttagaatgtctgctctttccgattatcaaattgaagatgtggatgataacttcgacgtaggaaaatgcgagcattgagtagacgcatgggacaatctcccggctgactggggacccgggcaaagcactatacgcatccactatctactctgtagacgctctaagcagactccggtgctttccagaagagaggtgatatcggcgtgtgcattcaagatgaaaattgagtacggatatggcctggaggtccgtcccccccttagctaatacggagctgggcctccgaacgtaccataaataagcctctatatgaaacgcccatagccacaaacaagcacctggagaaaccccaccgcggattccgccatcagccatacacagactggatctgactcaagctcatctggacccaccgggacggtagacagagaccccctgaaacgggccacttcccagccctcatactcgatatctccgtcttgtgtttcagcttgtttcaacctcgacaggactcctgaacctctagtaataagtgttctgcctggcgtgggttgagataaaaaccgccgatcctttttcctaccactggactggcaaactcgaataaccaccagtctaccatacgtgagcttcaccacacaaccggccaagtaacacgccctccagccaacactgtcacaatgcgttgcaccatcccatctgcaagcccacgcaccaactccagtgcagctctcgcactcctctccctccttgcatgcgcaaccgcgcaatcaaccgtagggttcggacctgccttctccctcggtccgactcagtcatggatccgtgaggcaaataccacccttgttctccccaagacgcctggtctcaaagatcgtcttgcgctctggcctgggatgggcacaagcggcggcgatctgattcaggcgttggcagtttcgttctcagaccccaatgcgtacgttggtttcttccccttgcatgacagtccacactaataacaacgaatgcaggaactgcggtgccagtgaagggcagtggtgtacctgggccagtacgctgcagggtatgttggtacatattcatacctttttctcccttgataattccacttttactggccacaaacatacaaccgctaattcatatcaggcgaacaactcggcggaaccgatgtccctgccaacgagggcgacaagctcaccatgcactatgtttacaacgacagtacgggcgagtacgaccaaaccgtctacatcaacggggagtctgtgtctacattatcgacaagtacgttaccacaactataaccatagtgctagagatactgacatcgacaggctccggacaagctcagggctggggcacggccgtcgaatgtcaggacgacgcgtgtgagagcaccactgttgcggcgcatcgtaagctcttgttcccttccccatccttcatgcgcaatactaattctgcagaatacctcgacacgacaatcatccttgactcagaagacaccaccttcaaggacacccttgttctaaccgaggccgactctaccgagttcagttcaagcgacggtggcaagacctggactgtggagacaatcaatatccatgagcatacctacaacctgtaacctggagcagtaatagtttattgctaagctgtacatatgcacatttgtattctatcgtcatagaaacgagaactaagcgtgctggcgcgtttgcagatgtttgtgtttgagttggtgtagagcgctcattgtaaatgtaaatagaaagctatactcgtgacaccaccgccatctcggccgaattaggagatattgtatccaattctggcgagcttgtggagagtctcgttaaggaagagattgaagtcaggtttcgcacggtctatacacaaaatagctagtgaatgcggtactagtcgctagcactgtagccgtagacccataaagtataaaattagggctggcgggtggcgcaactcaaaaagtaatgcatcagtagccgtagcggagactgctctctcctgggagtgccgcgcagagctgagagtctaaagtaaatggcgtgggcgctggacaggttaaaaaggagcagctagaattacggccactcactgtgtgctcaaggtaaaaacggtatatagcccaaactaatagaagacagggtacggcatacatgcgagagctgaccgcatcattcccatcgcgaacaccgaatgcgtccaaacgtcgaactagagcgagagtaaagtcaactttaaatgggaaaacaaactctgctccgcgtggcttcttggtattttctactagaacatctgaagaacgacctcagccaagtacgacggagttcctcatcaccgtcctactgaccgaacagacccgagtgttttacggtgaccatgagtgtcaaagagcaacttttatgcagctgaccgcgccgaggaaagcagtctcatcgaacaaagaactacggcgcgggccggaggattggtaattttctggtgaggtatacatgcatggatcaaccatgatgatgccttttttgggctgggacaaacgcaagatgtctgtgatgcgcgctgcgctcacttgcggtggctggaaccccgaaagcgaggtgggcggtgctagggataagtggccactttcgaagtaaatataggaaggagcgactggcacatctctcgctttacttcattaaaccgttcagtactgttttgagtcgtgggatcagatcgccgtatccttactcgctcatgcggtgcatcctgcttttgtcagttcttgccgcgtacgctgctgcgcaaatcaagatatgtccgcttgggggacctatctttccggctgcgcagaggccaggcgaaagtgcggctatgaagcaggctactcacaacttcacagagtcactgcacgaaatcctgtaccctgcaaatgcctctttgcctacggccatagaccaagacctgacctcgttcgcggttcaagtttacagtgcgcgagactcaaaaccactgcttgaatattaccacacagcaacatcggcgcgaaacaatattcttggggttaaccgcattgatggagatactgtgtttcgaatcggcagttgttcgaagatatggacagttctgctgcttctgatggaaactggcgaggcattgctccatgagccggtgcggaagtatttcccagaggtggaacacgctatcgaagtgctagacagtggtctgaacgaaatcgatcatgtccactgggaagatgtgaccattggagatcttgtcagccatacggccgggttggagagatcatgtcagtagcaaagtagtgatttgagcctgacatgtcagctgatgattgtaacagatggtctcggtgatcacgctgcgactactgctcttatggagcaactcggattcccatccttgcagcagaaggaagtcctggagtgcggtcatgagccatcgtgtgatagagaacgtaggtaggaggtctccagtaaagacggctgtccgttctaaggcggatctagaattcttcagggggatgatgagcagacatccagttgtgcctgtctcgtcaatgccgatatactccaacgatgggtttgtggtgctggggtacctactcgaaatgttgtcgggccacagctacgaaaaactccttgaggagcgcttaatcgaacgctctcaatgtgacgcggtcttcatccaacaaacccacgaacgatcaggaaataataccagggctcccaaacatatccgtctaggatactgacctaggagacagttttctccaagaatgttggaa

SEQ ID NO: 5672 - DNA, 6420 bp, Emericella nidulans
  unsure (1)..(6420): unsure at all n locations
atataggttaaagggacctcgaagtaaggaacatacattgacacgatgcttgatctcgaacgaagcatatgaaatcagcataagcacatcgataccttcgaaggctttttccagagtcgaagaaacgtcatagtctgcgcggcgtactgcagccccagcgctgaactctttcgcgagcgactccggcttgcgagcgatcaggacgagttgagatgctgggacgagagtctgcaggtgcttggtgatgctggatccgaggccaccggcagcagggaagactccaatacgtgacattgtggctggtgaagcagagatgaagtgatgggtacagtgattggtggcggcgttagtttggcggctgacgttggcttttagcagggaagccattccagtgggacgctcgctgcttagaaatcgtctgcataagccccgctatggcaagagctagctgaatgtggctaatcagggaattaggggcaagcgggttgaaaaccaattagaaccaggcttggcgtcactgtcctgaacacagtccacagctgactcgactcgaccaagttagggttctcgaggtatatattttcggaatatatattaaggtatatatttgcctgccaccaagacagcgtattgaatgcctcgcatgcgcagagcagctactgtgtgcattttacgactctcagatgatctgtagccagtcaagggattccagcgcttgtggtggcattagatactctgtagatagaacatctctaaccgaaccggctaccagtgcactcggtcactcggagggcagtgtgcagctaacatcgacgcgagataaaagaaagctagtgttgtgcctataagagcggtaagtgtggctgctaaagaggagatgaaagtgctgtgatgtaaaccaaggaattcattctagcctgtcgcttgcttgatggatcacagaaaagcacaagacttcctacaagaacaactacaccaattattactcatttagaggctcatacaacgccccaagacactcaaagtgctgacagcgcacatatagccccacaagtcttgttccagctggcggcgcatacacgtcgtcgcttacacgcttcctagtgaaagtctcagccgacaatgtattcttacaccatgtactcctccggtctcttatttcatggtcgtcgcagtgctcgtccgtacccggctgatcatctcgttggaaacaaactgtcttgaactcagtaggagcgtcagatgtaggctgctcatcggattccggtttgcgcttagtcttgagctcgaactgcaagtgggtgagatttggtgttaataatggtggagtttaagttaggttatagatgaagaagctgtccgggataaatttcgaactgaaaagagaaaatacctgtaaagcaaggatattacgtctcctgaccctcgccgacatgccagcgaactcggaggctggagaaaaacgcaccggctgactagaatcgggaacgactacaacgtcacctatcgatgccccggcaccagacgagtaagcaaacataagaccaagaattgcatcccgctaagaacaagcctcagccgagacaagccaatcgggcgagcggccagttatggcgttttcaaaataaagcttttgcacgtcgtcaaagggtggatactgttcgggcagcagcagggaagtatgcttaaggctttcgtccgaattaacagcccggattctgtcgtgggacgcgttaagaatccatgagattgcggtctgtttgcctgtcagatgacatcactatgggaaggaatcaactgacaagttcttgcctgggtccaccaccaaaaccattatgaagatgctgcactgatagaggatcagatcctggcggtttgaacgtcacgccctgagccaaagtggttccaaagcgcacagcggcaatccagccttgctgtaggaagcgatagctcgtggtcagtcgtgcgggcgttacccatatatccagagagtggacatgctcgaatggctgaagctgcaacgactcgaactcatccaaccattgccccactacagctgatgtgccattgtagtagtcgaacttcaagccagagatacaagtacatggtcgagaaccccaggcgttcctctggatgcagaaatcttgcgcactcccagcaaggtagcgtgagtctgataattgctgtcgcttggggtgccgatgtaaatggaaaacttgttatcttgctgcaattgggcgtcgggattatagagctctttgagcattatggccgaggcttgcaaaggcccgagggatggttgacattggatgccaagccctaagaaggcctctcgcggcggctgggcaattagttatggtatattgttgggaggcaaaacgtaccacttggatggcgatgaaacccgtgatatcgtgtcctggctttgttttcttcagctcttgaatggccaccttcgcatccaggcggctctccatcgtggacaaggtagcggtgcgacctcggttggttgacatctgagcggattcagcatcccgcacactgaagcacaattacagcatacctggagtccacagaggcttgagcttttgccacactgaagctcatcattatgagagttttcgtccacccggtgaaggatggcaatcttggttaaacgctcaccgtgcggaccgtctatgcagaaggaaagttcggccccgttttcagacccaaagagacgagacatcccattagcatagacagccttgactccgcgcatcggattcggaccagagcccatgcaaaagatgagtcttgtcagctccgccaaaccttgaccttgcggagcgccaaagtcgatactaattaggggtgcaaagggcagcgtgctctacgccgacataagcgtgctaaaatcgacaccctcacggtgcggtacagccggcagccaaagatgagagtgtacgcgtgggactggcggtgagggttccgaattgactacagccactccaagcgcgactatcttgaatgactgaagggactgtcaatattggaatcagaagaacgaacaggacttacatctaaaccagctaccaggtagcaggggtgagtctcggctatgcttagatttccgagtgcgatttccggcccgtggctttgtccgatccacggggacgactctgagttcgagaaagtaaaacttatgccagctaatccctgactgctgaatgcaacaaggatggtcctgatattcgtctgatctggggaatagatcgttgtctcgtttgtggagtgacgataaccgatcagactggccatgtccttattcgcaaaccgtacgccggatataaagcatctttcgccaacttggatggttgagactatgatctgttggcgagacctgtcggctattggaataggctcgcttcggtagtgtaatatccgacatccaacctgaagcgtctcgtgggcttgtctagcagtgctgtgaccagaaaagaagctataaactctaagcagcgaattctctttgccggtaggcacaaagcagtcgtcgctgccaggttcgggccagacgggcaagccgtgcagcggcggctgggctacatataattcaacgagcgcggcaatatgctcgatgagttcgcgtatcctcttgcggttgacgattggcggacttttcgagttcaagagtgccctcgtcccgagatacaaacgcggccaatgccgcttttctaagagtgacaagaacatgaaatcggcctcctggccgagaaggaaccgactccgccagtaagactgcgggagattgcaaggctgtgttatatctgcaagctctctacacacaactcgcagcatacatacatctctataggataggtacgccaatatctcgtgtttgagctctgtagaaagtgagccgaaaactcgaggctcataaatgccgagtttaaaatgggagacagcttccatcgatccggaattttccaactcgtccagtgatggaattgcgcaagggtccatatacagaaccggttcatggccaatctcgacttgaccatgcgttttatgagttctcacggcgccgctgtaatcatggccaaagtcgaaaacggatccttcgcgacatggggtgttgtagaggacatcaaagaccgaccgggcaatctccttctcagacagaggacaaagtctcaaatagagtagctgccagcaggcgttgtggaatccccagctgactggagacctgccaaagatgctgacgggatacagcacctctgtgtccacatatgaccgctcgctgtcggctggggcaatgaggacgccaccactgtggagggtcccaattccggttagggtgatgttctcagctgaagagtttggcgacacgattccccggatttcagcgtaccatgggcgacgatgtcgggggatagactcgggccccgatatactactatggggatcctgggctagtatgaccccgcagaatgggcagaagacgttgggagacatctcgaagtggggacatagccataggtaggggcgcaggaaggtaaatggattctgaggtccatggaagagagatgccacacgcacagagagagaggcagaaagggtgcgacaacattaaggcaagagaagcggggaagtcacgttgtcccttgcagatgcggggaagctgccccttctctatccagcttcaacggctcgccccatccgtaacccatctgtacctcgaaagatccatggaaacctcagcagccagtacgttgaataatggcctactactaccaaccagcgacagacccgattggtcgttgagttgtacattcaacttttctcataatccaccggtgctaacagcgactttcctctgaccaatatctctataggctgcatctctctctctcttctctgcattaacttttttttattaatttatcattttctttcattctttccttgattctttcgttctttcgttctttcttttttaagcgtacatcttcaacggaaccgaaggtcaatctcctgcaacagcgagtgttctaccgcaaagacgccataaaaaaaaagcagtctttaaaatgaaaaattacagaagcccaagaaccgagagcctattatcagggtgttgcagatgggtctgttcggaatgaaggctggtggtctttcacgagggcgcaattgacctagcgtggctgctcgcagattgttcactaatgcgagagtatccaggagaacgggagactaggagaactggcggcagtgagctgccattaagatgaactagcagtttctgaagaataagcatgcagttatccaatgctaagctcacacgaatcaaagtccattcctccccatcttaaacaacgccggagccttcaacaccngtttatcatcccaactcttgccaataacctgcattccaatcggcagcttcttaccgtcactaccaccaagcccgcaaggcacattcatggccggatgccccgtgacgttgaacggacaagtgttatagctcaaccccactgccgccgtcactctctccccaatatctccccattcggtgcccccctttgtgcttgatgggaattcaaaagcgacggtcggaacagtcggcgttataaggacatcaacatcggacaggacagcgtcatatgcagcgcggagctcgaagaccttccggtggcccttaaattccacacttgttccaaatgtctcgcgcaggtagtccgtgctaaagatgagattcatgatcgtcggattcccagcgctaaggtaatcatacatctcctgggttggcggccactgcgtatcgatatgatcgggggcgtacgagaggtagccgggcggcttcatggcgaggccgtaatcagctagcgaagttcgtgccgcgacggtccagattgcaggggcttcgcggtgcatggggacagatacttcgaggatgtctgcgcctgcggctgagaagtatgcttttgcgttttgcaggacggtgtcacgcacttcagcggagaggccggggaagtcaaaggcctcccggagtacacccaccttcatcaccggcttttgtaatgtagtactctttgcactcttgatgaagtcggcgaccaaggatgggtagtcttttacttgtcctggcattggcgactccggtgtcatacgtgaatcgagcccgtcgtatccagccataactttcagcatgagtgctatatcttcgatcttggtggccattggccccaagtggtcaatcatgggtgttaaggagacagctccagtgtatggaacaagaccatgcgttggcttgagcccatagacccctgtgtacgcagccggaacacggattgatcctccaagaaacgcctccaactgcgagctcaacggtaggggatccttgatggggtccggtgatggctgaacctaactctttca

SEQ ID NO: 5673 - DNA, 6684 bp, Emericella nidulans
acacttttattctgtctccatcagtatcacaatccgacctccgcctacacagtcaggggatcttttcatcatactcaccaggatataccatgctttcggtcccgatgtcgaccttggaagttcctgaaagtgaattctccgtcattgataagttcgatgctgacctcggagagtggcgatccgcatggctaccgcgcttaggtatgtagctcattctccttattgtccccttgtcgtgatgaaataatcctttttttttactgatcctctgctggcacagctggaagccggtacgtcggcgcatatccttataaagctgtctacctgcattataatttctgccgattacagttgaattctgttgccttgcgaacttaccattcctcgaattcaacgcgtcccatgtcagttgaacggaagaagcgcgcaaacctagccattgaatctgcgattgggacgctcatggttgttctagatgaacctgacattcaacgggctttggtcggtgtcccgttgtatcttcacagcatgatcacatttgccgcagtcttcctactgaagattgctgccaagggatgttccagtgccgtccctggtagccaaaaccaacagaactcgattgcgtcggctggccttcacatcgacgtttcgtacgttcgtgcactagtcggccgaattatcgacctgatggtgtcctgcagcaagcgcgctagtgagcgccatctcagtcaccatatatcgcgtggcttgaagaaaatgcttacaggacttgaggagtgggagaagagaggctgtggcaatcaacaaccttctaagcaaggctctcatgacagtatttcaatgttcaagcccgtgttaatccctggggctcaaaccctaggcgagcgcgatacaatcttgaatcatccaccaccccttttaggggttgctcccttatccgcagagagaggaaacggcgttgaactgggattggaacagcaaaacggactctctgagggctctattgatcctatgatggctgatctatgggggttcgatgaagagtactttcccactggggtcttcgatttccttcagtcccagatgccggcatgacggtgttacagcatatgatatcggtggaatatcattggataaagcaagacggaaataaagaactatctgcactcttctaccgcggtccacaactgtcgcattgctaatcccataatgctgcgtcaacataagactgcactccacgattccgctccgctgattagaggctcagccgaacagcggttctagggttccgcgaaccagatagttcacataactgcctcacgccaaaggcttaataatgttaggagtcgagttggggcactttattgaaggtcgcctgactgcattccaaagagcacacagggaacgtggtttgctcttggacgagtacaacagatagatggcttattgtgtacatagaattaaaatccacaaggatatcagaatagaggaatcatttgacattaaatgattttatgtacggagatgtagaacggaaacgctttccgttcacttaagtcagtcaagccaaattaccggcttcccggttattcgaccgtacctccgctcggatccctaaagcagcccgcgggtactgctaagtccacacaagacaatccgcgggattcggcttggttgaagtatatagtcggcttgaagatgaatctgcattgattccagaccctggtcaatcggtcttcattcgacatattcaccctttcaggctctatccgttgaccatacagagaagctctcccgagcggattcaaagttgccgaggtttgcctctcaagacttccccacgcagcactctccttgaaccttttcttgcgccaatcttgtagggtcttctgacagtgttgtagcccaattgtctttacaaagaccagtgttttcattcgaacccccacgatgaacccttcttccttttttcgtacggcctcgcgctccgcaggtcgactgagcaagatccccgcagcttcgcgcggctatgctacagcgtttaagtgggaggaccccctccttgcgtctgagctctacacggaggatgagctggctattcaggagacagcaaggcaatactgtcaggaacggttacaaccacgggttcttggtaagtggtccgctgcaagtcatgcggcatttcataatctggcagtcgcccgatccccacagaagctccttgctgactccttgattgtcactagacgcctatcgaaacgaaaactatgaccgaaagattcttgaggagatgggtgagcttggccttttgggtgctagcattgaggggtatggttgtgcaggagtgagcacggttgcgtctgggttgatcacgaaggaagttgagcgcgtggactcgggatacagatcgggaatgtctgtgcagagctctttggccatgaccgcgattcatgagtccggtactcaggagctcaaggatagacttgtcccagagttggcgaagggcaagctagcaggctgctttggtctgactgagcccaaccacggttctgacccagggtcaatggaaactattgcgcgtgaacaccctaccaagaagggtgtttatctgctctccggcagcaagacctggatcaccaactcgcctatctctgacattttgattgtttgggccaagttacaaagcactggcaagatccggggattcgtagtggaacgcagcaagtgtcctccaggaacgctagagacacctgccctcaagaacaagtcagcgctccgtgcatccattactggcatgatccagctggatgattgccccgtgcccgtggagaacatgttccctgatgtcgagggactcaccggaccttttacctgccttaacagtgctcgtctgggtattgcctttggggccatgggtgccctggaggattgcatcgaccgtgctcggacctatgccttggagaggaagcagttcaaggggaaccctctggccaagtaccagctgattcagaagaagctggcagatgcagtcacagacgctacatacggcaccttggccgcaacccaggttgccagactgaaggacgctgggaaatgcactcccgaaatgatttcattagtcaagaggcaaaactgtgaccgggcgctggctaactctagaacgtgggtgtttccaagatcctaccagccgcggcagtcttctatgatccaaaaaatgagctaacccgctttcttaaacagactgcaggaagttttcggtggaaatgctgcaagcgacgagtaccatattgctcgccatgtggcgaacttatttgtggtacaaacatacgaaggacagagcgatattcatggtaagtgcttttctacttttgactgttcaacaatactgatctcaaattagccttaatccttggtcgcgctattactggggtgcaggcgtttgtgtagtttaggatacaggttagcaatctttgaatagttgtttatattcacgtctgtagtatcggtacctagtagcacccttatttgtacatagcacgttaacggcatggacctcatctgcttcgtggtatagcgacagaatcatataatatgcgccactagtagtaaaagtacattatgcagtatatggagtatcagggtgagccgaacggtaggacaaggcttttgagtaggactagaggcagccttctgtatgaataccatagttgcaagtatttcgtagctgcgtaatatagaatatatatatattgtgtgaaccagtgtcgggcgttcggtgtcagcctcagtagtccttggcattgccttacagccaatgaaattataggcactgaatatgtattttaaactgacacagacttctccgagaaccagtcggcaactgtcgggtggcaatgtaatggcaacggctcagtcgaacgggacataattgcacacaaatccagtagcctaagttatagcagctagtgatcttataccgcagctctgcttatcccatgtcgtgttgggcgggtagtatactgagtagtttccctaccaaggctacgggccaggcggggtgtggcgtatgtggctggtgtatcttacagtacccaaaccgtacacggtgcccaatggtccccattctgtccccgtcacctgaatgatgacggttactgtatcctttagtgtaattttggtaatcagtcccgccttcccgcttcctctcctttcagtcttcttctctttctctctttcccctcctccagcctcccgacgtaatcctcatcctgtgagtataccaccacctactttgtccttcctctattttacgtcctgtctatctttcttcgctcttctaggtgtttcattcatcttttcctttttttctattcgtcgtctttttaccgtcgctgactgggctcgtgactgcagatatcctctcaacttcggtaacaccgctcatttttcaaccgtcgatcggctgatataagtcttttcttttctttttctttttctaccacctcagattttttaaaatggctctcaagagaattaacaaggaactcactgatctcggccggtaagctattatatctcattctgattgtcccaccccaccataccgcgggggcgccaatatgccccgccgaaaagaatgccattttacaacaaaagccgtttggcggctcctgtattacgtcttgatgctaatatgcgccttcaaatttagtgatcctccatcctcttgctccgccggccccgctggagaagacctggtatgacttgcaatgactgctcttttcgccgatcgccaactgcggcggatcagttcctacgatgttattgatagactaacattatatttaaacgggcagttccattggcaagcaacgatcatgggtcctgtaagtcaccacttcacttttgaacgatggcgttgtagggcctgtgtgctttccgagcgaggaattcgcgggccttgcaactttctcttcatggctagccgctgacggattgtcttcacagggtgactccccatactcgggcggcgtgtttttcctaacaattcacttccctaccgactatcccttcaagccaccaaaggtcaacttcaacactcggatctaccatccgaacatcaactccaacggcagtatctgccttgacattctccgagaccagtggagtccagccttgacaatctccaaaggtccgtcatcgaaactttgttccactaaatttgtcgaccaacactaaatgcttcgcagtgctgctctcgatatgctccatgctcacagatcccaacccggatgaccctctggtgcctgagattgctcatgtgtacaagactgaccgtccccgatatgaagccaccgcacgtgaatggactcgcaaatacgccatctgatctccgcctatcaagctccacggccaccttggtcttctcaagctctctgcgtctccattcgctttgtgacaatatactggaagcctggcgtaccgtgatcgtagatctcttcgttgttttcctgcaaaccatttgcgtgtgcttcaactttattcctagttgtttcgggcttcttttggcgggaaatgtcatattcaatgatcattacgattaactctctgcattcatggcattttgtttcactgaatggagtcagacaatgttttgtgattcacaatctaacccaagcaggccatattctttgggtcggggtcgcaagagtcgttggtgcagttgtgcaggcttacccgcaagtaggctggacattgggcaggggtgctcgagcaaggcaaatgtaccagatagctagtagttaggcacttatggcacaactctttcgacttctgatcagttgtataaaaaccacttggattttgcgactattctcaatgcaaggctgtggcataaaatgcttgctctagcacagcgtcgtgggtgaatttcgattaagagaattgtcaaaccagacattgatgggggatgctcgaatgcctgaactatgattattgctacatatatttcgtctatataatgcaacacatgcttgccgaaacgaaaagtcaagacgcatcttagtaaacggaagtaacaaatgcgttctgacatgcaatatgcagagtagaaagtttctatgttctgggacaacagctgtataggcaagtgagcttgaaaataacagtgattataagtatggaagtgaaaagagggcaaaatcaggcgaaaataatgatgctagacggagaaatccgggcaaagggcgatctacgcaacctgacttgctctccgactggagctgatctttgaaccagcaattgaaccgccgcctgcaacactcccgctggccttgacggtgcgtctggaagcatgacttgatacctggctgacgctgtcactcggtctgacgggttcatcgaatttgctggaccgtttagagacatgcgacttatgagagtgatgagatcggtgtgaatacgaggagcgcctagatgagtcgccaacctggctaatcgagtcgtcaggcgtgacatgggtttcgacatccacgtcatcgtaggcgggcgtagatttagtggcgctgcggtaagatgaatacgagaccgtagagccttcagggagaggaatttggcgggctgttcgtgttgaggaagccgtgcttccaggtatagggactttgagaacgagagtggtgggagctt

SEQ ID NO: 5674 - DNA, 6675 bp, Emericella nidulans
gatgggttgggtatgagtcacccatcatgtgacttactgtgttagataaaagaacgatgcttctgctcttatccatatccgtcactaggtcgctgttttgggtgttggagagacctatgcagcggcagcagctgtcgtatgttcgtcatctttgtcatttttgatactggcactgattgacgacttctggcggactctgatgctagatctgttcgtgatgcaaattcaccttcacgtgacgttgtcagtgaagaaatcgagtagcttaagacagaggcactttttcgttgtgagtgtttgatgggttgcttctaaaggccttccgttgatcaatggcgggtttaggttcgaggatttgaggaggtgcgaagtagcgggttgaaaagaatagctataatggcgtttgttaggagcatgaaaaagggcaaaagccatatggagagatgattatacgggcgacagatgatttgctgaaaaagctagccaacctggaccgaaacaatcctgtagctagacaaaggccgcttatacgtggtacacccgacgccaaccctaattccagctcagctcggtggctgtgcttattgcggaagcaagtgaactatacttcaaaaagcaagtcgcaccaagttgtgcatcatcaggcaacatttggtgctagcgtgatatgtccccatttaattggcatcaactttgtgtacccatgtgcatggagccctaagtgcccgttctggtgctaacgctgttgcagcctctggctttaagctgaggttattttcacattctcctttccaatcctaactctgcgctgcaccaagtagccgtaaaggggacagtatcgctgaatattgttctgatatccacagtgtcaaccgtaccaaacccatacaatatttcgaatactacacgattgatatgccaggtggatggtcgataccgcctgcacaaatcacggatgatacagtcggccagaaccactcgtcaaatgctgcatgagttgagcttattcgcaccgcactgccattgagggggagatagcttccggcgagagaaagaaagtcgaatctgtcctgtgtcgctggacaggcgggcgttgattaagcatgtcctaattgttcaacccatcttcgcaagtttcattgcgttatagacagaagttccgtacgcaactatgattatcgccatgcagaattgacatcatccgctcaaatctttagcggtatgcctccctttctactcgaatccagtaccaccgtcgtcgaagacaatttgttaggaagaaagactcggctcttgaagtaattccctatctttctctagttcttttctttcttttctttctttctttctttctcttttctaatacatctatagcctcataggcgtgaggaccaagtcttcgcgtacagaacaataatagccagcccaccgaacatgtagaacaaaattagaaaaaagacaagaataagtaccgataatttgagccggtagaaccctaaaccgaggccgaagctgatccgagcaccttgctgaaatacactgacaaaatgttgtgaggggagagaggtgatggttggaaaagagaaacaggaagccataacgatgatcaaaatgagatggtagaacaattgcaagactggtataagagctttgactaggataatgaatgcgaaagaatagaggactcgtcatgaaagacgactagcacgttgatgtgttgaggagctttttttttcttaggtgaagggcctgagattcgctattgacggtcgagtcagtaaaagccgcccattttggcgttgtgtgagctgccatcagtgtgtctatgtactgtcgttgatgagataataagcatggtgagagacgggtgagcaggagctggggtggtgactctgttctgccctaggggtctgaaatatcccactcattttgggcctctttggaaggccgatggatggaatcattcgacaccggaataacagggtatccaaaaaggttctcaggggctgcttccactcgcgcaatcgcgtaatagccgaatgcgtcggtgtctttggcgggcgggtcgagatatgggttgtcccatgaggcctgcgccgtgaagggtgtaattcttgaagtcgaggctgcggggggtttgttagccccagaggctcgctgtaagacttgatacccatatccagcgacggggttgggatcaggttgaatggcttgaacagtgcgctcgtttgtggcttcatattcattcgtagcggcgcttctctcttgctctccgcaaccgaacatcttggtttggcctcttttctcccgacccccttgatccaggcgttgtcttctagtgtttcccagggcttgagccctctcataggtggttgtttgaaagcctgatctgcatctggtgttggtttggaactgaccaggatggagagagttatagaactgcatcttctcgagggtcgggtcaatcgggatgctgtagtgagacgacattgcgctgttcggctgagccattattgagcgctcggttgcttgattggttgtcgcctggacctggctaatcgcgtctgccatttcaatgttaatttcatgctgaactgctacctccatccggctttgcggaggccgttgatctgtttgttgctgtgcgttctgtggtagatgctctgtttgttgctcgagttcattctgtagttgctcttccacctgttgttctagctgtttatcaggccgtgtctctgccatcgatgctgtagcccgcgactgtgttcgggaccttccccgagtgtatcgttttgattccttcatgtgcctggttcgctggtgatagtcagccatcatttgtttctgccgggccttctgccattctatgctgtaaactctcttttcgcgcgttccaggcagttgctcgtttccagtcctctggcgccgctcctcttgccgcatattatatctgaccctcttctcttccacttcagcctttgttgcaagtcgtctttgacgttcttccggcgtctcaccggtgggttcctggtagcaaggttagcggtgcaaaattcccctcgagtgaatgttgaaggacgtacctcatctccttcagggaaggggtccggtagaggccatggccagtctatttcgtgcaaattgtacttttcgtagatcctgtccggcacctggtatgccctatcgaagggaaggcagggctcagctttcggttgatcaggatccggtcgttcgagactccttcccctgaggtaaactagctctccagccctgggcggaggcggcaggggtacgtcttcccagttgcagaagagcttatgagggtcatcagtccgcttcttaatgatgttgaaattgatgtcatagccatggttgatccaccgttgtccggtaaactgtcttctggtgaaaggatgctttctctccgtcatggtgcatggctgaaaagccttgacgcagtttatgcacgcattgatttggtcagttctgcatgctctacccataaactagaacaagggtatattagaggattacggaacatatagaatagagtgaggaaccgacttacaaaacaccgatcgcacgtaggcactcccatatccattaggcctggcttgttactgaattccgaagcttcagcgctggcacgcatcagctcgctgtagtctagctcgcatgacacattctcggcctgaattttgtaatggttcgcgaaatgccaccaccaggcatcgcggtagcctctccctttacccctctcacccttcatcgaattccggcgccagagggctgattctatcttttggaggtagctgcgatcgctcggaattggtatccagtgaagaaacgcggtcgtctttgtgcccactccgtatcctctattggccttgagttcatccttggctttcttctgggcttcttttcgaagtctcgctcggtctttccaagtggtcttcctcctgcgacagtaggctgcgggcgttactgtggtatcagaagcagcgcctagctgggtattagtagcctcagaaaccgcactccgttggataagagtgggttcagttgactcggattcagaatcaggtccgtatttactgctttcagccatctcgcttgtagtagcattattagtctcagttccgcatcctgtcaaaatgggggttgagggtctggtaactgaaagcccgaaggatgatgccgtggggacaccctgcccataaaactgtgggaataggctgactatctgtgaagttgctgcagagatgtcgaagcgatcctccacaggctgctggctagtcattgccgaaatcgtctggccagctaggactcgagactggttctcgtcatgatgtgcaggatataccgaaggattgcaattatccttttgtttctgatcccccctcgatgttgcattattacttttgtcacttggcgccggcttctcggggaacaccgtccggatactttccccatgattatgagtcgtagatctgacggcctgcaaagaagtggacggcgctgactgccttggatctggctcggctgtttgggcgtttggtagacgtttggaaaggtgtgcttgttcgctaaaccttgcctcagaaagtgccacagaagttgatctcgtggtgcttctggtgactgggggcttgtacctggaatattccttctttttctgttcaaagtcctggattccctagataagatgatcagcgattgtaccataagacagtgagcccttagtcctgctagcgggacctgaagaacgaggagcggttcgtcttctgcttgcctttgatccttggcctagttgttgacgctttggaggagtcgcctgtctacttgacccaaccccggactcttgggctcgacgcttcctagtctgggatctcgtctctctgattagagtctgaaaaggccccttttcttcgcgttcaacggcattgtatgcttcacgctgacgctttctcgaaggctttgttatctgcgctgcagcttgagcatcggccgcagcccgatcacgcttggccttttgcaccatagattttgttatcggcatggacttctatccactagcgattgaaaagcaatattgtgaaatggggtatgaggtgtttgggggagaaacaacagagtcctgctgtaaagctgtgactagtaggccgatcacgacagggaaggataaggttctgagggcgttagagtaacagagaagaagcttccgcttcagagggaagcagtacaccctgacgaagatacaacaagagttaatatgctcagtgaatagataagggacggtggatgcaagagaggactaggagggagatattcatttaacggctgctgtgagcaattgcctcgtccctctcgctttccagcgcaatggggcacaaggaacgaatgacacagaacgaagatagagaattgtcagaatagatgagtgaaggagaaagttcctgatcgatgtcaaggggtgtgatggggtctgtgggtgaagaaaaaggatgaagggacaacagttggaagatgcattataaacagaaacacaagggttagccatgaaaagactgcttcctgggccgcggtgattataattgcgtcaaaggccatggtggttggtggagaggcgtttccaggcacaatcgatacaggaataaaccagactactcgaaacgagggatggcccggtaccaaagaagataaggagcggcattctgcaatgatttctgagagccatactgggatggccaggtgaagctccctctagcttgcaagctcaatgcataaccagaccgtttgtcttgatgaggtcactacgaccacaccaccctttgaggagcctcgagagttgacctgaagatagtccaaacctaagccttatctactacaggtctagatttgacagggtttatggcaggccaacaatcactgtctacaaagaggtcgaggatcactaattgattgtcgaagctactttactatctgatgaaacataagagtataatatctaaaagccagccctttgaccttgcggcactgctttatgcgcagaatctgcaccattattagggttataatatggcctgcacagaggaaacgcacaaaggctgaaataatacgggatcataacaaagagagtgaataaagtcacatttaaactggggcgcatgcacctgctctgctaagtggcaaagcaatctgaccaggtaggtgaaagacatgcgcactagccaatgggcgagaggctcgctcatcgagagctgcagaagaccgtctgttccaggcttggccacctgcctggcccacttcggtttaattgctacgcgtcaaatcagtacaggcagagtcatgtccattctagaatacaagatgttggaaagtagttccaatagcttcgagacaaaggtacctatctactcggaactatcagactgtagagtcttcccgttgatagccaggagttcgacgttgctgggaagcacagtgttagcggcagattctgactcgatgcgggaaagcatacaacaccagcgttgagttcccaggaataaacggcggggcacctctgcgtttcgttagcaagaattcttaggcctgcaactcgtcatggacggatgcttacttttcgccgtagccgtaatgtctggcgggtttggttttaatcagagatgggct

SEQ ID NO: 5675 - DNA, 2673 bp, Emericella nidulans
ttgtgctagacctgctctttcgtagggatggatatagtaagtacgtcggtaggaaaagaagacgacacaagcgggttttcccattccattcagaaagagcactgaatgaggattatccttagtatatcagatcgctcagtagtactggtatgggttgctcaccgttgcaggaagatagactacgttgggtccaccacataagactggcaggtaagaagccatgctattgagtcctacaggtacttgaaaatcactcccaagcatatcaacgagactcatcagctatctaccgttcctcatccacctgtctcggcattcatcctaccaaggattcaacgctgatatgggccggctcctcgcctttatttcactgtctccccaaagtgttcgtttgccagcaacaagcctacttcggtttcattatccttttatgcaatcagatcattagcggtctggtacgcaaacagcagtcatgctctgatcgtagataaagcaagctactaggatacagcaaagaatttcccagattaagcagtctatgctgtattcgctctcttaatgcagacaactatataagcaatcgctaggccttcacaactcctagctggctattgacagcaacattcctccccagatccggcgacggcagaccctcaacatcaacgcccttcctgaaaagaagacagtgcgtcgaccccccgaagtggaacatccccagctgatcgccctttctaacgtgctcgccttccttgactgtgatatcgcacgtcgagacttcgcacattccaaccccaaggaacgccataagcccgatggccgggttatcgcattcgatcaggataatggcccgtgtcgcgacgcaagtgagatactcctgcgtcgtaacttcgccgcctgggtcgattccctgctcctttggcttgttctcttcttcatcccatagcccctcgaatagcggctcagagtagtaggtcccatcgaccacatacgctctgacgatcttgccgctgacgggtgcatgccaccgatgatagctgagtgcgctcaaaaacgcttgataaacagtgcccccttcaaactgcggagtgacagggtcgtgcgagagcatatcagcgaccgaatatggctggcctttgatccagaacgtatcccttgccttgactcctcgggcaaccttgtacggctgggactcgcaggcgttaacgatgaccgtgtcgtcgtcaggcgaggccacagaccgaactcccggccggaacgtacgagtaaagaagtcgtcccaggacttgtacccatggtatttggcggacgggtcgcaaacaaacagcttgtcgaattcgtggtctgttccaagagggaggttggcgacgtgcatgaggttgttcttgcccgtctcgccaaaccacccgtattcgtcatccccaagaaccttggccgagtcctctgaggtcaggtactcgccccaggcgttcaagaccttcttcaacatggcgttgatgtcgggatcaagataagccgcgtacccgctcggcgtgcccatcgaccagtcgaggaccgcattgatcggcagcccgacaaggccgacttcgagagaaaaatcattccacgaaggcgccgtcgtgataaggtgattcaagacttgcagcatgtgatgatagtctcggatctgtgagcagcctgtcggatccttgcagtagtggcggttctttgggacctcggcgaacatggcggagatcagcatgtagacgcgggtgtttgtttcaattagatgttgaaactccttcagaactggatgcaattccttgtcctgtttactgtcaacgtgggcaataacgccgccgagccacttgtggtgatcgtcatagcccgagggcatccaatggcccactctacgccttgtcagttattttggctttggtatagaagagagatcagcataccggtgatagcggtgtgtgttagagctatgagaaggcataatgaatgtactatatagacctaaatttttttcctggctatgaagagggaagaagaggattatataaacaaaggcctggctagcatcacgctgacgtcagaactcgtacgtatagcccgcatagcccgcaccataacccctattataccgccgtccattatctaaccgcggtgcctgtgctggggccggggttggaatcaatgatggagttgctgattgaattgatgctggaaccggggctggactgcactggcctgggcacccaaagctcgaagcaaccggactcgacgggtctttatacacggcgaacgtctggtgcacgcaaaccgagatcttcctcggcggcggcagtatagggctcagagccaccgtgctattgtcatccatgctccgtcccagcggcgccatgattgaggtcactacggtgtgtggatcttccccgagatcgggtcgccagtattttgggtcctcgatgccaggcatggaggcgttcgcagtcaacgttgacaggacgtacttcttgttcgtcttctgttggggcgtgtgttggtgtttgtacgaggagctcccgtcgaggaaccagcggaataagggacggagggtgatgaggctgccggcgatgatagcgaggccagtctcgacgaccgaccagatggcgatttggtaggtccagtgtgtagggtcagtagcgggcagca

SEQ ID NO: 5676 - DNA, 8666 bp, Emericella nidulans
ctttccttggtcttcgtatgttgcaagtgtggggatgggctggaatatttatcaggtattccttatacatctgattggtctgaatggaagaatgtgcagttcgtattccactactgagagtacatgcagacacagaccgtcccacgtcgtatcgccatgagccttacggtacgctaccctaatatacatagacaaagtcctcattctcaaaatctgtcagatccttgaacgcattatcgtccaccctctgactgacatcgtccttgctgtcgatgtcggtctcaccgacaatctgcattgagcgatcgacgatcttcgcgggcttgcccatagccacacgtctcttttcctgccgtttattgaggtagaagatgtatatcaagttgagactagacgttcagttattgctacacgagggagggggagtagggatagactcacacgcagagtagaacgaggacacagaacatggcgagactatttccacatcagatacagaacagagataggttcgagttgccttacttggaaaggagaccacgtctgtacccaggagcttcatcggtggtatagaggttagggccaacgacctgctgcggttagctctgttctgctctgacttaacttcactctagtgatctactgtctgggcacatacattaccggcgcactggccaaccagcaagataccgttgatgaccttcttcttcgtctcaccggctgtatttccggcagcccaggagtagatcatcggtgctgttgctgttaatgtatcatccatgaacagattcgactaaacctactaatgccggggtaaacagatatctagcactgttagcacctttcaaccacaatgaagggacatgcttacgatataatagcccgcaagcagcggccctttgtgagcgtcgccgcggggaatctccagcaacatcacacagccagcgatagcagggaggcagaggagcgcgataacacctcccttggtcttgtatctggtcgcgagccatgcgccacccagagttgcaatgagctggatcgccccgaacggcatgttgaagagcatggtcttgagctggtcgaaaccgaacgactcaatgatcagtggtccgaaagtggtgatgccgccgctggggatcctgcacacccgtattagaacagtttccgtataggcgaaaagggtgcaacgcacgagattgagaacatcaacgcgaaccagaagaaggacttgaggtcgaggaatgcttctctgacatgggcccatttccattcgtgagtctcaatgccttgttggttcatccggagccgctcgattgctagcagtttgtcctcttcgttgagaaatttggattgcatcggcgagtcggggaggaagaatctatagcaatcacgaccatattagagcaggcaatgtaagaggagggcttgtcctcacaagacgatgaaggcaaaggcgatcgtaacaagtccaaagaagaggaagatgatctggtaaggcgcgaggctagagtggatatgaccgaggccgaaggcgatgagactgccaaactgtttgtattctcgttagtgcctatggcccagagtatagagttccagcaaagactcaccatgttaacgacgccattcatagcataccacgaactaagccgcattggctgttcccgacggcgataccacatctgagtaatggcgataaatgcaggggctacaagaatcagtctttcgataccagtgcggaaaagatgatagtgatgactcacgaatcccggattcaaacaaccccagaaagatccgacaagccaacagccccccgaaggacctggccggggtcatgcacgccagtgagatcccccagaagaagaccataacagcaaggaacttgcccaagcggatcttgacgaggatatacgcgatggccggctgagcaatcagctgaacaaggtagatgctcgagcccagccaggagtattgctgaccatggaggttggcatcttcaatgagaccgaagacggagccgtaggagagagtggatttgtcaagatgatggaggaagtagatgcccaggagaatgggcagcagtcgcaagtcgatacggcgaaggacgcgtttgttgttctcgggagtaaggatagtcgagtgtccaatgtcttcgatcagctcgagagccctaactttgtgcccgtcttgggggtgctggtaaggcggatgaacaggcacaggggcttgagccggtgttggagacggagcaacttcgatgcgttcatcctgactgggctttgagggaggcactgggtccgtcatggtgattccctccttgtaggatatgctcaaagcagtgacaagtgtaaatcaaccaagcttagagatggagattgtcagtagaatgaagatgatatctcaggggtagagaaaaaaaattaaaataaaataaaataaaggcccaagtcagccgttgaggtacaggtcaggaagatacatatcctggcgatcaataccgggtcgacagcggcactggggggaggcgagttttatgtgaggcccgggggtgtggatggcagtataccagccaggccagccaaaagatgaacctggggcaccccgcggggaaatggcaatcccacagtcgggcgaaggagacaaaggccgatggctataaggccattaagctcgaatagcacatggagaaacgtcggctggttgagacgggtctagcagacgacggaccggaagctaacgagggctagcaaagagctagacagagccaaccagcaaatacaaggccaacggaccatctccgagcccattcatgattcttcaatgactggtcccatggaaaacaccttggcactagtttcggtcttcggccgtctcgaccgaccatcgtgtgatgacttcgagctgtataggtcggaaatgtcccccgagtcccgatggagcagccaccctatttgccagtgcaagcccctcagtgtgcccctcatagaatgaggaggagctgtcgcagctataattcaaatacggcttcgttgtcgcgtcaatttgaccggccattggcaccagcattgttctgcttcaattcaaccaccatgccgcagaaagagtactcgcccaagggctaccaacaaacgcaggcccaggaatcgagtcctgcggtcttccttcactctgaaggtacgaaaggacgctcctttgacttctcctttgaggccgttcgtgagaaccttttccgcgttactttcacctccccgtcccatcctccccctccataccccagcgtcacgaagccaaaaactagcctgaacggcatcgaggtcgcgacaagcagcagtccttcgcaaatagacatcgaggttggagatgtgaaagccgcagtcaactgggagaacaccccggtggtctcgctgtcatggaaaggtgacagcaagccgctgtaccgcgacctccccctacgttcgtatgtcatcgacggcgacggcatcgcccactacaccgagcacgaccgaaaggcacttcacgtcggattgggtgaaaagtctgcccctatggacctcaccaacaggcacttccaactctcagccaccgacagtttcggctacgacgtctacaacaccgatcctctctacaagcacattccgctgctaatcaaggcgacgcccgccgggtgcgttgccatcttctcgaccacacatgccagggggacatggtccgtgggctcggaggtcgacggtctctggggccacttcaaagtctaccgtcaggactttggcggcctagagcagtacctcatcgtcggtaggacgctaagggaagtggtcagatcctacgccgagctggtcggcttccctctggccgtccctcgctgggcctacggttacatctccggtggttaccggtacagcgcgatggacgaacctccagcccaccaggccctgatggagttcgcagacaagctcaaggagcacgatatcccctgctccgcacatcagatgagttcaggctactcgattgctgagcacgagccgaaagtccgcaccgtatttacctggaacaggtaccgattcccagatccagagagatggattgcagagtaccactcgcgcggtatccgtctcctcactaacatcaagccgttcacgctcgcctcgcacccggacttccagaaactcattgacggaaacgggttcttcaaggatccagaaacgggagagcctggttacatgcgcctgtggagtgccggaggtggaacaggaggcgatggatgccacgtcgattttacctccgctgtcgccttcaaatggtggtataacggtgtccagtttctgaaacggtctggcattgacggcatgtggaacgataacaacgagtacaccctccctaatgacgattggcaattggccctcgacgaaccgaccgtcgccgaggcagcgaagaagcagactgataacaacaccgtcggcctttggggccgagccatgcacactgagcttatgggcaaggcgtcccacgacgcccttcgtgacctcgaacccaacgtccggccctttgtgctcacccggagcgccacagccggtacgatgcgatactcggccagcacatggagcggcgataacgtcacgagctgggagagcatgaagggagccaacgcgctgtcactgaatgcagcaatgtcccttctccaggcaagtccactatgccccaaccagagcatcctgaaacttctctaacaagtcgacagtgcgaaggtcacgatatcggcggattcgaaggcccgcagccatcgcctgagctcctacttcgttggatccagcttggcatctactccccgcgcttcgcaatcaactgcttcaagacatcccccaataacaacgaggtcggagaagtcatagaaccctggatgtaccccgaagtgacacctcaggtccgtgccaccataaagcggcgttatgagatcctgccctatatctataaccttggcttggagagccatttctacgcctctccgccccaacgctgggtcggctggggatatgaatctgatcccgaggtatggagcaagaagctcaagcgtggcgaggaacagttctggtttggcgagaccatcctcgtcgggggtgtttacgagccgggcgtcaatgtcgccaaggtgtacctccctcgcaaggcaggggacgagtttgactatggctttgtcaacatgaacgccccgtacacgtactatgcctccggacaatgggttgaggtcccctctaaatggaaggaaagtattgcccttctcgccaagataggcggcgcaatccccgtcggcaagtccgtccagacttcgcgttcccggcgacgagacggcggcctcactcgctatcaccgagctggacgactaccgggggggaggatcttccctccgcgctcaacgtcacatgggaccgtcttcacactagttgagtggaagacaccggatctcagtcgagcaaaaggtttccaagtatacgattcggtatgaatcaacggaagatcgggtgattgtggggtttaccaaggacgagagcagcggatttgtgccagcctggaatgacctggatatcattctgcataatggtgatacaaggagggttatcgcggataatggaagggcagtcgagtataagggaactgattcgaggggaagagaggtctatacgctcaggtgttaagtctgtttattggggaagggtggttagacgcacaggctgcataggtattggacggtacgtttcatctacccccacggtttcatatattattggtcaggatagaaaacaggggacatggcttttgaaattgagagatcatagatagattatgggtgataaacaatctaactttaagagatctacatgttaaacagcgttttatagccttaccacttcagtacaccactttttcagcatggccaaacagagaccaatgggaaacgaggattttggaggcttcgctgcgtaaagaaatcttctcctacctagaaaggattgctgtaattccgaaagacactcagtggctgcgcgccttcgagaatattctcaagtaatgtcccatagtcccaacccatagccgaagccgcaatggccgttaagctggcttgatcctcgcgccctggacggccaggcccagtcatgttctacttccgttagacctctaattgtcggtgaaaaagtaagctacttactggcttcatgttgatgtcaaaaagcgcaaaatcggacccaggactgaaccggcgaacgtcgactcggatcggtgccgtagctcctatcaactgcgcgaccttctcacattggcgcattatcttgccgtacgctgggtctttgagctcctcctctgtcacaactctcgagttggcagtgacggccaccacgccgttgtaaggcgcaataccatcgtcgtggttgaaccgatttactgggaccgtgctccaatggtgcggatcagagggtgtcgggggcatgacggtgatggtagcctcctcgcctgcgaggaactcttccaacattacgagcggcgactcggcaagaagggtctttgtatgctgcagcaactgctgtttgtcacggcacaccttgaccccatggcttccgcgtccacgaacgggcttcccaacgatcggataccggtcgacttgttgaacgagctgttgtatattttccgaagtggccagccaggactttggcaaggtgaatccaccaatctgggctagtttcccgttcaagtacgccttgtcgtcgaaattctccacccaaaccgggcggctggccgactacgtagatcttgtcggcgagcggcgtcaacctggccgacgtctgaaggggatgagaactgaataagatagtgttcgcccagagatgcgtggcaccctgatggacagcagagtagatgccctcttctgtgtcgggaaatgtccagccctcgttggaggatacaggggctgaaggatccgccttgatcacctggatgcctttctgctggagggtatagacgatatctgctccagaatcttggtagcctactctctttcagtatatctatgaaagttttgtccgaattactgcttaccacccggttttctaggctttctgacgccattgatgacgggcggttcaatggcctggtacagaacggcgacggtcggggcgttggttaaggtacgagcatgacggctcggtccgatcttcgatgctctgcgtacagtgtgagaagcaagcatggcggattgatgaagaggcgaaatagcagctggacgctacgttggactttgacgttcttcgcgggctcctccgtagatagtctcggatagatccgatagtcggcacgcttcggttattctccgagccgtttgtatggcctgcgtatcagcgactgcaaagtcgtaaagtgtcaagctttgcaccagggagctttggcatgaggtgaggctcttctaggttatctgtatatcattatccctgccaattattttctttacaaccaccctattgatgcggtcgacgttcatgttccgggttatgatatctcccgtccagggtgatgtatatcctcaatgggcatatacatacagaagttcggttccgcttcttccatagcggtgtctgttgccgcactcaataactcttgaaggtccagattgcctttactttaatactgaccgcgtttcgccctgtgcagtgggatcgctatatgcacatggaaacgaacctatggaagaaagagaccggcttcattccgcaatcagctcattatcataaccattccctgttcatcccctgtagctgctcgatagtccaatcaggtcgagatctctttgtcctaaaattgtcgaccacaccacacgattgcataagtgtctagaatgctgtagctgctcttgatagaacaactagacgtcagtagacacctagttggttcctaagcgtcgaagcgtcgaagcagactcctgctgatcctctgtcgaagtaagtgttgtatttaaggtacaccgtgtggagccccaaaacggccccgatgggctagcctacacatactgtggcatcgattaaattgtagtaggagaaacagtcggcgtgtaccttgggtttgcattcgcgccttttgggatacatgatacgccagcttgaaacagaagataggatgatgaattcacagatggggccctccttcgtctttcctccaaagtattgtcgcagatgcgattgcataggtttcgtaaatgtacggcaggggatatattacctgtctattgatatccgatatcaaggcaaatggttgcataatttgccatcgcttgcccggttagctcagttggctagagcgtgggacttttaccgctttattctgctggtatcccaatgtcgggggttcgagccccccatcgggcgaaaccttttttttgttccgttcttttcgtagcactaattttcggctattcaatgaccagttatatatagccacctaatactcgattaagcgcgcccacttggtcaggcgatcagctacagtgcgtaaagtccatacaccgtccacgatgccaaattgtgcgccgaaatttatgcatataactttgtgcttacttcgttcatctcttatggcttgatgaacaagcagtgcatggatatatattcgacttccctttccattagctg

SEQ ID NO: 5677 - DNA, 3103 bp, Emericella nidulans
taattttattaaatatcctggatcgagcctcccatggcttggtgttaatttgaagagaggtaatataagcttgctaatagcatttctggccattttgcaaggctgtttaggtaaaaatatgctgcaagatgcttaatataggagtcctggcagagccagagcttcttgttaggcctatctctgagtactcttacccctaagaactatcctacttcttctatatgctgaagcttatattgctttgccagtttatctttgaagtacttagctgcctctctggctgctggtgttggtaggttaataataataatattatcaatatataccagaataattatatacttatttgaaaagaggcattcttcttccagaactagtagaagtctaaactttataagtattatttttgttaagggacgtatttagatggatcttcctatctagacgtgccgtacgtacaagaaggaatcgctaaagaagaaatgagaaagaaggattgttgttgcaaggaagtcttgtaggtggctcaccgccttcaggacagcgcaggccttggccgagtcactaaggtctaaggtccttgtataggcaaaggacccataacagggtcatgcagtagttggcaggcaataggcaggcaaggtcatagtcagggttaggattattaggttataggccaagcaggcaggatatatatatatagagcagtaggcaagtacataccaaggcaggcaggcagaccccaagccagttcccagccagatacagggcccaatgcaggcaatcaaggcaggtcatgtcatggtcaggttttagttattacagttcatggccacagcaggcacgggcagcccataccaagccaggtaatataatgccaggtaatatgatgccaggtaatatgatgccaggtaatatgatgccaggtaatatgatgccaggtaatatcatgccaggtaatatgatgccaggtaatataatgccaggtaatatgatgccaggtaatatcatgccaggtaatatcattcccggtttatatcatggtcagggtttacattgttgtggtttatagccagcccggcccatacacagccatccagaggaggaagaggcaacagagccaggccagccaagcccagcagagcccccaagccaaccagacccagagcccgatgcagggaaccagagccagcatcaccagtaagaatcaggggcatcatgccgggtcatgtcatggtcagggttttgattgttgcagtttataacctgagcagggaggattttgcatggcagcaggccccaggccagcaaagacagcagagcagcagagccgcaaaaccagcacggccagcacagccaatgccgaccatacagagcagaaccaacctggaggcagcgccggccaggatccagtgtccatcccattcagagccagccagagccagccagagccaagcagagccaagcagagctgagcagagctgagcagagcccatgcagcgccaggaccgaattagggtccccaataattatatatatatccagccaccccaaggacaaattcataatcaagtagcattacagccggggccaatatatatatcaacaacaaaatgcgcaaaatatatatatgttcccagatatatatatttaagaaccagggttttatttattataggttatggccaagcaggcaggcagcaggcattagttgttgtcaactggcaaccaagccccatggttgcatggtcagggtttaaattaatgcatatacagggcagcaggcaagcccataccaagccaagccagccagagcccatatattcatatggtcagggtttggattgttgcagtcatggccaggcagagcccgtcagagctgagccaggcagcgcaggcccgttaataccagcccagacccagccccagacccaaagcccgttaaaccccgtaagcattagcaagccagagccagagccgccaactatgtcggcagcccaggccagcgccagcccagagccagccccaagccaggacacagcagagcccgccaaagccgtacagagccaggcagggccaggccgccaaagcccagaagcatacgccagccagggtcagagcccaacatcccagaggccgtacagcctggacagagccagccaaagcccatcagatcccagcagagcccccaaagcgcgtaagtattcgcgagccagagccagagccgcccaatgtgtcggcagcccaggcccaagccaggcaaggcccagccagagtccggtagggcccgtgcgagcaagccaggccagccaatcccgtcagtgccagagcaagcccaagccagagcccagcgagcccgccaaagccatacgcgccatggagccagacaagcccggagggtcaggccaagcggagatcgagagccccagatgcagaggcagcccagacccggtcagcgccaattaggcatacaggcacaaccgagggccagcacctgatgacagcccagatatcagcagccaggtcgggaatgccatggtcagggttcagattgttgcagtgcatggccaagcaggccagatattggtataatagcaggcccggcaatatagaaccagcagaccagtaccagccagcacgcaggccaaagccccgccaatcacccatccaagccagggccagcccagacccaagccgcgcgcccatgccaagccaggcagaggctgtacaaggccaaccacagcagatcccatgcagcatggcagggggtcaggcaggcccgtattttcatggtcagggtttagtatattgtggtttaggcgggcgcaagcaggcagaatatttgcatgacagcaggcccaggcaacagcagaaccaggccgatgcccagcaccaggctgagccagtcaaccacccataagccggggcagccaggaaccagagccgcggccagcacagaggcagcgccgcagcagatgcagagcccgccagagccagagcccaggccaggttaatacagccaaccaagcccatccaggccaagcaggccgagcaggccgaacagactgagcaggccgagcaggcatggatagtagccagagga

SEQ ID NO: 5678 - DNA, 5940 bp, Emericella nidulans
cgtcaatccggtcgctccttctgcgtctcgtgcggtcctctgcggcttcggcgactcgcgacccctcctatcggcccatacgttggaatctggtaaccccgtgatcagttgtgtcggcgactggtttcacttctaaaatgcgctctcggccataaatgcccgccatcccctccttggcttattttttgggttctgggctctcatcttgacactggttttctctgcgtgctttcacgtagaatttgttcgctttttctcaaaccctgtttttctgtgatatccctctgatcgagaccactcggtcagtttacactttccgttctcagtacgttctcagtacgcacagaacaatgagtcctccgccgagatgcgccgccgtggttgttggagccggcccagctggattagcggtcgttggcaatcttcttgagaagcaacttgggaacatcgtctgggtcgaccctcttttccagggcggccgcgtaaatttgaagtatcgtgaagtcccgaggttcgtgtttctgtaatccgatagctggcgtctgcccacgttagataagaagctctcctggctgaccggggttggtttcgatcagcaacactaaagtggcattgttccaagcatatgcaacggcgactcagccgtttcggtccgtcatcaacagcacacgtattccaaatgctttcaccaccatggcgaagctcgatcaggacaaaacctgtcatctccaccatgcggcagatgttactagagctttgattgaaggcctcgtaaagatggaccaggtgcatgcctgccgcggccaagttaccgcagccaatctagatcaagtcagttgagcctcaccagctagtccactaccgaatggacagatacaagtggcagcataactgacgtttttcttggcgtctttagacacgttcatggacagtacggattcaagatacggactctctgaatgaaatggaagtcatgacgccccgattgattctctgcaccgggtcgtctccgacaaaaactcctattccagttgatgcacacggcattcagagactcgacctagacgtagtgctgaaaccaagcgagctagcttcagcccttcctcagaaccagccaacgaccgtcgcagtagtgggcgcatctcacagcgccgtcctagccctactcaatctctacgacttggctcgtacttctcactcacatctccgcatcaagtggttcacccgccatcctcttcggtatgccgagtacatggacggctggatccttcgcgacaacacaggtctcaagggccgtgctgccgactttgcccgccaacagctagaagacagtgtgctgccgacatcagaagcaggccgatacatcaccaagattgactgcgccggtggccagagtaaggaaacagcgcaatatcaacgccatctcccttcctgcacacacatcacccaggctatcgggtacacccgtgatccgcttccggagctttcgatcaacagatccccactttctccagatgacctccagtgggattcgagcttcggtggcttcacggaccgccacggccgagttatccccggcctgcatggtgcgggcatcgcgttccctgagcgtgtcgtcgacgcttacggtaatgtagagcatgctgtggggttcttcaagttcgtgaaattgcttaaacgtgttactccgcagtgggctgctacggcataagtccttccctggtctcctcgtttctggtcttctgtttttgcaagtgagcgtctcattcagcacaagccaagtcggacatctatggctggtccgtcatcgtgtctaacctacttaatgtccactctaatttgttatcgttatactggcatcgccgctggataggcgatgatctacaaagagagcgcgaatacagttgtcgttatccacttatgctgtccttgtatatccgtagtcagctatcttctatcaatttcgactctcaacaacgcacacctaagtcaattgcttcatcgaattttcacttcaatcctacaacaccaattatccgcttgatggctgccaaccctacatactcacgtacttgcgtacccacctaaccacaaacctcgtctttggatcgcctgtgctatccagcaagtaacattgagtatttagtatgtgctctgcctttcattagcaacatgaaccacagcgcgtgcctttcgaacactcatctgtttagttcatctcatccagtctgatcattttccaagtcatgttcgcctcatggcgcggcgtgccatgcggcggaaatattcatgcactcccaaatgccagaatcactattaaccccatcagagcagtcattgccactagaacaggcttataaactttactgtaacagccgtatatcgcgacataggtgttagcgacataggtgttaggtagcgaggcgagcctatgtagcgagctcagtagtagggcttccgttgtttcggccaccgtatcgtgtgtgctgttacacgcgaggatgacagatctgcggtttccttgtcgtttttgtttgagataaacgttccttgcgttgagcttggcgtggcttaggctgagccgatggtgtgttggtgatacaagggtctgttgcagtgccacgacgtacgtacgtcgtaggaaagaacggccgaggcgtgtctacctactcttcgctctttactgtagctattcgaaccatgtctctctcttgccagagtgaatggctaccggctggccaagttcaaaagtgacgtcgcacattcattactggatacgtatatacataatgcatgccggacaaggccaattaccggtgcaacaaccaagttttcaagcacaatagacaacgcagtcgggtagtcgggtaatcagtgatcagatacgctgccgcggatacactcacggtcaaccaaaaaaagtcgtaaccaagcaaaagctggaacgaggatgataatatcaatacagttcatgcacatccctgcacatcaacgcatgaagaagctgaagaagagtgagaagaaaaaagtgttcaaatgatacacagtagcgcatgccaggaaacaggcccaccacgaaaagaaaactgacttagagcgcaaagacagaatcttagacgagagcagcaacaccaagcgcaagcaccaacaggccaccggaaacgcggttggacatgcccgcgttgtcaccatcctcaccgttcacgttaggaaccgaggtaggggtgtcagtggcagactccgacgaggtgctggtgctggaagactcagtagaggtagcgctggcgggggtcttgctaggggtctcggtggtggaagtcggagtcggggaggtagtcgactcagtagtggtagtagtggtggtggtcagggtggtctctgtggtagtgctagaggtctccgtggtggtggtggtcgtcgtcgtctcagtgctggtcgtagacgaagtagtggtcacttcctcggcgccctcaacagagaaacgggggagatagttggtggcgtccgggtcagagtcactgatgatttcgatggtgtagtcagagtaatcctcgatatcagaaggcacgctccaggtgaagcttccggagttaggaatggaagctaggtctagtcagctcatgcacccatgcaagacgggatctctctcaggtgcacccacaagcaatggtggtgccagaatcggaagtcaagacctcgccgtgctgaagtttgagagtcacggttccttcagtgctgggttcccagctcagggtggtggcctcgccagcagtgaatgaatatccatttttggggatgttgaaggcgttttcgcgcgcggcgaccagagtagcgacagcgctgagtgcgaagaagaatacggaacgcatggcgactgaaatgatgtgatgaatatgataaagtctctaacgaggatcaagagattatagaataatgtatcagatgcgccggtgccaagtggactgcgtaattccgatctgaagatagatgcgggggattaaaatgtagaagaaacaaagatggctcaaagagagactgaacggtataaaccgactgaggaaggagcggacggtaggtgtcaccggaccaaaaggaccaaaaagcaactaaaaggaaggactggctcttgtaatcgagcgggaatggcgatcagagagaataaaagggaaggcaccggcgagcgtgggaagtggaaaaggaggaaggagagcaccgtccaccatcgggggaggcgacgcttccaaactccggcttcttcaggttaggctagtagaattagcacgcacagagcccagtctagcaggcttagcaccaggaacataccgcaaaaatcacaggtcccatggtccacatgtaaatggactgcaagctaactgttttccgctagccgctcgtgcaaggaggaaaggccaacagcacgacggactttagcgatgaattgatcgcattctaatctccggccaaaataacgatagaccttcatctcggcgctcgttggatgtcatctctgagggacggctgttctactgctcgcgtctcccgtcttgccactacaattggtagtccttcacgattcagacaagtctgccgtccgcagacgttcgctcgcagtttcccagttccccagttctcatggacccaggcaagaggccagacgcgataaagatagtagtccaggccgatgggacagagtaatttcgagcgcaccgaccaaaaagtggcgaagcgaccagaattgattaggatggtcgtggcttccggtcttcctgaatcgctagcctttgagccatgcacactggcgctcatgtgccagagttggtggcgggttctagcctaagggtcttttgagagcttcagccaaagaaggccgtatcgacgtatcagcaacgtgaattcgtcaactctgtacgggggctgagccagctagccaagtgtgttccttggtaggcagcactatcgcagccattaggcgggatttctggtttgtggagacggactttcgatcctcaataaacggtgagttgcaccgcttgcacggttgattcaaggcatggcgataagactactagtactcagagtggtagtcgaagcgaggcggttaggcgatggattaggttctaacggcgatgaccgtcaagagcttggatgccagaacgagaactcattaggaaggagcgacccagtattaggcaacgacccggtaaaagacgggtcgaatactgtattgagattacagtggtcactttccagggtccgtctgtagagactaattctgtacgctaatactgtagaggctaatatgggccctggctaaaattactctgggaaaccccattataagttgtccaatagacgaatggcagatatgggaatcgcaggactaatttaacagtctccgctcgcagctcgacaacaaataatcaaaatgaatcaatgagagatctaggactgagggtaaatgattgatgagccgcaaatccgggatggtcaatatggcgatcaatgtttcataattatgcaggtacaatgatggaatgatgttaatcgatccttgcagcgcagaaacaaattcggacgtcgagacaagacattgactcttggccggagaccagggtcgagaggagagggacgaggaagagactaaggggcaaccatggttccataggagccgctctaattcttagccagactcgaaaattcagcacttggcttagcggactttgacgaaatagtaatgtacatggtatcataatacacctcgccggcagaaagtcggattcatacacgcgccgttccttccgaaggatggcattgctcgcccacagagccagaggtggagacgttgcccaactggatgtcgctcgcatcgagcggccccgtggactcatcagtctgacgggtcggatcgctatagtgagtcgtattattatcgggcgatta

SEQ ID NO: 5679 - DNA, 9849 bp, Emericella nidulans
  unsure (1)..(9849): unsure at all n locations
tgggatatcaagggcctccctgatgcgtttgacggcaagggcagatacaagggttacaaagttacgaccagggacgagctcaccaagctgttcgctagcgaagagttctcctccgctccatgcttgcaggtgagtctttgtgacctcactcattacttatcagatgctaattttgagcagttggttgaggttcatatgcctcgtgaagacgctcccgcctccctcaaaatcacagctgaggccgctgcgtctagaaacaaataaggaccacaggacaggccggttctcttgttgtgatctgagaaattttcatggcattttcaaggatttgttaatcagtatagcatttcattagcatgaaactcctgattgtggggataattaaacttcagttattgtcattgaaggcctcggcttactcctaccacttgtctcggagctcgataactacgagtggagtaggcaagagaataacccagacacgtagatacaagtaacagcagcctagtgagcaaacacgccatctgctggtgttgtggaacgatcgtcggagataggtccctggtggatagagaaggaagaaaatcactgcttatcatcgaagatcacgtgactgggagatggcgttaaggccgccagaacagcgaggagctcctcatgaaacctggcagttgggctggacctcaacaggcgtctctagtaatatcccgagcgcgtactctaatttcttgtggggaccgattgatccatgcgcgctgaggccctacgagctgtcataaaaccagagactcgtgcgttacggtgtacgttttgttacctttgtgtctgcgcctccctctcgaaactcagaaagctctaagcactcaggtataccacaaaactctggacactctgactttggctagagaaactacgcttatcggtgcttgcttacataccgctcgagttcctgccaccgctcgatcgtgctcgccctgtctgttgaccgtcaaccaactgtttcgagtttgcgacgagttagatgtacatgagctggctcattacgatatcgtgtcttcgatccaaatatttgacgagggataagccgactctgatcaaagagccgtattcaatccatcgaaccgtccgctctgtcgaccgcaaccgaccgccgaccgatattgaagcacttgcggttcctcttcaaggcaatgaacaacctccagcgggacatgaatgacgagctgaaatcgccgctagattgcaaggataacctgctcagaaaagaggcctaggatcatctgatctttgtccattatcgcgactcgatttttctccgcattaatgatacgggatagctcgcaatatggatggccaaagacaacaaccttacgtaccggcaccgcctccttcggcgtctcagccttcacaggctcatatcatgcccttaccaccgcctcctcctcgataccctcctgcgcaaccacagaatgttatgcctcccccaccacctgggccgccgcccggatctgcatacggtacctcaaaactcaccaaccctcagctccagtcacagagcacccttgggtggtctaactggggtggacgtgggataccgcagtaccttccccctcctccgccgcctcccatgacacatgccaatcagtcatcttttgctcgcccgtctgcggtacagaacaacaacgctacatccgcgacttatgtaccgcaacccgggacatttggtcccggcgttggaatccctcctttcgacgtaccctcacactcgtacgatgcaccgaataccatggtggctagcgaaagaccgcgacctccacccaatgctccatatggacatggcacatctaacgcctctgcctatcagctagacggaactatcccatctacccccttgacccacactgctcctttttctcatgagacttctcacgatgtcccttcctctgcagtgcccacaggatcccctttcaaatccgttcctcaaagtgcgagtcaagcgaacgatctaacgaagtcctctagccatcggcataataacagtaatacaactgtaggcggcatgtcggctacgacagcggtgcaatggccgttagatcgggtgctgttatggctagcgaagaacggattctcgcatgagtggcaggagacgtttaaaactttggagattgagggagcagattttctagagctgggacacggacagaatggccgtccgactcttggaaaactgcacactgttgtccaccctcaactggcaaaggaatgtgaggccaatgggacggcctttgatttgacgcgcgagagggatgaaggaaaacgtatgaggaagttgattcgtttgattcatgacgacgcaggtccagataacggaggcacattcaacaaacagcacgatttcgacgacgggcacggcagcgtacctgatgaaggtcccgagttttcgcctaatatcaataatgtcgcacaagcgccaggctctccgagcctcaacgcgacgaacgtatctaatagtcccaatctcaaggcccccaaatactcgcacaaaccacgatcctttactactccggggtccattagtcatgacagtaccacagcagaactcgccatgactgaaggcagcagcacaatgctgcctaggtcagacttctcacgcaacgtgttgggaactatcggaatcgatcatcaaaggaagagcccttccatgtctagcgataacggggtgtttgcaattccgcctcatcgaccacatgaaggcagtcccaagagcggaagcccagctgcgcagcatgctaccttgtacgcagcacctgtatcgtccgcaactgatttaaacgctaagtacgacgctagatttggacacaaccgagtcaatagtggagagcgcaggtactatgaaacgctaaagcatgacgggtcacgtccttcgccccagactacccagaccgctggtgataatgcttcatcttatccaaaggatcaccgcatggggtttcttaacttctttaagaagaagtcagcaagaaatagcgatcctaataacccttctcccgatgacaatacccctgattctcccatatactctaaatatcacttcaatagcagtgatgtctcggtaaatgaacgcccattatcagcttcactatctgactacgaacggatgatgatggtgcgaacaaagccagcgcacagaggcaaaaggttcatcttcgcaacaatggatggttggaactatcggctgattgacaccactgatattgattctgtggagaagctccgtgcttccatttgccaaaacctcggaatctacgactggcctgatgcgcagatatttctcactgagcctggacaattggagcatgacgaaccgctgaacgacacctttttaactttgtgtcaacgatcaaagtccgactctattggctcgttgaagttgttcgtcaaaactccacacaatgttgctggcctcggggtctctatgccggacaggtctgccgtttctccaacgtccgctattcccagaaagccgctggatggggaagctgcaagcaggttatcaccacttaagccttcttctcctcaacaattgaagcccccagccagcaggcttcctctccgcgacatccaaaactcagccgctggaacctccccagtggatggcgaaccagacgggtcgcttcaagatcaggaacggaagccccaaaaatcctaccgtccaacaccggcccccttaccgcggccggatgcttatagcgagactgggtatcgccgcaaagaggtcatcaattttgataagccccgtatatcgccctacgaagataagaagtctgaggttctcgtacctttccgcaaaccaccatccgcaccccaggaatcgaacacgctcagcaaggtaaattcgttgaggaagaaagatggcgatcgcccgcgcccccaccgttctaatcaaccacctggcatcaaggagatgatggcagacatggggatgatgagcagcctcatcgggaagccttcatcacccaattcagggaacacaacagctacaggtaaggctctagttattccctcttaattctcgggcttcaattctaacatcgcagtagaagatgcccacagtagcattgactcagctgtcgataagagtagccaaagtacaccgccactcacgaataccagctactcaccgaccaccacagccaccaccaccaccaccaccaccactgcttcctctagtttatccagatcagcgagtcagaaacgaaagtctgtcggtccggagttcgactttgaggagacgcaggtatctttccagcgctctcccgcgcttgaagaggattccgatgacgattccgacgatgggttatttgcgatcccgctagcaaacacgaagaattccgtcaagcctgggtcccctgacactcaagcaagaccacggaaaccgtctctcactgtcgacaccgaagctaagccccgtacaggtttgagtgttagtttcaagtcacccagcgctacacgcgagacgtttgcgagctccggtggcgatgcgagtaactcgactgcgccttacttcattgcgagcaattctcccgaggaagagaaaacaccgattagacgcaactcgttacgcaactcattcgcaaccggcgatgtttgggcgagccgtcctcccgtcgagggtgtcattgatcagctcgacgacttcttcccagatatcgatttagatgctccttatttagatgagcagggtacgtcgccaccctcttcgcctgccagcaaggtcgcgatcgacaacgagctcaaccgtaaagacaagcaagaaaactctcaccacggaatgcagccacctccagctccggaagataatacacttggctcttcggagcccaccatgacatcgcacggacagggcatcgtcgcacgtcggaatgtcagtcgttctggtggaggtcttacgcgaatgaagtccattcgagaagttgccaaaggtgcaaatcaagcaactagacaacgcagcgtggcagcttccagtggaaataagaggagtggggatgttcatcgtcgcaaaagcacaaaaatgttcggagccaagattatgcagattagccccaggcgcggcagtcaactcagtcagcttgacccgattcctcaaaatagcatatcgtcgagctcgaaacctcagagacaaccaactttccgcatcatccgtggtcaacttattggcaaaggtacttatggtagggtatatctgggaatgaacgccgacaacggtgaggtcttggcagttaaacaagttgaaatcaatcctagacttgccggacaagataccgataagatcaaagagatggtagctgcgctggaccaagagatcgacacaatgcaacatcttgagcatccgaatattgtacagtatcttggttgtgagcgcggcgaattatcaatctctatctaccttgaatatatctctggtgggtctatcggcagctgtcttcgaaagcacggcaaattcgaggagagcgtggttaagtctcttacgcgacaaaccttggaagggctatcctacctgcataaccaaggtatcctccaccgtgatctcaaggcagacaatatactgctcgatctagatggaacctgcaagatttccgactttggcatatccaaaaaatcaaacgacatctacggaaacgactcctcaaactccatgcaaggatccgtattctggatggcgcccgaagtcatccagtctcaaggccagggctatagcgcgaaagtcgacatctggtccctgggctgcgtggtgcttgagatgttcgctggacgacgacnctaagcaaagaggaagctatcggcgctattttcaaacttggaagcctgagtcaggcgcctcccattccggacgacgagtctatgaatgtcacaccgcctgcgctcgctttcatgtgggattgctttactgtgtatgtctcatgcttccctctttactttcaagagacaagtaactaacctgtttcctgtgcaatagagacacatctgaacgtccgacagctcaaacccttcttactcatcctttctgcgagcccgatccgaagtataatttccttgacactgagctctacgccaaaatccgtcctgtgcttgagaattaaaacgctcattttcaactcatgttttggagtgaagtatatatgttgtttttaagttaaagggttcatactcaattctgtttgtcgggtgggcaagctctacttatataaggaacattttttattgcttctgctagtgcttggatgtcagagtcttcttattcatcgattaagcgattaacaccaagatttgtatccgtacctaatggattacctatacatatttctcaaataacgagtcatttgtacatgctaaggttatgttttaggttatgagcggtctatctctcccgaagtacgttgatcagaggaataaatagtcccagttttatatctatatacaacgattcgtatttaactacaagttacctagagtttatcgaaactgagaccccaaactcccagtcctactcacactccgactcgtaacctgatcataatcgtcatcctgcgatgcaaccccgacccggaagatgccttcgcaccaatctgaaaaggtatcaacatcccacacagcatcttcacggccctttcccttcttgctaacggcaattcccttgttcttctccgacgaagtgaacttgacaaagaactcctcgtatatttgaattacacggtcctggaccgcaccaacaagggtttccttcatacggatatcatcgaggtagtcgtcgaggactttgcgtagatgagaaacctcggcctcaacattgcggcaggtagggtagataagttccccatgctgcaggtttcgtccgtcaacgaatttcgacgggagcgatgcggtcattttgctcgcgaagtcatttatgaagtcattgatcacggttctaagacggccgtcgagttcaactttggcgtcaagcatgttttccaccacacgcgggaggagtccgtgaccaacgagtcgcatgaggttgcgagggttgaagaggccgccgcgttcgcgaagttcccagaaggtgtttgtgacgcccgaaaagtcgaaggatacttcgggggccacatattcgatatcaaatgcgacaatttgttgtttcagtattagaaggtggctcatcaggaataattggccgtcagtagaggatttgctggagatggaggcgctcgcgagatgaagagaggctgtggtttgatggacgatttggtgtgctagatcatcaaatacggtggactaactgcgagtcagtgcatataatgaaggggtaaatagatctcggtcctacatttacaaggcggtatatccgactgagaagccacacagctttccgcagggtcggataccaggcagcaggagcattctgcgattcgaagtcccatcttgagtccttttcgggtacgtctgcaccttcttcggttgacttctggggtttcggcggttgatgaatgcatccccagtgagaacttttttcggagatctgctctcggacacggataggagagttgcttgttccgtgccgggtaatcgaggtcttcggcccggggcttgaaccgttcaatctcgtcgcggaggaaagcctgcgcacggaagacgagtctagtctgtacgtcttctagagctggctggatcagtgctgaaaagtcgagttgatttgcatccatgtactccgtctcttcctcctgatcgaacagatatcgcgtctggagtagagtacagagctggcacagtttgagaatcttatcttcgtggatgattcttggtcttaaatggtcatagagtggctcgcatatggtctcgagaaaatcatagaggccgccctgaccatgaaaccattcaccccacaagtcaaattcgtccaagcaaacaccgcggacgtagcttatacttgcacgagcaaaggcgacgagatcctgcgagctgcttggagcctgcgctatttcgttcagtcgcttgcgaaccaaagggacgatgagcttttcacgcgtagccgcataattagtatgaagctcattgagaaggctctggtattcagcttccgtgccttgatcaggatctaatggtgggacagctcgtttttgaatctcaagacctatttgctttaattcaggcgcgtcaactcgaaatttcgcatagagcaatgcggacaaggcagcatcgttgagttgcttatctgaaacttttttcgacacgttcgagtataagtcacgaatagcagaaacgaaatgacctcgaatgagtgtgagagcgcgcgttaagagtagccgaaaccttgacctatatacttctgcttccttttgctcgggctagaactgtgttagaagacggtcgtagtgcctgcgcaggcaggaatgctcacatgtgtttccatgtagtccaagcactcgtctaattgtcttagcatgtcggagaaatcctgcccacgtacagtatttcccgcacccggggcattgagtcttcgggaagcaggatccaagaaatcgtagaattgaaggttgtagtcaatcttagttattaagtctgtatcacgcttttgggcagagaggagcccctcgcactgtttccggaaattggatgtttgcaaaccgaccgctctgaaatcttcagaaagcctcgataagatatcaagggtagaagacgtgtcggaaagcaggacatcaagatgagatttggacgtttgcagttcgttaagacaagccctagaaacaataacccgttaatcgttggctcgctgtcaaaagttggaggatacctactgatactcatcataactggattccagcagactcgcttccacatcttcgtaccattgcgagaactccaactcgttatggatgtcaacaatcgaatctagcttacctgggatagtctccaactcctcgatttgggccgcctcgaggttgagcggcatccccgagggggcggtttgccggcgacttcgttgtcctgcgatctgcggagccatagcatctgagtgatagctaagtttccatagaggacgtgggccacgttcctcccatcaatctccgaaagaatgtcatgccgatcgcctcttgagcgcctgctgtatgttatcctccacatggccgctttctagaccgccgttctgccgcttccttccgcctagagtactgacgcaaagtactccaccactcgtccgctgggcgtcgacagttgcaaaaatgcacttctaatgagattccgaaaacagaatgtgggcaattcgtgcacgacagcctccagtcaatgcgaccgtcttcgcacgtcaactcagagccaccggcattcgaccaacggctgggatcggacgacggcattatgctagcgagcgagaaactccagaaagccacccaccatcctcaaattggtttaaaaactccctggggtttgcggtgacaggaacggcagtcttccttgcatactcgtatgccaccaggccggacgagagcgaattcctgaaaaaacttccaaagcagtcaaagccgatcgaagacctatccgccgaatacgtacaaaagaaagcgagcttaaaaagccctggcttatacatatggggtaataataaatatcgtgttgtagatccagagtcaaaagagtctgtcataaagactccacggaggctgtcctactttgacagcaacgtactcagggatctcaagctcggagagacgtctggagctgcaattatcgagaatggtgatttggtgcaatggggcaaaggctactcagaaaccgagttcaaacctaccaagacccttactggaaagaatttga

SEQ ID NO: 5680 - DNA, 4445 bp, Emericella nidulans
acagaatcgatgagcttggatgaagccgctgtccggctatgatcacactaatacactcgaagcggcgctagaattcttgcacgttcaccaactcgaactacggatgcccaacctgtgaggctagagccctataacttgtctggacgcttcgattgggcttggggaaatcccacgccgattccgacttgctcaggtaactttcctcgctgcagcttacacctgctttcagcctgtgaacgtccttgattctcccatgcctgtttagcttgctgcaggtctctatgcttccccgctacccctccgttgtcgaagggtcctctatttctcttgcctaggttggagtaccggctgacgccatttggccgtttaataggacctcatcgaataggcaaagccgaagttgaataccgggccacactggttgactgaacctttgttatctagcgcacggccgcgccgttacgggaacaaattggccctattgttcttgaaggaaaatagaacaccaggaaaaaggcaaagagggaacatactacaatggctaaagataaggagcgttcgatcaacccggcggccgcgcagcggaaactagaaaaacagaagagtctcaaaaaaagcaaggctgaagcgcttgcccgccgaaatgagaagctggcccgtcgcaatccagagcgcatccagcggcaaatcaacgagctgaaggaaatggaacagtcgggacagagcctgcgaccacgtgagaaacagatcttggaagctctcgaacgggatttgcgggccgtgctgaaggcccgtgaagctttgggcgataaggcacccaagttcgcgagctcacagcaccagcggggtgacgatcatccgcgggaacggagggacggtggggtactggggaagcgaagacgggataaccatggacgctttggagaccaagatagtgacagcagcgagacggacgaagaagttcggaggatacccatgccacgggatacccccccgccctatcccacgcgagtaccagagaagggaaaagaggcaaatgcaggcggccaggctcgcggggcctcatcctctcccggcgaaacctctggtaacagaatcgaagactgtttacgaggcaaagcccgaaattcgcgacctacgaaaagaagccgtcagcaaattcatcccagccgcagtcagagtcaagaaagaatcaatacgaggccagggcaagctgttagagccggaagagctggaccggctagaaaaggccgggtacaacgccggccccgcagaaacgaccaccaccgccgatgaacagtccagactcctggaagaagaacgacggtttgaccaagaactcaagtccgtccaaatcgaagaagttgaagacgaggaagcatgaatttcaatttcgatacccactgtacattagttatgacaatccaaaagccaggacctacagcgtgtcccgacataatcttgttgatacccacctgcaggttccaggcaggtcttacactagacaactatagggccaaatcctcccacctggactgtagtatactccgtacccgtaccgtacacgactgacctcgctggtgatactccacccatctttccggcctccggtctggctcgatttgaatctaaatgggtgtgcctcgatttccccacaagtcatcgcatcatgggggcatatggcttttcccttgccaataggagaatatcaaccatgcgtgtacgaccggcatttgatccctggcttgccgacggaaataatcgcgtcgtcgcttcgtttcgtggcggcccgtccgtttgatgaatctccggagtctcatatgctactggaggtaggttaggtgggatgcatcatgcatgctatattgtgctacgccgattcttaatctgatgcggctgcttctggggtcggtgggtggattgggccgatttactctcctcgctagtggatatcctgatatcattttcacatgctttgcatgtagcaagtactgattatatgtcctacagatatgatttcatggctatccttgttaatgaacaaggcaattccttaagcagttgaaaaagcagttgctgcataggtcataaatgaagaccaacggcttaagtaataggaacatgattttgtgagtgcaccaactcccgctcacttatcaagttttagctggagcaaaagttaatgcaccgtatcttatagggcctctacagtcaggtgcagcatgcattggtagttttgttctctctactaccttggtctccaggaactttccaactctacgatacaagttcgttgtgcgagaacttctcctcaatgccagaactactgtctgcaacatctcacgagctcgaattccagagcagaatcgtggtgcaccaggtatgcggatgatgaaagacaaagccaaccaggtctgatattgcatgggtgatatgtggcaaagtggaagtgtctaatactacatgatagacaccagaactagttgcggtcaatgacctcgggcagagactttgcgatacgattcctgcgttttcactcaaaagttctggcaaccgaagctctcttatactacaacttgagcacgatggaaagaatgataccgtcagccatagccaccaaaacaatgttctgtggaagatgattctgcaatcatgacaagacatctcactccaggcacttagccattcgctagcggcacctcgaagcccgcattacggtatacatgcctgtactaagccccctcttgctctactacgtgtggtagtgtccgacgcggctgatgccacgaggttttctcggttgcctagaggaaagtcagccagaataaaacagacaattgtcttaggtcgttggccatcgaagtcgtgactcagtaaccaacttctggagctacagtgggaataggccccggaaagcctggctaggtagtttaataaggtaggtagttaggagtagcagatctagttgctttatctcatgcaatatagcttattctttgcactgggcttagggtagccatgatcctggcaagcagatgtcccaagtctctcttcaatgtccatgtaagaatatgggactcgctgttttgccaatgcctgcaatactgacttgggatcacggcctgcagggccatgacactcacatgctctccctactcgtccaagtaggtagataatatggataataatatatgggcaatattctcacctcattagcacccatctcgcctgcactcactcctaaaagcagtaacgcattccgggctcgttgcacttctatccgcgtttataatggagtcaaagtacaaaaaatattgccaaaaacatacaacagtagggattcgcatgtggtcacccaccatactactaacctaccggcgtgtggcttaagtacggctgagcggacgggaagccctgttttccacaccctgtggtcgtatgtacttgataaatttggaggggaattgatatagaaaacaacatgccctgtggttgttcagtagtactttcattaatgggattggactgcgatgagtcttgaatggaggacccccaatcttcgtgctgtaactcatgctatcatctctaccatctctgacagaagcaggtctaatattgcatatatgttcactcacgcgtccccgaaaatagaagtcaggtttattactagcttgggtgcacctgctcttactcgacgtcgaccttggaccctctaataatttgattctggccattgttttaaacaatagcgtccgacaaggtagggtacaatgtccaccgacattgacctcccgagaagagagacccgctatggcaatgttctttggtgtttgttctagaaggacttccgcagacagaaaactttttcacagcaattattcgctagaaagcagtggcccactctcgcttgctaaggccttgctaagcgctagcgcaaaattagacccccgtgaaaaggtataaaaggcccttattccccgacaatttagaaaatcaagcgactctacgtatgttctcctggcccctacctacattagggattccctctcttcactcgagcatctgctaaccgtcttatgtgcagttcaaagaatcactttagagtagacgtccctcaatgagctcatctaatgagccacacccccaacccttgctgatgacttctatgtcctcgatgccctaaagtgaaaccgtgtttattcccgcctcgaccttgtctttcacgaacgaactgcttcgacatgctcgtttcgagttggcgctggtctagggaatggtgatgatcttaaccttgtcgtggcgtcttgacttcggtcggcctgacttggtgggtatcgaggaggtctgaaaggcttttccatcttcaccatgaatttggattgttcagtttagcaaatacaattatctttgttgaagttattccttttgataaattgaggggcgtg

SEQ ID NO: 5681 - DNA, 10310 bp, Emericella nidulans
gaacgcgcgggctgtcttagtcaagacgacggggatgtatgtttactcaagggatccgcgctatgagaggacttcgcgttcgatgtcgatttcgatcgagcaccgatggtgggcttatcatggtctgactgagcgtgctgcgttggagtgctatgactgctgcgaaatcgattaagtgcgttgagcggaacgctgggacggcggtcattcgagggttgcgaatttgaccggacagcctttccgttggcgaggcaggcgaaactctcaatttgctgttgcacggggtggcaggcttgctcccattgcgcaacggtctgctccagtggttggggtggatcgaacgggtactgctgctgctcgcagtagccgtatattacagtataataattggcgaggatgttgttctggatctggatctgcgccgacaacaagcggggcagtagggagaacacggcggtgattagtgggggtaggtgctgtcggagatgctcatctgctgcttggtattcctggggttgttagaattgcattgactgaatcgcgcatcgattgcaaacctctgttgctctcgccagatcctcctccgccttcagcaaggatgcgttttcgcgctctgatcgcttggttcttttcgagtagttctcaacgcggccatggtggcgttcgtaatccaactaaggctgtcagctactaaacagtgataatcagaactataaattgttgaacacctttcgatcatcccgcttctttatagctttcttgaatggaaccaagcactctttagcctgcgaggcgggcgcaatcatctgctggtcaatggctgccaagtcgtgaagaatatcgctcgtcaagtcctcatattccgtcttcagctttgtcgtcctcgccagcgtggcctctggagttgggactggcgtgtgggaagtaggctctgttgacccgatgatcggagcatatagactctcgaactcgacgagcatacgatcttgatgggtcagtagtgaagaccacgcaacgcgccaggccttagtcgaatcaacgatctaattggtagacaaattagccgatcaatgtcattaagtcaattcatgggttccgccaaagtaccttatccagcaatttgtccacctggtcaaaatcctttaaaagaagagccacttggctgtcgtcggccgaccgcttcatgaacctgccgaattggcgctggacggattgcatgatcgcatgaaataaaagagatggcaagaaatgaagcgagttgagattgtgggcaagaattcaatgaagtggtgttgcaaggaggaggggaaagaacggcctcatggcgacgagatgaacgctcatttgatgacgcagcaagcagcaactagcaactgagcgaccacttgcgacctcaaggtgcagtggattctacactctctgttcctatttttgtcccgcgttgtagatcagaatttggtggcagcctgctgcatagactctggactctagactagacgctggctgagctcgtaggctagatcgaggatggacaacatggccaacagcggggtgtatagtttagcgagatcgctctttatacttgcctcttagagtttatattgggaaattatcaaaatatttaaagtgcctaattcaagtctccttctggccgattcagccttcagccttagcctgcccgttgctgcctgcgtgcctgaacatctaatgctctccgcatctctaatctttgctctcccctccttcactgcttctgaacatctcgctacacccgacccaatgctctgcccacggcgaatcaccactcatcagccttgggcttgaaccccgctcagcatgtctattcctccctcgtcagtaacgacctcacgcccctctaacctgaccgtccccgcgacccagaacacggcgcccgtggtcaaattccgatgcctcttcacccacgacatgcgacgcaaagcgaaacgctggcaggatggtttccttcgatatcatactttcaataagcgggtcatggtctacgataccacgggctatttcattggagatcttcattggcgggcaccagaagggatccaagacggcgatgaattggagctggacaagggcgtgttgattcaggtctgcgaaccgctcgaaaagacagagacagatctctcctcgctgtacaagaacaaaactcaaccgtcaccgtcgcgccctagtgatccccggccgtcctccatccgctcgactcggccattgccctctcaacaggctccgcgttcgttgaacgacctacttgggataaagaagacatcgactccgcaagtgcattcgtcacacgaacagcgtgatccgcagaagcataaaagcacgtaccagctgcatgagcgacccacgaagcgccaacgtacgtctccaggacgtgtcaatagcccagcgcaggagatagtcgacctgtccgactcaccctccagaagacaaagtcctggcgcagggacttcttcggaacctccaagaccacagcccacgacagctttacccaaaacaccagaggcgagcttaccaaccgggtcttccgccgctgttaaaccacctcaaccaccctctgatcgtccaaccatgaagtcaggtccacagaccctaaagcccgccagaccaagttcggggacttcagtcgctacgcttcggttgaccaataccaagccacgcaaaaagctgatgtaccaagagactctagcgcctatacaaagacctctgccacgaaatcagctgtcccgatcaatttcccagtcagtatgtactacaatactggtcaattgccgtgactgactctctcaagacaccagcccacaatccaacatgagacttcaagtccagtaatcgtgatcgacgatgattctctggatactcaaccaatcattacccgcgaagcgatgcgggatacagccaaaccatgtcctccctctacctccaacgctgaaggcgacttgaatccaccagtcaccaagccctccttaccagacggacaccccagaaccccgcacatatcgagtctagccaagcagccgtctggagctgcaccgaaaccccgttcaccaaatttacgcaagtcatattcggaccccacgactatcgacggccttcctcttcgacctttggccacgacaagcccgcttaatccgattaccaagcaaaacgatgagcatgagcaaggtccgtggacgtcggaggcactggacttattcgagttttggcctccagggcggccgaagccaccttagtttgatgtcactaagaagcatggtctgctggcagacatgctttcaccagtactcactgtatgcatagacttaatgaccacatgaccataacgatataggctttgttcgattccatatctgtaatacatgatcttagggcacatcatcccaccccagctcggccccacaatctacctctttttaacgaagaccccagcaatgtaaaccatacaagtcctctcaaaccacctctccaaatccacactctcccatcccccatcccccgctcgttcaggtgccctcctcagcaaccgctccgtatcgcgattaagacaacagtcgcccataacccatctccatccgaaaaagtgataaaaaccctgcatcatccgtgccaatatcgaccctttaggcgtattccatggattaacaacatgctccacaacaagcaactttccacccggtttgagcaggctgtataaataggagattgtcgtttcagggtcaggcacagaacaaagcacgcggattgtgattatgctgtcaaacactccaccatcacccccatcagaggagtccgaaactaatccaatgctcttcaattccggccctagctctttctgcacaacactacacggcagaatcgtatacttctgtgccaatccgtagtccgcagcgcgtctgcgcaattcctcatgaagacctagacaaggctcggcgccgtagatgacgcttatgttggctgcggggatttgagagagaaggggaatttgtgtccctgttcccgggccgacgtcaaggacgacaccggttgcttgcgagataatggggggaatcaggtcagatgattgtagtgctttttgttcgtcttcttttgcagagctagataaggatgaagatgggaatggacttttgcttgcgcctgttgctcctgttgctcctgttgctcctgtgtcgccgggtgagaggtggtctgtcgatggtggttcttcacggtttgcttggttttgtcagctgatattgagatagaaagagaggttgcaaggggatgaaagcgcatacaactaaatgcgacccagaacttcccgaatgcttcgtcacgaagctgatgggcattaaggatgggtgctaggaggcgtccgctgagaacggccttaaaattggcgccgacgtagtctgtgttcatgttagctgggctaatccatagcatatcatgcaaggttcaaacatatagtagacaatgagagatacagtacaaatgattctaggtagtaagtggagacgtacaagacatagcccatgtcaaaattttggccggctccagcagagccaggagccattgccgggttgtgaggtcgtccctggccattccaaacgtacttcgaaatgtgagggaggtgtgggcgataacgggcttcggagacaaaccacggagactttatagttggggttcaaatgtggggatgactcatcaccaagctcgtctacagtacttatacagagctaagatgtgtgcagtccactccaacatgcgaaagcggatatgccatgagatggcaaagcgactacgtgcaacaagagttcaagagatattcataatgacctgcctatagatcaatctcggcaaggatacatccagacaccaacatagcctgcgttacaacctaagcaagcgccgtcatcaagatccaaaccaataccaaggttaaagtcaaagtacaggggcgcttgtagcgcatatgttggtaagaggagattcaacggccataatgaacgagtggcctggtatgtcctaacaaggacaataattaagaacaaatgaaatttcatgcgtgataatgatggataagaaaaagaaataaacatcaagttgcaggaaatgcagattgtagaagcaaggccacgacgaatcaatacgcaggctggaaatgacgccacttgctgggatgaccgtccagcaaagaaatgaaaccatggagccaagaaggtaagcagctactttcctggatgcaaggtggaagggcgagaccgctaataacaagacttttaacaacacaaccactccagaaattagtgatgggagtggattcggttggcgcgagggctgtagcggctcgtcctcgagagtgagctgacatcgtgcttgccatcgcagcaggcacggacattctcaagtcggtccacatcatcgcccctgtccatcatgtgccgaagatcttccacactatcgtcggggttatggatgctatcttcatttagactggaagccgcgtacgggccttttcgtccaaaagatcctttgattgtcgagttgaagatggtactcaaccgagacgacgaagcctgccttgcctggtccgagtaatgcgacggggggtacggggatgcacggccaggtgtcacactgggccgtaaagacatggctgagcctgaccgttgcttaggtagaccccgcgtcccgcgactctgggacgaggaaactgacatacgtgccgtttggcgcgagcgtgagcggaatccggggttgaactcgtcaatgtcatccagcgtaacaccattttctgcttcttcatcctccggaccgttccgtaccagcaggtaagaaagagcgttgaaccatgtctcatgtctttggcttgtagtgacagtgaacctgatcctacggccggggctgacaacctccaagctcttgcagtgaagccctggtgggtatgggttgtcgtcggccaccaccctgacagcttcaattgaaacactctttgtccgtccctcgctctttcccgctgtctgcggctcatgctcgctccagtatgacgtgcgtggtgtccgggtggacccagaaatatctgcgatgtctggtgttggatatttctccagagaccgctctgcgagtgtatttccagaggaattcaccaatcatggtttgtgtgattgcttggatcattcgagggtcagttcccgtggagtatccttgtggggcaaacggcggattgggctgcatgttgaaacgctcttccagctcggaggcaaatgaagaaactgaggatcgtcgagacatatggctatcgcgtctcacgctggctcgtgatgtagttgtcttcgcagagccgacttgaagagcggactcattcggcgtcctaggccgttgctgtgagctcgctcgtactgcggaggctggtgcaagtggcgggcccatcaaaccagcagacgccgggcgttgatcgatggatttcttctccgcagccatgatagcttctttatggtcagcaggtaatggaggatgaatctgcacacttgatgcttggctcgcggcgcttccaggcctcttgtgtaaagaggcattggaagcctggggaacagggcgcgatcgcgcctttggtgtggcgaatggtgagttgctcatctcgttgagcttgtcgctatcaggaggagaaagtggtctgacagaagctcggtcaataaggagttgatcgatttgcttggatgacaagatggtctgagcaccctggtcggcctggttggacgagcccgaccttgcgcgacggggagccgcatttccagagatcgcacccaaaggaagtgtcacaccgttctgctgggtaaccaacccatcagcagtacccttgtccgtgttgtcatccacgacaacaagcggtggggcactctttgttgctttagcagtgctggccattacactagggggagtgttctcgtcgagagccgggggcgtgggcaggattagtacatccggagtatattggacaggcggtgtttcaactgagctaaccgtagacaacgccaactgcggtgctggcggaataacggcttcttggagctttggcgcagttggctcggtgtatgcgggaggggtgaggaagatgctcaatacgggatgagtggattctgaggccacatcatccacagcggccgcttcttcctttgcctcacggataggctcaacaggctcggtctcttccgaagaaatgctcgaaactgagaattccacagtatccgtgcttgttccttgctcggtaagggacagcaccggctcaggaacgtcatccttggtctctcgaacgggcgcaacaggttcagtttcgactgaggagatggcgggaaacgaaatctccacgtcgtctgtatttgtcccttgttcaacgaaggatagcgggccttcagggacagcttcagccacgatggcgacgtcttgctttggctcataaaccggctcaaccggctcagtttgttctgatgatatagccgaaactgaaagctccgcaatatctgtacttgtcccttgctcggcaaacacgcgttcaggcgcaggctcaggaagcttggcaaggatgggcagcgtatcctccacgagaatctgagaaaatgccatctccggtacatatattggttcgggctcgggcggagcaggaatgacgggctcggtcggttgagtggtttgtgacgagattggcgacaaggctacctctggcggcacagggacgggagcggcaacgggttctgtcgtgcttcccacgaagaaagctgttctcagctctgggaagctgggagccaccggttctgtctcttcaaaagatacagaggatatattcaactccctctgcgttgtagggctgtcgggaatgtcgactttccgttcctcattgagagtctggccgtcccatgccatctttggtggcgtaggcacactcaggacatgatcgtcacttgtttcggcattaggcttcagcggagtccactgggttgaagagtgaactaagctgggtgactccacaacatccatgccagtactggcgtccgacattgttggcttatcaggcgttacaggaacactgatgaccgtttcatcgtcagtctgagaagcgagatgaaggttgggctcccaagggtcagtcatgacgccggagtcaaccatatcgggcttcgagggaagctccacggtaactgcggacggtctccttgaatcaaatcctggaagcatgcgcggggttgagggagatgccgcctcgaactgcatcggtggaccgaaatcatcttcatccccatcgacttcggcaagctctgcaaagagactttgaccttcaggagccgcggatgtatcccgagtgaagctagtcgacggggattccctagcacttgagggtcggctattgaaggccatcggagcctcgccggacgggcgaatcttgcgcaaaacgctcctcttctttcgcaggcggtaacggggtgtggagaactggctaatggacggcgttccaggatctgtactgtcaccctcatcggcagaagtggatgcggtgctatagtaagatgttcggtcacgggcctttgccaaagtcatggaggagactcgtccgcgaggagtcctttgaacacgatcttcggtctcagtaagttcatcactatccgtgctgtcgccagccatgctctccacgccggtctggaaggcttcactttcggttgtggtctccctttcattggcggtctcgaagggatcatcagcctctgtcgcagtatggtaggcatcactacggtcatcaatcggctggtctccacggcgatcgcgggaatcattagacgctttatgagtcgggctgatgtcgccagcattggattcccagtccgagtcgtgaatatcgacatccgccatctgtctaccggcacccaacaggtccggacgtgcaggtttgcgcgtctcggcctttgtcttttgtcgcttgttggtaggtccattggcagcaaccgagtcacggcgcgctgctccacctcatctcgagcttcttggagcatgcgcttcagctcgatcttctcagtcttctcacggtggattgtacttcgcaggttctggatcatccgatgagcgtggccaagcgagctccgcaaggtctcagtctcaaggtggttatgacgaggggtgaatttgttcggcgacggtggaggagagttctctggcgtggcttgctcttcgtcttcggaatcgtgtgggcggacaacttccctcgtagactcggcttcttcgtgccgcaatcgcatggcaactgcttttgcgagctcttgattctgagtgttcatatcctcaagcttccgctgaagtgtgagcctctccgcatcaccggcactgaggttccggcgtaaagtattaatctcagcatcgttggccttctgagccgcagtatggtcctcaatgagtttcgcgttcgcttgtttcaggtcctccagctcccgctccatggcgcttttctccgcagtggccgcccccagactgctagttagtttcgtctcacggtctgtgacatctttcacggcagccatcagctcatggatcttggtttctagcgcccagttctcgtccttataccgttcctcgctctcgtccaaagcgcggattcgttgtgcataaccctccgcctctagctccagtcgcgacttctccaggttcacggttttcagtgtctcttcgcgttcggcgagcaatgactgcagctggcgtacttgtgcaagtagcgacgtcgagatttcggtggcaaactcgatatcatggacgcggttcgactggtttcgcgatttgcgcgacgggacgctcactttgctaggcgaattggtagcttggccggcgaatagtgctgaatggagcggcgactagagtcggagaattagcaatctgtttctggggcgttaatcgcttgtgcgcggctaaagcaaaccttctggtccatagagggtgtgcctaggtgaccatcatctccaccagcaaggcgctttggtgcaaggaacgcttgcgccgtcttctggcctatttcgcgggaattacgctccaaatcggccagtttccgacgaagcttctcaccgatttgacccttctcctgctgttggttcacttttttgagctggttctccaaagtccttccgtttgttgaaatgcgcagttcccagattggactcttgcttaagacaggtcttggtttgctgctaaagggacactgaaggcctggttgcttgcgcgggaggtccatacttcccgttagaaccatttctcctttatcgttaatt

SEQ ID NO: 5682 - DNA, 4551 bp, Emericella nidulans
ccaggagacaatatcaacgactaaatggtggccgatcatggataggagttgtgcgttcccagatacatcaaaaaggtcaaccgcgagaaggggtcccgtgaagcaagagagcgacgattgactcgccgcgacgaactcgtctattgcactctccgaatcgacttcatattccgcccaacggtaagaagttgtaacctcgtttgttatacgctgtcgaatcacagatccagggccgattacttcgaaacgagctctcagcatagaatgcctcaataccagtgtctctaccgcttgacggagggttgtggcatcgatacgtcggttgattttggtcaggatactctggttgaagtgcccttggccctcttgacggacctggaagtgaagagcctgaatgggcgaaaggtcaaaaggctcttcgactctttcgtcatagctcacgggggcgggggttgaggttgttttggtgcgagaggcgaggtccccaatggaggagctgcgaaggatatcctgcacggtcattgtgagcccatgctttttgcactggttcatgcaagtcatagctgcaatcgaatcgccaccaagtctcaggaaactttcatccggtggaatctcctcgacggggatattgagcagccgactccaaacctgggcaatctggagctctgcatcactcagaggcttatcctggaaggaagccactattgttgttgaccctgtccggtagggatctctatctagtcgagctagccactggagaacgcccttacggtccagtttccgagaagggagaaatggcatattctcaacaaagagccaaaccgcgggaaccatgtacatgggcaattgtccggatagtcgttctctaagtgctgtgagaggctgcttgggaggtcctggtgggagaaggcgcaacggttctgttttctcttgcttttcctcgctggtcttgattgacaatacagctgtaagcttcccagcagcgtagcactctttcgggaggaagacaacacagtgtttgaccagttcatctgcattcagacaaccttcaatctcccccagctcaactctctggccgtgcagcttaatctgggtatcttttcttccaatgtaggtcaatgatcccaagtcactgttgtaacgcacgaggtcgcccgtcttatagaaccgacggcggctttgacccggtgtcagtgctcgaagtacgaactcaggatcatagatgaatgcctcgttcgttttctcggggttgttgatgtacccccgagccagcgttgggccttccagcagcatttcgccaacagcaccgactggcacaagttgattgtggtcatcaggattgacaatccagcagcgagtattgaggggtagtccaatatctctgcaatctgtttctgcagtaacgtgagagttgatggctgctgtcacagaagcctcagtcggaccaaacccgttgaccaagttgatagttgaccatttggcccggtgcgtttcactcatggcctctccggccaaaattagcgtcttgatttctggaaccattgagggttccaggaattcgatgaaggagggggtaagcgatgcatagtttgcgcgtaatcgtttgatcgcccccattatatcgttcagcctgtcatcttcgctcggaacgcaaacacaggctccgtgcatgaacggtgagactgattcggccaggctagcatcaaatgtataggctgcaaactgtaggacgcgactgtccggagaaatcaacagccgtggtccatgggccatagcacttgagcaataggcgcggtgttcgagcagggtcccctagacattcatcaatcagtgaagccaggtatatctttctagaagcagcaactaacctttggctctcctgttgatccggaagtaaagataacatatgcggcattggtgcagttgaccctgtctgacgaaatgaagccaaccggtgcggagggaattctctcgagggtgatctgcgagagaggaatgacaacctcggcaaggccaaggagacggtctgcatgccactcagagcagagaacaagttttgcgttgactttctggataagcgactgaaggcgcgccggggggtgggtagggtcaagtgggacgaaggcgcctcccgctttcaacacggccaggagggctacgaagtaccacatctagaagcggaatcattagtatcaagtaagtccctcttggccgggatacacgtacagatttgtcaaaacatagaggaactaaaacctcagggccgacgccttgtttctgcaaatgatacgccagtttcgacgcctggcggtcaaattccgtaaaggagaggcttccgtcccaggcgcagatggcttcatcaagtggtcgacggaccacctgctctcgaataatatcatgaatacatcgatcatgcacttggggcgaagggccgttccaagcgctgatcctttgccagtcaggctctgtgaagtaattgaagtttgccactggtatatcctccggcgacagaacgcgggttagcaaattctgaaaaagaacagcaatacctttgacatgctccatggacatgccatcgttgcgccattcgaggaatatgcgcacattccctcggagaactttgacgtgaagtcggagaagacacttttcccaacatatcagccatatgtacgtaaaatatctaggattcataatgcatacctgctctggaagtgtcagtgccaatgcagatgggagcgacgggactgctgccccctgtaagctgcccacgcaagaccggatcagcacaacggtgttagatagctggtagccgtcaccgagggcatttcggccttcgatgatggtaggaggtccagcaaccgtcgctcccttggccttctcaacaattgtactggtgaagtctccatcgccaatgactaatcgtactgtggtcagctccatagcattcggtgatacttccctagtaaccgcctcttctcccgcggcaatgaactgatagccgaaacagacatcgcccgagtccatataacacctgagaatcagtccccatgcggcctgaatgaccgcgctcagcgtgttattgcgccaagaagatagcaaacgagcatcgtcgccagcgttgggactgactcgtagggacataggtctttgcgtctgctcagtggcagaggcaaacttgggaagacaacagggggtaatttgggccatctcgtgatatcggtcaagtatatatgcaggctatcccaacgcaactttgaaacaaaagaagggtatatagctttttggtaaaagtgaagtttgtgtgatgagcgcggtcagggaaatggaggatcaggccaaacgggtgctcagggtcgacgatgcagtaagaagaaatgtctttgaaaggaggttacgcgcggggatgtatgatagaatgatgtctgattgtagaagcactgtgaaaaacaggtgtcaagagtatgaattgctgtagcgatgcagtcgcgggaaccaccgagatgctgagatcgtagaacgaagatagatcgtcgatcagatttcgtactgattgcagatcgtccatcgactgcattatctataaacgcatgtcccaaggctcacaacatcgtgtcaatctacctctatccgttccaatctccggtgctctaaaaaaagagctcacccacctcctccgcaatcagttgaagcacctacagcacaatgcaaaggcaggtcggtaggatacgaacgtttagtggcttctgtggacgtctacttgtcgccaaactcagagttcccatgtttgtctcggtgaatccagcgcgcagacaagactcgcgtggccataggtccaaagtgaggattgaattcgtattccaagttcgtgtgcagcacttagggttagagattagcagtaagattaccaaaaatggtacctaatatcgtatacgagcttgacatttgccaatcatccgcagatccaaaaatatctccgccaccagcaatcttcaagccttcaaggaactaagacgtagccacgccgtcagcaggttggaccctgcgtagtactattaccgtttacgtctctggcagttgaatcctgctttctgcgcttaaggagtaactggcacattcctgacaggacattgcttgacgcacagctccgatgcaccactattaccttccgtttaatcttttgtttattggttaacaattacaattcctacgtagaccattatcctactaacgaactgaaagttttgacgtcttaaccgcatatattgcgacattgaatctgtcgacaggcgcggggtggatgcaccgcccccaaatacacgagcggcggatacgaggagcattaatcatacattccccgcgggatctggagccataccgtattagtataattacagctgtttcaagatctggctattctattctggctaataatagctcgatgtttcttgctggccggcttgtactggttgaacccaagtcccgtatgcagtcgcgatgaccccacagatatgagccctatatatctaaacagcactataaggggcgtttttc

SEQ ID NO: 5683 - DNA, 1838 bp, Emericella nidulans
aaaatagcctataaaaaaaaagggggcgaataatgttgtggttttcggggggggccaaccgggggttggtcccttcaccaccaggtgttgggtgtcctgggagaacagagaatgttggggttccgccggggcaggagggggggggggcccatctcctttttatgagacattctagatatcgggggggtaggaatagggggaatgtgggactacattcaagcagagcaaagatgatggacggatgaaaattgtttcagggtgccccctggactggacagcggcaaattaggaccttgcatcctgggggttcgtcagttgtgtacataatcctatatgctgaatatgatgatccgggttgtgccggagacaacattttcgaccgcagcttcaagtgctacgtccgtaagagcgccggggtgtttgggtacactaagtccctcgaatgcgcgatatcaggtcaagggaaagatagatgcgctcgcgaaagtggcgtaaaggctgcattcgctgtctccgggctatcgccgatttgaggatcagccgtggcaacatccccagcacgagtagttgaatgaagcacccatgacgagaaatcttacgggaacacatcataccagagggtgcgggcatacaagagtgcctctcttttaactgctacaggccataaatggagagcaggagtttattctgaatagctttgatcagggcatccatctgaagctcggctgccttatcaagcataatttcgagaacagtcaataaaagcacaatataagttaggaccctttttgaagatcgaccacgcagaaacaggcctggttgtctggagtggtcttttctttgctactgttgctcatgtgcgactttcatgtgactttttatgtatagactaagtaataaagtctccttatgaggatacaagaaagaagcgcctgggaccagaaatttggttccgacttcggctctgtttcctatatgagaatcttgccagctccggcttgtggtgacaggaggctccagtgagtattaaccactggacacgatatcaggctgcaggtttgaattgagacctcgagagaggtccaatagatacacaaaagctcatccaatcgagaagttcatttactcgtcagccccgtcagccttcttagccttcttcttcttgttcttgttcttcgaccctgtggatttggacaggggaagctccaggatcttgaggatttcttcatcctcgatcttcttgtcagacttgatcttctcgaagtcgggcgtagcgggagccgccagcttggtgataccgttcttggtgatcgctgccacggttgttagagactggttcaacaagtatgaatgccaacgacattgtgccgtattcgcagttagaactcaccaattgtggtcaggtaacgggaaaccgcagcgttgtcagcatcacccgcaggctcatattgcctcaagacaccgttgcgaacggattcaataacaccaaccttagctgccttctcgtcatcaagctggcgcagactgaaggggaactggccgaacttcttgacgatctcggtgagagtcgctcgagagctgggtctcttgagctggtatgtcgtggtagtacgccggtgcagggtaggacggaggtccaggttcttcaccttcccggatccaagggacaggccaacctcaacaccccaaacctcgccaacatcaggaacacccttgcccttaacgccggaaccgggggaaaagatgatcttcttttcagcttcaatctcgttgcgctcgaaaagccagctggtggtgttctcaacgatggtgcaatcataggtcttaacgattctttc

SEQ ID NO: 5684 - DNA, 7445 bp, Emericella nidulans
gcaggatttttacgggttctaccagtccctgacggcaaagacatattactggtttgatatccagcggttctttaagccgggttgcacactgataatggaagaccgctatgatatcgagacatctcacgggttcatgcttggagaggaggccccaatgaccacgccctaaggtagaccatatatggcagccgtgcccaaggcagggtccacattctgcctggctgtcaaactatgtaggaacctgaagtactcgaacgcaaataagaggtcaactagactgagaatgcgcctaatgaacaccagattagtggatgaagctctgagcggctcaacaacctgcaaaagaagccgtttcaggatgccttctataaactttttgcatcgccaaggaaacacgtcacagaatatgatgatcatgccatagggtaaaagtcaagattaacaaaacatctgcggggccaccagccatggtgagctgaatcccagttcagctcttcagcctttcgtgccataaccgaaaggctgaaagcgggtctcgtaaaggacaaagcgaccgccttgccaggcatccagcttattggctgttggtttatttgtagagtccccttaactctctctaccccaccatcgcccatctccaccgacgcctctctctctcgtgttatttctccccattctcgcttcatttcccatccattttcgagttctgcaatatcctcactaactagtatagccatggtacgcctcactcgatcatcatcgttgttgctgcgctcaaacgcatcccccgctgtgcggggcagatctactggtgtcctgcgtagatgagctgacgacttcacttccaggccgactctctgaccgaagagcaagtttccgagtacaaggaggccttctccctatttgtaagtgccattggttactgttatatcaaaatcgaatttgtattgagagtatactaatacattccgcactaaacaggacaaggatggcgatggttagtgcatctgtccccccaggcttgatcgcattcgcccagcatgtctgctgtagctctatataaccgtttctgacaaacggcgacaggccagattaccactaaggagcttggcactgtcatgcgctcgctcggtcagaatccttcagagtctgagcttcaggacatgatcaacgaagttgacgccgacaacaatggcaccattgactttccaggtacgcgaactccccaatctacttcgcaccagcctagaaatgtactaatgctaaacagagttccttaccatgatggccagaaagatgaaggacaccgattccgaggaggaaattcgggaggcgttcaaggtcttcgaccgtgacaacaatggtttcatctccgctgctgagctgcgtcacgtcatgacctcgatcggtgagaagctcaccgatgacgaagtcgacgagatgatccgcgaggcggaccaggatggcgacggccgaattgactgtacgttggctccccgcttatccttgaccgtagaagaggtatgatactgatcggctgcagacaacgaattcgtccaacttatgatgcaaaaataaacgctcttacctttgatgtttatcgttagcgaagaaggtgtggacactttccagctgtctcatcttagttgtcatatcattgaatgtagcctatctgattgcggataagcaactgatggttgtaacggcttccattttgttctgacttctgagtacccttttccttcatgtttgttcgtcgaccattctgctagtgagatatgcgtagagttgggtaggctgaatttacgagtctctgttggggatatcacaatcgttcactacaatctttctctactcgtttatcatcctgacttctggccttttgtgtctattttttgctacgtcttaggtagacttctcccctttttatatcactgggtaatgggcgcggctgatctctgcttttcaatgattgtcaccatctattgaaactccggtttaaggcaatatcaatacctttgctgagtgaaatcttattatgggaacctggtacgcatggaattgcaaggtagagcaaccgtgcaattagacaattcatcggttgaatctaaagatctccatgaactgccttgccacatccaccccagcatccggatcgggatcttcatccacctgtaacccactgccatcctcatttacaacatggctaacaccctgcttgtccggctgtttcagctttcgtaatcgctccttaacctctttccccacatccgggacaaggatcgcctctcttgcgccctcgatctccaatttcccccaaaactccttgaatcaaagccgcaggttgccgcatactcggcatcgatatcggcctcctccactccatcgggaaacgccatatcaattcctgaatcatggtcctcgccatcctcgttatcccacatataggtattagaagccaccctcctcttctgccttctggaccggtacaggccggagagcgtggtagccagcgagggaccctgccattcaatctcgacaactgtgcctcgcatccgtacggcaggttgcgtctgccgtacgtccccggcacgtactctgaaatcgccgatttcgtagactaccccatttggcactgtgaccgtgtgtctatggcaccaaaacggctgacaagcatatgagaaatgctgatacagcgccccggttgatgggagcggaactgttgtcatcaccattggcgttgtcacaggcgtcgcctgggatgactgtgagctggatggggtaggagctgctactgctcctggtccatccttatctgcctgctgggaagtgtagatgaatccgtggttgggatggtacgtaagagagagaaactgcatatatttcggtgctcctgggcgttgtgtgcctgagtttggaagacaggacggtgtgtcgcgcatcagcttgtgctctagggcccaccgtgagacgggggttgcctcatcggcaaagagcgcggttaggcgctccgttaccgttgctagagcagtggcggcattggggttagaggggataaagaagacgctggcgctcatcagctagagttgtaagagatgtgagatgtaggtaggtaccctgtaagagacatatccgacgctccgcaattggttttgaaggcagcttgactgagtgtattatgaacaagggtatatttgggctttcgtactgaacgcgcagtctctcagaagcgcgtttgccgttgtatagacgctgtactttgccttagataaggcagctcaccttgcaaattaggctaggtctacataaaatgtcaattactgaagcatggatgtgtcaggtaattctttaaaaacaaaactgacctcgatagacaggctcaaccaaactaccatatagatttgcttagattagtgaggatatgtagtatagagagggaaagtatggcacgataaataaagcggaatagtcaggtacgtcgtagctgctctttccgcttcccaactccagcagtagatttgatgtggctgggccgctggcagcttcagactgcagactacaaatgacggataaatgcaaactagtcaaacactcttgtctggttgtggggggccgctctggggtctatgcttctcctattcaccgcgatcatcgtgccccataattttggtctctttttgtctctgatagaggcgatgtactctgagtgctcgtcactgccttcgatgtaccctaactccatgcaaagatgtcaaactcaacacaaccaagaccaaatggcccctgtctgaatcgccaagactcgtgacgcgggagtctgagccccaaattagaagcgctggagaagattcgctctggaccgcccgtctcggtccctggagccacagcttacgcaacgctcgtagatcgaccgactcatgcttcgagcttgtgaatgtttctctgttctacctgatgcagtcccatcccctattgctggccagactcggccatcaagccacagtctcagagcggctgccacactaacaccatgccagggacagctccgttcggcatgccaactggaatccgggtctgatatggtagcagaagccgtttcacttcattcgtccatcaacagctccagctcctgggaggcgactagaagtggaatcagtgccgatctttttagagatgacactgcactgaccttggatcccttcgagagatcggcctgtttctccatcccccttgggcccttgatagactgaggacttcccagatgaagtttcacttgcaacctgggaattctttcttctcacaaatttccaaccgaaccaaggttgaaactgcgctggcattagcatgccgcagtacgctcgttcatgttgctgattgatcaagaattgatctggctcaagctgtacacagctatcccttcctttcaatgcaattgacgtctataatcatcctgccaccgttccctgcatcatgctcctgataaagaaaagatatgctttaccgaccttcattcttacatttcttatctatctcgtttttactactctaccgccaggcgcggagaaaacttacattgaacattactcacaaccagcccacgacataaccgagatcgccaaagacaaccgtatccactggactaagcacgccgagcagtatccgattgccgattatatctctctgccaactgcctctccagctccgattcccaagatccaatacgacttccccgccgaatcatggtttgctcgtatatggcggaagaggaagcagggcgcggtgaaggaggctttcaagcatgcgtggaagggctacaaaagcaatgcctggttgcgggatgaactgtcgcctttaagcggtggatacagaacttcctttgctggctgggcagccacactggtggatgccctggatacattgataatcatggatcttacagacgaattcgaggaggcgctggaagcactcgagcatattgatttttcaaccaccgattcaatccagatcaacgtgtttgagacaaatatcagatacctcggaggtcttcttggtgcacacgaccttacagagggcagatatcctattcttctgaagaaggcgactgagatagccgattttctctacgggtcgtttgatacgaggaataggatgcctcagtctcggtgggagtggacaaggtgagaatgcattctggttactgcttggacaggccagcttcggccctcaaaatgattatttcatcatattgatagtagttagatccgcatcgggccagaccattcatcctagtgggaacactattctcgcggagctgggttctctgaacctggaattcacccggatgtcccagttgacgggagaccagaagtactttgacgcgattcaacggatctcagaccacttagaatcagctcagaaagaaaccctggtgcccggtttatggccaatgatggttgacgccgagagcatgcggttttccgatcctcggtacacaattggtggtatggcggattccgcatatgaatacctccctaaagagcatatgcttcttgagggtcggacgcaacagtatcaacgaatgtacgaatccgcaattccagcgatcaaggagaggatgctgttccgcccgatgaccaagggtggagaagatatcctattttcaggtaacatttacgctggtacaaaggccagtcggaaaaaggtagaggcacaggcggaacacctcaagtgttatcttgggggcacgattggcatcggggccaaagtgttcaatcggcctgaagagctgtcaatcgctcgcaagctaaccgacggctgcatctgggcgtacgatatcatgccctctgggatcatgccagaagtcatgtatctcagcccttgcgacgacttggaaaactgtccatgggacgagcaaaagtggtatcgagacgtgcgcgcgcggccaccgcctcatgcgaacattgcggatactgaggaagcggcgaaattgcttatcgagaaattcgacctggtcccaggtgtcgccgaaatcgccgatgcacgctatatgttgcggtaagcgctgaaacagctaacgtgagcgaagtttgctgaatgtttggtaggccggaagcaatcgagtccgtatttatcatgtaccgcatcacgggcgacaagaaatatcaggatgctgcgtggcggatgttcaacagcattgagaaggccactcggactaagtatgcccatgcagccatcaatgatgtgcgagaggaaaacccgaaacaattggactatatggagagcttctggctggcagaaaccttacagtacttctaccttatattctccgagccggagctcattagtcttgatgattatgtgctgtaagtcccctcaatctgttttcatttggctacctgcacggttacggagaatctaacgacagcacagaaatacggaggcacacccattcaagcgtccatcgtagtacatggagtccttgtagcgactttcaattcagctaatagaatggcgtacgtgcagggaatttgtttgaactctatgaattattttcgttgattcacgttctacgtagacttgcattaagacatagttctattatacagcaagtatattcagggccgctgtccgcccaagtactgatcccagtactccgactcatgatgcaagttcttgctcgaggattccaccccatcaaactccacggtatactgcacgtcctttcggataatcatcttcccacttccttcactccatctccgcccctgcgtccagtccacaagctcaatctcatcggtcccagccgacccccggccaatcatcccattccccctttctacctttgctcttgcagtcccagctcttcgatctgaattcccaagcatcgctgtttcattcccgatagtctccgttccccctttggaccccccgcccgaaccgcccgtagactttgaattcgacccagacgatttatcccgactactttcaagcgtagaatccccgccgcgtccgtaatttgtgctgacggctgctataaacggacgcatgcagaagacgctgcatgcgacgagagcgtagttgagttcgacctggccccagattaaggacgggacggcgtcgagggtggggtctggtgaggtgagggattggtggaggtagtagatgtggaggatagcgaagacgatcattctagacggtttgaaggggttaggatagattgaagagcacggtttgtctggcgccagatgggacgggtaaaacgtacggaagtcgaaatataaacgcgaatgcgatcgtgaattttcgtttgacaggcataaaaagacctgcaagaaggaagacagccaggccgaagagaatcagttcggtggttatgtcaagggcgacgataaactgccatcttggtaactaagcgggcgaaccaccgtctgtatcagtcatctgat

SEQ ID NO: 5685 - DNA, 5459 bp, Emericella nidulans
  unsure (1)..(5459): unsure at all n locations
acgtcgcacgtgtcttcgcgctctgttcgtttgctgacgcttggcaggattgtcagattaatctattctcgagattataccgatcgctatcggtgtttggcaatatgagacgagtggtgagatgaaaaattggcagggacgcttatttgccgacgctgacggcttggtgctgaaatatatataaccgcgcactatcttcctcccccattctagccgccacagatctatataacacgtagtatattatctctagctattaccatttctagactattaccacacagccaaaaactagatgatcctgcccatgatcttgtccttcaccatcactggcgcagcctcccgctcatgtcgataatactccttcaacgcatcagagaattccagcccagaaataaggtcaacattctcgttcttatggaacggcgtgcttgagaaccttccattcgattccggtacactggcgagagcgatctacccgcgtattagtatgggctaatggtatagatacccaaaagcagagaacacaaggggggattcactacaatgccggatgcgatggccaacgtggagaacactctacgcagatccacctgcataggcatcagaacctgtggccacactggatccatcagcgtgaagctctgagcactcggtcaaggggtagagttgtacgtttgatcattatatgggaccagaatctataccgcaagttagcgtcttaccatatataccagacgcggctagacttaccccgatgcagagacaaccactaataaagaatattatcaagcgagtcattatagtgctgaatgccttgggactgttcgatgcggatctatcgcttctccggcaatcgctgcacgaggattagtcggtggacatcgcaagaattcaagaaccgactcgggatgtactctggccctcccatgcagaaagcagcaacgttggcagcgtctacaaatgacatcagcatgcccgacggcttagcgccagcccatagtccgggctctttccagtaccggaaaccgaaccgactgcaaagagtattagggttggcttcagcaactggggagcggacacactcgttcatcgggttaactcccagcatgacaccaatcctgtagataatcaagcccgcagcgagcaagatcttgcccagggcgaacctggcttaacagtgagctcggatcaagtcagaggggggactggtgtgcttacactcggcttctccaaaaagatcggctcggtatacgttgattgcgaggtagagaagtggcgaaagtggtgattgttagtctgctaatttccaggcgcatggagcatactcgagatgaggatcgcaggcgattgattatagccccagggattgaacaagggtgtcgatgactgtggcctcgaagatgacacaggaggtttgcgcaaactgtagctagccatcagccggcggccttgatgaatggccagttcactaacaaagtgattccatcccactgcaaccccgagcgccggattagccatccgacctgctagacgaataaaggccccatcgagcggaagcagagtgacgatctccgtctctagagggtttcagcacgcacttgtcagtcgtagggtggacgcgtaaccacatacggcactgtgcgacagagaagacagcagaggcccaaaaatggacgctaggaataagcacaggggcccagacataacaccagattcaatgcccacgaagagagcgctgcagattgtcagtgctatctggctacgcggatacatgtagcgcacgctccaatggatccagccatagccgtaagttgaatctgcctggggtttagacgacgatggtttacggcttgttctatggccgcgctcagctcggtctcgtctgacttcgaagggtgctcggcgcttccaggcttctgtagagaccggtcagtcaggtactcgcagagtcagacggttcgtaacagaccagagccacctcttcgatatccacagattctgtcctcgacatcggactgtcctttttggacggggattgagtgtcactaatgctagaggcgggagtctccatggcagctgttggaggcagaggggatgaaaggagcatttgaggcgtttatatgccacagcgaacgagtcggatatgtcaggaaggtccaaccagtgatgaaccaaagaaatcaagcaatatctagcgcaaaaggtgttggtgagttgacttgttgctatcattcgcttgatagaccttgcagcatggattggtcaaacccggctcagtcaagagatcgggaaaatgaacaacgacagagactcaaaacctaaattgcaccataattggaagtgggtgtgagcactgtccttcatactgattctgataggagaggtggccggagaaggaatgtgacagacagcgagtattgagacatcagagccgggatgcgctacttgggtctactctggagataagaatggcaagggcagtgtactgcaagcctggagtctcctgatatcccctcatatctccgcatataccgggccggtatagttggctgggcagggggtcggtggcccacagcagacctatgttgtcttataatcagacgcaggtccaactcatctcaggtcccatctcctctactcaacctcacgatggccccttccctcgtcaatatcgattcctcccagccgctcgaggagatttacaagcttatcgaaagagatggtggcgtcctcgtttcctgttgaaagagtgcatggaagcgagtgcaggaaacttcactccgtgctgacaccaaaaaaaggaaaaacattaataatccaattccgtttagttggccgttctttggatgccgcaagatctatgacaccaatgcaacgcacgaagagcttggccctgatttctttccagagggctcttagcgcgtctatgtacgttcaacccgctatccatagcccaacatgaagctcaaatctcgcaggccctactcaccaaaaccccaaaccagctcgtcaagatcatgcgtctgcccgtctggcagggaatcatgggccgattcttgacgtgaggccctccccccttagccaacctgttgatcattagaacgcacagccacagtgatgaattcgcctcctacaccggagaaacttgttcaccaaaagagcggctacatgctcgcgtcaaccacagcacttagtttggttcctggagccaagtcccagccgttgcatagggtaaccactgcgcccctcttcatgattcgtagttcttgaaagagtctgataggcacgttcccaggaccaaatcgcctatcaagcccggtctgaccccaacaatcccttcttcactccaatggtaggctgcctgattgcagactcaaagactacttacaagaatggggtacgctcgttccacttccaggtgtagtgatggggttcaataagaactaaaactgcttccacaggctacgcccgtgatccccggaagccacctctggacgctgatcgcatgcccaaatttgaagaatgcacatacgccaaaatggagcctggctctgcgctttttacgatgggatgtaagtgtctatctccctccccattcttgcgcggtgtagcgcgctaatgactgactcgcggttctgcacctatgtagcaacctaccatggcgccggcgagaacaagtgcgaggtcacggccctttggctctccccactctctttgccgtcttcgggtaagtttgttctcctatcatgtctaaatgggcttaacctcccatatttatgcagtcaacgggattacttccgccaggaccaagaggaggtcctctctacgccaatcgagaagcccggcagctaccagaggatattttcaagctagccggctactgtaatttatacccaattgcccctgcttgaggacaagctctagactgagctaacggaaaccctaaacagacaaggctgttgggggcgttggatacgtagaagaccatcagatcccgcatgaattcctgcacagggattattttggggcaggaaagtttggtgcggcaagtttggctgctaagcgtatagcatagtatttaatcggctttatcgtctttagggtacatgttactgagctcaaattgattttaatatcagaatctcactctagataacccttctccatgtgctcgctctgggcatgctagtcgggctcagtcatcattgaggcaagttagggttagacaaaatagatatgggactcggtactagtgtcggatgataaccactagccgggaaacccccggattctaggctgacaaggatatttggagtcagacggaaataaggtccatccgccaacgagtacactatctcactgtgaatggcactttctctggcgtccctatgcacgatcaattcctagtttcattgaaactggccagggctagatacatgggtgatgtgataggccaattgagtcatgcaatctgaccgtgttggagaacacaggatacttggtttctgacaatgacagggatgccgttcagatgatagagaaagttggtaaggtccaacctatacagtgcatcctccaattcgtgggatatcgttagctccaacttactaccctacgctaggcctggacgtacgatgggaagatggctggccgacgctatcaccttatcatataaacctactctaagaggcagagagccgtttattggtaatagacggcagtgggcttacgaggcgtagaaaatatcttttttcaaatatgtcatatagcgcatatcatcaaccgctattctctgatactgttcaatgcgcgacctaaggctgtatacagagtttccctggttaattgagacaatcatatacttcttgaataagccaattaaatgcattgagtccacattctggagccataaacagatcatttatgctgtggttgtacattattacgaggtaatttttgctcggacaggggacttggactggattgtggaggaacaaggtaatttcctctttgcgtttatcttcaggttaggcccgtaagcaaagaatacataagatatggcttacactcaaggagcactctgcggccgccatggttatctctatagttctggcaccctgttataagctagatagacacctatgagcttagcctgccccacacatcccaaacctaaaacgacagtaagtgtactgtggcttcaccgccttggagcttccatctttctgttctgctctgtgccagcagcgagcaggacgcttgaatccggaacttacccatacgtttgtcaccacacgcagagcatctgggacctcttatctcagtacacaaactatcaaaatgccgcctaaagcacccaaaggcgaatatatcgaaacggtgcggtcctctctctcttcctctccttcccctcacaaccccatccgcagagctgcgcctagcaannacattcacct

SEQ ID NO: 5686 - DNA, 7532 bp, Emericella nidulans
atgaaaatatgcagaattattcggaaaaaaatacagccgtcaccagacgctcgtgtgagaagtttgaacaagccctaaacaggcccaaaacctaacctcccctgcctctgcaactcctcaattaccttcatcttctcatcttgcttttctcgctgcttccgcttcgccgcgaacctcttcttcgagccaaatcttagcttggtgattagatccgccgcctgcccgcgcgtaaggtcgccattctggatattcccttgccggatcttcgccgcgtttagaaatttcacctgtgaggtggtcgcggagtagcttcgccatcgttggcgggtggaaatgtattggtcttcgaagtgagctgccgcgaaagtatcgcctgcgcggacggctgattcaaaattctctgcccgcgcaaccagccgggggcgggtgtacttcttggtgtcttcagtaggtttaaatatcattacgtggtagacgagatactgaggggacggctcgtccgggcccgttgcgtcttgttgttcaattgttagccagcctgacctgtctgatagtaggtatttgttttcaccgatgcggacccaggcgtagtggctgagtgagcggatgtgcttttctgatttcatgtcatggattaggtcgtaaattgtgtcatatttggtgaaggtgagtttcaaatcatccggcaattctggtccactttcggagagtagcgattcctctggatctctaacattttgccccgtagccttcctctccttcaaatctttggctgttactttttcaaggacctcgtctggatgtagcccaaagagcgtgggagtagagatgacgccagtatttagggtggctaccatatcaatgatatggcagtctttcttgccggggtataagcgcaagccgcgtcctatcatctggattagaaggttgcgagatcgagtaggtcgagcaagtaggacacagtcaatgttgggcatatcagttccttccgtaaacagcccgcaattaagcagaacaggaaattccctggctctgaacttgtctaactgttcatctctcgttgtctttggggtagtacccgtaatgtaccgagcatcaatgccatattgccgaaacgtctcggtcaacgccttagtatgctcgacgtcaacgcaaaataccagtgtagacttcctctccgctgcattggccagccatgcgcggacagtgatgtcattagtttgatgggtattgacagctttggatagtgagccaagagcaaaatctccaaatttgtccttcctgacgcgtgacagatttgcatgggattggacggtagtaaacacggcgttggcaagccatgcatcattgatcatgtccgtatagtctttatggtacacaatctgatcaatggcagcacccagcttgagcccgtcaaatcgcgaaaacgtcgcagaaacgccaactagaatcggagaatcaggcgatttttctttgagtccaaagtatcccaaaaccgtgcggtaagttggggcaacaatatgatgcgcctcatccaccaataccaacttgaagcgctggggatcgaactttgctagccgatcccctgaagtaaggctccttacagaggcaatgattatatcgcccgatcccgacgcgacgtgattccccatctcaatctctacggttcgatcgggatatgcgaggtgacaatgccggtaggcttgttcgaccagttctctccggtgaacgacaatcaatgttttatctccaagtatattcctcggtggtattctcccaattagctgagtaaaaatgacctgagtaacgcagagaattagtagagttcttagaagttgcagttaacctcttaccgtctttccagcccccgtagctagggatattcccagtcgcttgtggccctgctcaacatgtttcaagaccgattgaatgcattcttcttgataatcccgaagcttgatagctggtgcttcgggggtaggtgtaggcttagccgttgctattgcggaatcccatcgccgaagtcgctgagagattgtagttggtcgcgccaaggaaagcctgggagtccttgagacatacctgagcggcaatcccagccccgctctccaatagatatattccatccagaatccatagaagtgcaagttccttaggaagttcttcagagaatgtcacggcgataaggagcccaaacagtgcaaacacggacggccttatcaggcccgataaccaactttttcatctacggtctacacttcctcccttgtggcacgctctcaaggcgtcttatcgatttagatttcatcccaactggtaggccatgaagaatcctgcctgccaaaacccatgtctacgccgtcaacacgtatccgacctccgatagctcgaccatgagcagctctgacgtccactcggaggacgatgatgaactatcggatactccttttattaaaccaagagtagcgcgaggaccacgcgctagggtactgaataagctacgcgcatcgctgtcggaaaactcgattgagtcgtacaagaagcttctcgaccggacattcgaagagaatcccatcgccaaagaagataacttcaatacaacgcaagatggtatcgtggtatggacaccacaggagaaacgggctttttttgaggttttggatcgaaaagggcgcggtggcattagggaaattgccactgcgattcagtcgaaatcagagcttgaaattctggagtatataaggctcctacaaaagggtgtgcggcgacagcatttcaacgatacccatgccaggacagctatcttgggtgatatcccagccgcagcggagataagcaaagaatgctgtgatgcactagacaattatgccgaattgctctgcttggaagaacagagggatgaagacaggaccggtagagccaagcacggtggtctgtggattattgatgaggagttggcaggtaaactggagacggcgatcgcggaagagcaaaaggatccatcgaaccctagtcttgaaatcgcagtccatgcaaacgaggcgcatcttgaaaaaggcctgtctacaccagatgttaatgatgcagctacatttttcaaactgactaactggatcctgctctcagaacgacttttcatgaattttggaggtcatagattggaagacaattgggtcaatgtagccttcgaaggcgagacaccggcaatgacggctgatgttgtgtctgatttctataaaatcgccctgactgtaactcgccgcctagtccacgcaacgcatttctttgcttcatcaagagtccgaagaaacgggaaggcaagccgtccttctgcaacggttatcaaggcctccgatgtcagaagggcagcacgcactttcgacatgaggaccaatgcctctgagtattggatcggagtagcgcgacggtgcagccttgaagtggaagacagtcgacacaggaagagttggaaccccattcctttagattacgatgaagttgagacccttctgtctcaaacgttgttaccttctgagccatatgaaaggatcacgccaagcccaagttctcgtgagcgctccaaaagtatcatcagtgacgtctctctggattcgctcgccgcggagtcaaatgattctgaagatgagcacgccgaagcactcgaccatcaacatagctcagctgaagaactttcatgctggaccgctctgggtcgaacgcctcgagactcgccaaatccccaactgctgaacgccgaaattcgaattcctcccaaaccacctggaaaacgcaaaacaacagaggaactcgtcgactggcgtgaccgaacgctctatcgtagcgaatgggaagaatatggctacgagacggagaagctggacggcgagttcgcaagccagcgcaagaaacgcctgaccatggcctcattccgcccgctttctgggatcaacattcaggttgccaatgagacttcaaagctggactcagacagccgtgagcacatgagggttgaagcggagactgaagcggaattcgactatcaaactgataactcggatcctgaatttcgcctcaggtctccggatcgactgtcgaggtcgaagtcgcagccgaagccgattgtgtcaaggacaagctctcgcaaacgcacgcctgtttcgtatgccccgccgcagggttttgagtttgatgtggagatggaagttgactcggagacttgcaatggcgatgcagatgaagaattgcgtgaaacgaatgacgaccagggcggcgattacgtctccctgtcggaaaaagacttcaatggcgaacatggcgaagataaagacgaaaaagacgccagcgtgtcttccgtctctgatgatcattatcacccatccagccctcgagatgagagtatttctgtatgggacgagggacataacgagggtgatgataatgataatgccgaaaaaggcaattttctttctggccattaaacgcaaatacctacgtgcgtcgagtatgcccacccatcatgctattctagctgtctgtctgtctgcccttgttcactccgaatgcacaattcccagtgaacttttacgcaaatggagggatcctgtataaatatatgtatgatacgtgcttttgtacttacggaagtcatgaatatgtctacattgacccaataagttctagaattcacttaaggaaaggaaatctggaactcatgatactttaatgtatagtgtagcgaggtaacataggttaacacataaactccaaaagcaagaaataagagcgccttaagttttcctaatactcgtatgaattgaattgcatcaacctgccctgaccccggatgacaataggaaaggatgtaactcagtcattccaccatggacgatcccgttcccgccatcttgcctgtttctttctgcctcgcttgagtttcatatatttcttgccccgaaggcggtaaaacttttccccacatccctagccaagtgttgtacaaagcgaacagattataggatgagaatccagaaaggtactcatggtaacgaaactcagccaatgcacggcgcctagaccactcactgatcttcacagatccaaagtcttgaagtctgtgcccgctgtcgcgctcaaaggctgaggagcccccgcagcatgaggcccaggctggaagttataccgattgttgataccagctgtcgcggcatcagcaagaaggtcattatcaggcgcaccgggtcccttgaggctgatattctggagcgtatcctgaacctccttgacgcgctttttgaaagccaaacggtcaaggaatagctgctggcgggcgagctcaagttcgcggcgttcagcctcaataatctcttccatctcgttgaattgttgaagtttgatttcgaatttctgcagggtgacattgacggcagcggagacaaggcgggtcatttcgcgttcttcgtgggatgcaagggcaccggcgcgcgcggcggcagcaccgagagcaacgttggcgagtgaggctttaggctgtttgtcggatgattctgtggatgtgcttggctcctcgcgggccgtgtcaacgtccatggaatcttcactcttaacagcggcgcagagccttccttctctttctccttgcccttgtcttgggacttgtctgcactaggtgccttgtcgagttgtttctttagctcttttcgaatttcgactacagatcggccggcggcagcagcggctactgaaggctccgccatttgagcaaggaacgccacaacagacaagaccgggttttcaatgtggctgacgggctcgcgtccgggaccagcccgtacctctgggctatcttcgaggtattggtcttcaatttcaagctggaggaatttcatcacacactcttctctcgtccttgtgccgacatgattggcgatctgttcccagttctcgtcaaagttctcaagaccctcaagcaggagtaggagttcagagtctgaccaaggagcttctcggtcagggatccttgagtatgaagagtcctctaatttgacaaagtctgaagcattatggctggacggcattcggccctgtaaaaagcagttggggcagagatcatacttggaatctggagcggcggtaccggtggccggggtagactttgcataatggaagcggagacgtgtgcagtcaataccgcaggagaagcactggatcttcttcttgggttcttgtgacgccgagtcaagagccttggtggcgtctccggtgccattggcagatgattcgccgttggcttgcttttctttggcctcgacagcaggcgttacctcctttactttgtcatcataaatattgcggcgaatctctaggttcagatcagccttatttgtgggggtagcagacgccggccgctcatggggctgctatatggctagcccggcttgacaaaatagattgcggcccacgctggaagggctggaggcctcgtggtgtatcggcaatcacgcggaaatggcctgtgaacgggggaccgatgttcgaaggtcgcgtttggggatccacctgaatagcacatcagtaatagccactagccatgagataacaaatcactcacctggtaattgatcaggccccactgctcaaggaaagaatgcactcgcataatagcacaaacgtcgcctgcaaggttacggcggcatgctgtgacagtaaggtactcaatcgggtttagccggtaggtgttgatcatgaaatctctgtaatctttatagacagcaggcgtcttgctgcggttcctgccgttgaagaactcggcaagtgctttcttctcaatgggatggattgtgtgcatatcgaaccatgtcgaatagctagggaggatgattgcgtgtgtttgagagaccaggtgggagcgtgccgaagcctcgagcgacgatttagcctgcgcagtctgctcttcagagccgccttcagcgcctgattgtgcggcaacatctgctaattcctcgccgccctcggtctccttcttggtctcgttccctgtaccccccatctcctcatcttcttctccggcatttttaggtttcggtgacgcgggggcatctaacgggttgtcagttcgctgtacgttccctgtgtatgtgtgtctcagaggaggactgatgcgaccgcgacaaaggcaggatcacaactgcggaaagggaacttgcgccgactatgtgattcttctcaggggatgaaagtgaagacactcaccggaggcattaactacgtcgcccggcgcatcctggccagaagtaatttgagagtcgtcagcgacgccgccttgaatggtcgtattctcatccatgatcgtggttgatgaggctcgagatgatttcacgtcgcgagaacgaggcaagggttcttagttgccctcagaaatcgatggacaatatgaaccagaggcgcatacagcgctgactatgtcgaaagcaatccgagacgaagaattggggatcggataaggcggaatcgaatcgtaggatagtgtgctggtg

SEQ ID NO: 5687 - DNA, 3945 bp, Emericella nidulans
aagggcatgctatccttagacccgtgtcttcgaggctccaagatctgtattaggccttccatgaccaagttccagacagacgaccaggtaaacgtggaaatttgtggctcaggatcaaaacctatccctctgttcttgaatagacaagtgatcaagatcctggaggatatgggcgttgatagagagtggtttatgacgctacaggagctgcgcatagaacagctgcgaaaggccactgcaaccaccaagaacacagcaacctttgttaaaggccagagtgtcgccgactgcgtcaagctatatcgattatttctgttgtttcataacctaaagctggactacaagaaaatcccttttctccgagcggtcgttgaagccatggtccttcgggaactccgccttctgaaacataaagcacgaatcccagtgcacaagggtattacgctgtatggtgtcatggatgagactggattcctaaacgaaaacgaggtctttgtgacctatcaagccatggacaggcttgcagctcctccccaaaactgccgtctgcttgtcacccggtctccggctttacacaacggggatatccaatacccctacaatgtcgttccgcctaagggtcacccacttcagcaacagcggaattgtatcgtcttcagccaaaaaggtactcgagatcttcccagtcagctcagcgggggagatctggatggggacttgtacaacatcatttgggacccagcagccgctccgaaacgcgtctttaccccggccaactacccccgtaacccgcctctggatatcaagcgtgtggtagagagagaggacatggccaacttctttgtcgagtttatgcaatccgatagacttggtgttattgcgaccaaacacatgatcttagccgaccagatggaactcggtacttcacactccgactgtaagaagcttgcgcagctgcactctacagcagtagacttctcaaagactggaattcctgtcaggcttaaggaaatgccgttcgttaatcgtagtagaccagacttgtaagcccccgggttcctacataagcacagaatccccagctaatacctacaagcctcgccccgggacccctagccaagatccacgacaggcagaacattcaacttgaggcccgctacgttcacccctatccagatgacgatattgacttcagcccggtgcacaagtactatcgatctgagaagatactgggcaagctctatcgcgccatcaatgagcatgagatctggacgaaggatattcacacgacagtcaattctaatccgaccgccgtgtggaagaggataatagactcattgaccgggcggtgcatcgccctcggagcacccgtaaactggaaagcgcacgtcgaaacagctcgtcaacttcgttcactgtagtacatcctcccaacgtaaaatactgactactaatactgcaactaggtacgaagattcaatgtccaatgcgatggcatgacttcatccaaacaccccatatacccattaactgagcttgaagtcttcatcggccaggttctcaataacagtggcgcccaaaccaaccgacagcgcgaacggtctatcaaactcaatgatgaattcgagagaatagcttccttcatattatcgcaaatgcgcccttcaggcctcataacaggttacgtaagtgaatacgattcattgcagcgttgtctagcttgcttccatgttgctggtgagacggaaaaaggtctcggtcatcgacggcagggatgggatcggctcgaaagtttccaggttgtttcggcctgtgcgctgttaatggaagtagaggaattggagaagagcagacggctttacggtgaaaataggcgcccacttctggacgcgttcacatcctccaggaaagagaaaaacgattacgagccaaaaggccttgatcgggccacgcaaaaaactacttttgaatacggtgaaaggtggactgcggctgatgttgaggccatgttgcgtcagcttgaactcaacactatcgtttgacatggagcgttgtgtcagactaggcggtgggtgtatctagaagacatttatttgcagatcatgagtactgaaagcacagtctctcttttgatggatcatccgcgtgcagattacaggcatggaagatgctttagagtttctaagtcatgcatatcgtgtgcagaaacgttatatatgactgttgacaagcaactccaagctacgtgccattgaggtacaatatggatttcgtccacatccggaatttagggtaaaaaaacagaatcatctattgagtccaggtcttacgagccaagcaggatcagaaattatggccgtacgatcaagagtctgcagctctggatctatagaccttataaagccaagatacttaacaggttctgcaagtcagtgttggatcaggtaacttcagtgacagggcaacctgctacgcgtaaacgtgtcaactaagtccagcatttttatccgttacgtaatatagtgaccctgcattaatgctgccccccgcgtagtgtaagctgtctttgaccctatcgggcccgtcaaagagacgccttctccttgccgctgcgggcctttctcgctatcacaatttcagcacatattcagatctgagaagacggggaagaagaagaaaaggacatacccatctttagttcttcatttctccttgcaaacctctcaaatggaaccccttccacaaacctctccgccagcgcattcgccgcatcaatcattcccagcattcgttcggccctcaaaggaccattcgtcaacctcttcgtctcaagcatacttcccccatcattagcctctaattgtccctgtaaataagccaacacttgatccacgaatccctgtgcgggaaaaaccctgttgataagtccccagttttccagctcctcgacagaacacttccgcccaaatataagaagatcatttgcgcggcgcacaccaatgctctgtgcaaaggtctgcgctgcaccgaactctggtaccagtccaaggctgttgaacggaacttgcaggtatgcgccagagacggcgaggataatatctgctagcccagtgaaccaggctgcaccaccgccgacgccagggccgttgagtgctaagacgaggatcttggtgtggtctatgagagagcggaagagctcaatttcttacaccgtacagtggttagtgtacggcttctggttgatagggttaagggtatgcatacacataccgcgtgagaacttgcgcatatagaacagtttcttctctgcggcggttgcattttccggtgcttttggaatgtcttctacttcaggttaagcctttcgttattttgaaaatagccggcaactgtgcacatacgtcgaatatcagccccagcggaaaagaacctcccttcgccggtcagcacagtaaacactgttcgttcatgctgatctagctcgcggaacgcagagatcatctccccgagcatggcctcgttccaggaattcaagaccgacggtctgtttagctggagtgctcttgtgttagaatgcgactacgcgcctggggtggtgtaacgtaccttgatgactccaatctggtcggtgatatcgagtgtaatatgggtgtatactgatggcattttggcctgggaattggcaggtcagatgaagagaatgcgtgaggttgttgcaagtttgatgagctgatgtttgaatatgagagttgatataattaatgcagggtcagccgcggttatcggtacccgtctaccccgcgtggcactaccgtagcaggaatgctaagagtcgattccaattcatccttgtaccgactctgaaaagtactctagaagtaataaaagtgctttccaataaatagaaacaaggccaatgttggaattacctgactggtatgccag

SEQ ID NO: 5688 - DNA, 5967 bp, Emericella nidulans
ccagtgaaggcaactggcagagaattggtaaaggggcaaaatcatttgtatgcatcggagccatggaagtacggcgacaaaaagaatcttctctatgtaccatactttctgcgggcgaatcggggcggcaagggcgggatgacagtctgggctaagcgactagaagcctcatagaccctagttccagactgggagccttgggtggtacggagttccttgacctttgaaacaaatccgcctggcaagagctgagtcagtagtttgcacagcaagaatcctattcatttgccaggttggaaaaaatagtactgaactcaaacacaccccgtaaaggggctggacaatcgcagctcgtagtttaaacggagattagcacatcgctggccccttgatagaagttcacttggaaaattccagccatgaatcagttgcaggagtctccggggcagctgttagtgactcattgacaccatcattgtaccgttccgatacgctggcatcgtagcgattcaaaaaataaatcatccagcgatccatatcgaagttctcttgtgtgctgttcatttgacaagctcgatggaatgccttcaggcgagtcatggagaactccacgagcgaccagtgttttcggaactgaagcagcattatgaaattctgctccagtagtctcttggctttttcgatgctctcatcgtccgtatcaaaaagaagcgtatatagtaaaacagacgacgcgacgaccaggaggtgcccgttcacgggagaccagaggcattccataccggggcgcgaattagtatcccacatcacctggctgagcgccgtggcatgtgctttgcatctggccgcgtacatcacggcctcatggtcagtgctgccgtcaggcaatctggctttcttattgaggaattggtaatatagcatttggcactggtggtggtagttcaattgcaggattgtaaactcgcggcccaagtcacgggcaaaatgccgctcccggttctcggatgtgtgttgcagatgacgtggtaagtcacgaagatagcaatctatttcgtgcgatatctccctgactcgctgtcgaatatcgatctcgcttattgtgttctgaactatctcatcattgagccgcatgacctggtcgtggaatgttgatagtgggagcatccacgtccacaagccgtttgatcggagacccaaggcatcaatcctcgtttcggaataatggtccggtgaatcagtggacttcatgtttctgtatgcttcttcctccagcggtctcctaaaagtagagctagccgtgagctgctttgggataagaacgcgtgcagcgtgccagttctccatcatccacattacccagaacactatatgaagctgtcagctgggagactgctcggtggtccaatctatacttacttctgatctccacctcgcgtttaataggatcatcgctcagattttcaggcaagcgcaacatccgcaccatgcaaatagcttgagaggttaacagcgcctcctgagcggaatcgccctcagcgagggcgacgaacgacagtaagatacttccttgcagagacgccaagttaatcagctctgatcgggcgttgaatgaccgcattgccgccttgaaccagggccgcgctctgtgccagggatgaacgccctcgaagtacgaattggaggaaaaactggccgtgcaactgataagttaaacgccaggaaatttggagtggtaaacctaccgggccatcagagcaatcatgccgaggacaagaaattctggaacccttccagcgcgttgttccgctatgaaggtggtgcgatggaagagaagcagctgcttctcatcaatcaaatcaaagtacaggtcaacgagctcattgcacacatgttctgggggcaggctgagatctggctgcgatacgttgatcttgccttccgcgggggcgatcctcgtctctggtcgatggatgcgtgaatcagaatgaggaatgcttaggcggccgttgaaagcgctactgccagagttgccccgatagtcgtcaactagatcgcatttccgtcttttctgggaacaggagatgcatgatcttccaggctgtggcgttatacatcgtttcttgcgagatctagaagagtatcagcatgtgttcacgtggactgcgttcagcacccgtaccgacattgcgtgcaggaggaaatcggacgcatcctagaataccctaatatgtaccgctgagcaaatgggattcacagcgcataacatcaggttcaaagggtaatggatgagcagactagtcttagggagaaccacgatatgggatgagatggaggaagacacgaaagccgggaggagaggagcgaagtcggcagaagctcacatgaccgttctacggatggagaccgcaggactaaagtatggcaataattatgtggaactaattttactaaacgtatcaagtttcgtcgtttgatctacgtatctctatatagttcttgcatttaaaggggtattcggcgcccagttcatgcaatgcaatcgggctccggctgccgcatgataggaatcttgggcttcggtggccagtcgcgactataacggctccaattgaagggcgatgaaaaatgataacgccctgatcccacccattccccctgctgctgttgctgtccagtaaggtttgtatcactcggcaaggtgacgagagcacgggagttcggcggaacaaggagctccagcgtaaaaatatctctgtcgatctcgatcctccatcgacattctaaccgtccatagggggtctcataaacagcctcagcacagtcaatattgcccccgtgtattggatggacgctgaattctttccatccgggaacgagtgggctgatcccagctacgatgctatgaagccagttgatgatcgaaccaaaagcgtagtggttgaaactagtcatctctccagggttgatcgagccgtcaggaagcatgctgtcccatctctcccacatggtcgtcgcgcccatagttatggggtacatccaggacggacaacgcttctcaagcagcatccggtatgctatttgtggataaccgcctttcgtcaaggcgtgggtgatgatgggagttccagcaaaccccgttgccacgcggaactgcgccaggcgcaccaactcaaccaagcggctagctgccaccttcacttgttcggcggtagcatgtagctcgaaaataatcgcaaggctcaaggctgtctgggtatctcctacgagcaggcctgatgaggcaatgtatttggcttgaaatgcggccttcagccgaccaagttgttcctggaatcgctttgaatgctcgacttctcccaggatctcactgatctgagacattacagatgtgatacgaactagaaaggcatctgccaccaatgtcccattagtccgcgtgtctcccggttctactggcggtgcagttgggtccagccaatctcccagttgccacacctcagggtcccagagtccgtctggacctcgttggatgcctctgtcaatccaagcgagcatgctcttgtattgtcggtgaagaatgccagagtcaccataggattgatacaatgcccatgggcccaaaattaccacgtcgtcccattgtgcttgcggcgttggtggccaaagttcttcaggtattacgttcggcacaacaaacggtggcacacatccatcctttccttcattgagctgttccacagcaacgtcttgaagccaattacccagcatggcggaggtatcatagaggaagtttgcagacggaccgaaaatttgaatatctccagtccagccaaggcgttcatcacgttgagggcagtctgtcgggatagacacaaagttgcctcgcatactccacaaagcgtttttatgcagttggttaaccatttggtttgagcatgaaaaccagccagtccgtcgcatgtcagtgtgcatcaccagcgccgtaaggtttgcaagcaatgaaccgtcgctattttcgtcccatccatcgacttggacgtagcggaatccatgaaacgtgtattgaggcgaccaattagtcaactctttaccagcgcaaatgatttcatccgtacattttgcgatgcgcaacggccgggtcgcgagctctccatgttccaaagcctcggcatgcctgaaagtaacgcgggatccgggtggtttgttgaccgaacgtacacgtaatcggccaacgaggttttggccaaagtccacaatagtcttccctaatggggttttttggactgatacgggtttgatctcttccgtgaccctaacagggggagcgtctggggcgaccaatgttgcagttgggaaaggcagcactggaccggcacccagggcgagttcccgctttcaacaaaaactgctgttcaagcccggggtttcctcgcgcgcatcgtagatctcaccgtcatagtattcgctcgttagggtcgcactttgctgacaaagtccatgtgtggtccgtaccaagagaaaaggattcacccttgaatcggccctccaattgtccaactgccgcaattttgtccccgtaaagttgccttcgtccgcccaaaaagcccaggcgggttgcataccacccctccgcgacttcgattgcaattgtatttggcccatcgcggttgagaaatggcgcaatgtccagcgtctgatagttcaaccggtagcgatagctcgtccaacctggcgccaggcaatggtcactaacctcgcatccattaatgaatgctcggtagatacccaagctcgtgatataaaggcgtgcttgagaaatggtccccattcccgaaaggtcgaacgacttgcggaatcgttgaggacgtaaggggccatcggttgcctttgccggatctgtgatgggaagtgcagcccagtcctctctgttgagcagcgcacactcgaccatagtccaggacgaccaattagttggctccacctcaggctggccgaccccgcgaccgaaagcccgtacccgtacctgggcagattctcgggacttcaacggcgtacttggccatggcaccagaactgaggcatcaccggttaccagatgagtttctatctccaattcttcgcgacgggtgatctggatctcatatgccgtctgtttccagttgtgaggacacccttcggcagtcagaaagcgccaggaaagtcgtggagtagctgttcctacgccaaagccagtgtcatgatgctcgaatgtcagggactctagagatacctgtccggccatattcctttaatgtataagaccttcccaggcgaggaggtagatgtcctctgctctcaccttatatgtactccaactctgacagacattcgtgcaggtcacgctcgggaacaacgcaccgcgcgacggggcactgcatagtgatacactattggttgaagtagactctgattggggttgtgagtgactgctagagcatcttacaacataatcattgatcagcggatcgcaagcccatgctccagcctccaaaagtgacctgagatggagatctcgtggagacaaggcggcgaactcaaaagccgattcgctgttgttgacctctcggctaaattcaaggctgcaactttgaaccgaacctcgcgaaccatcgttcacaactctacgagcgttctcttgtataatcagcatgtcgacttgaatttctcccagtaatcgactgtttcgatcataattacttggaagtctgtcgcgccagtgatacgaatattagtatgcatcatgaacccgaacgcttaagggcaagtatgggggttacggtaacactgtgaccatcgagaccatgccacattcatgtgccgcgagtggtgtactgaacggtattggggccatttcaaaggtgttaacagggtcatggtactttcagacactattgtctggtccgtagaacttctgagggaggcgac

SEQ ID NO: 5689 - DNA, 7397 bp, Emericella nidulans
tcgacggtccgctctggcgtgtctggtcccgcttgctcgactatcactgggaaaggaatgagccagcatgtgcaaatggcaatcacctcaaaggtcagatctcgtatcacgtccgacttcagttgaaagcagacgagatccgtgctcagggcttctcggggtggacagcaacgacttggctttttcttgctcgaccggcatgtcgtcttccatgcagttatccaccacaacgagggctcgagctgtcatcttgatgtccaatttcttgggagacgttctatgatgcagtactctatcaacccagcagatcccagcaagtcagaatgtcaacgataggacatggacgatgcccactcaagccacccattcccttccggacaaataataagccatcttctcatcaactaggagcggaatcctcctaccagaagctccgtttcagacttgacccactccttcccctcgatggcccatattcggcccatattcaggcttccccctccctgggatctcgataaatcaagagcgagatgacatgataggctatacttgacattattgaagccatcttgttgagaattgatagagacgcgcacgcacagacttcactctagtctaaaacattccttgattttgcattgcgccctctgtcgtgcaacccaggcaagacagacgcctattacactgctctcggctcttggagccacgggtaaagaccacttcgagttaagcctactctcagttcaaagcagcattgacatagactcggagattaccgctcttccagcacgatccaaagaccagagatattacagccgctcccgtcccttcgcggtggcaagctgggctaaaccatctttcttttgtgcaactgcctgccgactacactaacacccagcgcatggccaaggtagggagataacacagttgagccttgcctcgaagcacccggatcagaccggttggggcgggtcttgactgtcaacaactgctcgttgggagattgttgagcatcaggactacggaaagtcttggtttaaaataggtaacgtgagcagtcttccgctttgcatcgagtctattgaaagtggtctatttatgtgctgcgcatgcttggagtagccccattctggagcatacattgtccgctgtggtccagttgacgacttggccgccctttgccccaggtgcatgaattattgaccacgaatcaattgcgggtgtttcggtgagcagtactcgggatcaactaacggatccatagtcaatgttgtttttcgccataatagaggggctcgacggacggtctcaggaaaagtccctgctttccagtactggccagctggcgtgacccgaagcctattacacttactcgcacgtgtaacagagtcctcatccatctcttccagtaggatcttttgcctggtccgatcgttcgacggaagctcgcaatcgccaggatcaataagctgtgcgagccggaatctcagcaggggcaacaggtgaatcatggctcattcaaccggccaaattccgccactccaagacgtactttatataccaggccattgcctgaaacaccgagccagtgaaatcctcgacgggaatatctggtggacgtcaaagcgctctggtgataaacgcccataggcagcaagttccttccccgcttgccccggtcatgcagtggaagatctatcgacggtcacccgaacagctgtctgtctgctgcaaaggcatgccgttctatagtctattttgcactctgctgctttggatgcggcctcgaccggttctttcaaagaccatgactgaagaatgccatgcaccgagcttgtcaaccgcagaatctcaatccccatgcaatcatcccatcctgtcatcattttaaggactatttactcagttctgcatcgcctgcgaccgagatgcactcgatgtagaccgacgtcgttcttgctcaaccaatcaggcttaccagggcttcttggttcacgtgacgtcttcattgcagcaaattactcaagtctcatttgattcacctcaaccactaacttttgacatcatctatcttacagtcgttgtatgtgcgcgtgacgtggagtcttgccgtgccaggatctcagtatcctttggggagcactcggcgcacaggcagctgcatgtatttcggtcactcattcaacctaaaacgtgtcccaagctcctttgcgagcacacagcgaacataaaagatagctctgaagatgaaaggtagcccttatagaggtatggcagtcttagatctgagctttctgacgtccaatggttgggaacagtcggagcactataggaaggtggctttttcgaacgccaattgaatactcttgtatcagtatgcaccttgttacctacacttatcgagcagagtgacctgaacgtgactgaagaggtacgcgcataagccatttacatccataagaggtgtatagtagaaggcaaaaaagggcaggcattataatctagacatcggttgctgataccctttactatcagaaaacatttctagcatcactctgctccccgacaccttgtcttgacaagcactcaatatcccatttctatccgaagacctgtatataagtctattggttcaagggcagccgccaccaacgccagacacctcccaaatcccagttaaccagcctgtctcctctctctctccaccttgcccagcgctcctggccatgtattgcgcccatatgcccagcccagttcaggtgccagtcacagaatcgacggtcgaatcgacagttttggtctagctggcccacggggcggatgacggctccagccgtcatctgctcttgtgctcgtagaccttgtcccggttttgcagatttttatgttggttaagatggtccaagtaggtatagcagtctgcaccgtctcttgactttccgtggactcgcagaagttgcaagggtgagacgacttttgccattaatagatgcacagcaacaaccatgcaattggctctgcatgtaaatcttgaatgcccgtatactgatcgtcgttgcaaatttttctcgtataatcttgcacaagctgtctcagtcatcgttgtctgcatagtgtcgaatgaatgcggttccacgacactaaaccttcccaaccgcaacccactcgttgtacctatcgcagttcttgtgtgcctatgaactactcgggtgcgtcattttcgaaagtaaatattggctaaagatagtatacctctgtaggtaggggatacaggatctcgagactcttatactgagattacaatgcactttgtgggtttggtctgacgcgaattccctatcatagtcgtcccggcagataaatggtagaatcctcgtggctttccatgattaacaacacccttttttgcgagcacaagaaagtcggcatagatgtgggctgtcaatagtgggtcaggagatacctcacactgcacactgacgagctttggggtccgcctagtcaacttcactgggcgctagtccagggacgccctagactctgcaagctggagactcatcatctgggcttcacattatttatctctgccctaagggccatccacatcaccaatgtcgctggctccatggcccccgcaaagagtgctgcgaaattggaggtttaggctgtcttgctggagatggccatatggtagctctgacatatccattgttttgggaagaccggttgtttgttagcaaagctatcggaggtagttgtctatactagaaccactttactggcattgttagcctgaccaaggcttagcagttatgttgtgcagtttagagcatttcagtgggagacggcacatcatcctctaaaggcgtgataccctcctcgttcatctccctcgccacgcgttcaatctcacccataaccctcaggatatttccaccaataattcccgcagcatccttcacactaacaccgcgatccaacagctccttgatcaaatccgggtatttgctcacgtcctctaggccttgtatcgttgtgaccataccgtcaaagtccgaccctaacccgacatattcatacccaatcaactctccaacgtactggatatgatccgccacatcagacaacgtagcagccaaaggattgtcgcagcgggtgtattcatcaagaaaggtgatcataatcacacctccattctccgcaagacgaaggaggacgtcgtcgggaacatttcgttcatggggacagagtgcatacacggaggaatgggagaagatcaccggtgctttggatgtatctagcgcatcatgcattgtcttcgcgctgacatgtgagatgtccacggccatgccgagccggttcatttcaaggaccatatcgcggccttttgccgagagaccgttgtgtcgcggcttagacggggtcgcgctatccgcgtattcattgtggcacatgtgagttagggtcacatagcgcgctccgagggagtggtagaggcggagggtagatgcgctggagccgatctggtgcagaccctcgacgccgaggaaggaggctattttcgtcggggatgattcgaaagtgtgtcggaaagcggtggtgtcgggcacaatctccaggtatccagggtagagggatgcgaggcggtgcacgaggtcaatttgttggagggtatcgtggacgtactcgtagtctggttcggggggagaatcatggctgcactattagcattccacgttctgcgaactgtatgggtatatgggaagcaggcgcaacataccatgctacatagacactccagaactgaccgcgaacgccacccttagctagacgcggaaagtcgacgtgaccggggagcgcgatttggtcagagaaattgctctggtagatgtggttgtggtagaaataacggatgaattcggggaaatcgttgtgaccatctagtcatacatgtattagaattgattgctggaagcaataattgtgtaattacctgtcaatggctgcagatgcagtacctcctcgacggggtcgtggtaggtgtgagggtgggcataacaggcgaggacgtcccagaagatcagtccaccggcgatgacgccaagagcgcaccgtgttttccaggaagatcgcccattgacgggtggagaggccagattatgttgtggaagatcagtagttttctccatgatgagaatcacctgacaattgaagatgggaagtctgaagtgagaagggaaagttggagatcaaagtggagagaaggcggcagttgatgttgcaggcaaccagagagcgcaccacatgatcgtgcggggaagataagcactgcggctgaactgtttcagtttatatttgctttttacatagaagtaccattcagattatctagggtggttttgttactttgtttatgattttagcaacggtctaaaaattaatcactatcttcaagcagcaggtacagcccaacgccgagaatgtcgcggatccccaagtgtatgtatgtaccaaacttttgatcacaaatccacggtaggtacagagaagccagtgtaaggcaaaaggaacgaagaacaagaatagcataattataccgcgcgatagtagtaaacacatatgtatagttcggaaagtctaagagtcgtcaactagacgcttctgctcccacgccttcttcgccagctccaggagagtctccaggttgccgctgttctcgcacatgcttcggaaaatcccgccttccttgttgactagcgtccaggggtggtcaaattcaacaacccggccgtggtccaagactaggaccttgtcgtaatcaatgattgtttgcaggcgatgcgcgatggtgatgatcgtgttgtcacgaagctcacgaagagtctcttggatcttggcatcggttgtgtagtcaatggacgcggtggcttcatccatcatgagaaccttggggttcttgagcagggctcgcgcgaggcacagtagttgtcgttggccttgggataagttggaacctgactcagataccgggctttcgagattgtggaagatattcttgttgtcgagaacagtgctggaaatggcgttgccttcggacggagaggccgatccttgctcagtgaccgtcagagtactggcagtaactggtgtcgctgtgccagacgttcccgagccgatcagatgcacgcgacggatcgcggtgaagatctgctcgtcggtaatgtgaccagaggggtgtcagtctgctccggatcatcccggtatagagtgtcggatcctgaggaacaatgctgattgcttctcgcaagtccttcaaaccgatagttccaatgtccacgccatcgatagtgattcgaccagtctctgcttccagaccagcggaaaagggcgagagctagcgagctctttccggcaccggtacgaccaactatgccaaccttctctccagactgcacagtgaatgaaacatcgcgcaataccggatcaaggtcaagccggtatcgagtggaatagttgctgaactggaccgaacctttgctgggccagttgggaggcggccgtgagtcagcaatgacaggaggagcctcctgctccacctcgagatactccttaacacgctctaccgagttcatgctctgctgcacctccgagtagagacgcaccagccacagaacgttttcagtgaaggtcacggcgtaggttagtgaaagacccgcagcacccgcatcaattctcccaatattcgacagaataaatgtcgccgtcaagaaagacaccaaagccccagtgatatcaacacggaacgcaagccatctgttggcagcccaaaggtagatgtgaggtcggttatagttgttgatacggcggtggttgtccaccaggaatctgggtccatctccgtaggcgcgaatggttacaatgccattgagtgtctccccaaattgctgatatagagggctccgctgaaccgattccaaccgcttcatgtctcgagaggcgttcaggtagatagctcccagggcaaaatagaccatggtgatgaacacagccgcaatcaagaatccaggagtgatgatcgagatcaggatcacaatcatgacgacggaagctagactatgaagcataccaatcgcgacaggagcaacttcctggtcaatcgcttcgacatccttggaaaaccggttcataagctggccaaggggtgttgaatcgaagaacttgaatttggcgtgcataaccgtcttaagaaggcgcttgtggatgctgttcgatgcgtgcagtgaaccccagaacagaacgccttctctggtagccgagatagcaatgtaaaggacacccagcagtgcgtagatgccgaggtagtatgtaacattcacgttgttgtccgaatccactgt

SEQ ID NO: 5690 - DNA, 5601 bp, Emericella nidulans
aaggagaaaggggggtgaaggggagggagagtggtgaaagataataggaatggggtggaggaaggaggagagaatgaggattaagaagggggaaggggaagaaagaaggggggataggagtagaaaaatagggtgcaggggaggggactggagtgatggtaaagggacaggcttaagatcagtacgagaaagcagggcattaagcggggcagagagatttagggttgggagaactagaagatatgagggccgggaatacgtcccaagaaggtaagatataaagagaaagttcagttgtccacgaagcgggtgaggaactattaggcttcgaccgtcctacgccgatcgaagaaacggcgggcaaagctcgtgtccttggatggcccctggggcggagcgggcgagggaggccctgtgttccgcagaaagtctgccaacgcgctagtgtctgtctgtcgctccgagacagacgccaagccgtacatggcgtccgacgacttaaccgtatagttggacggtctcttggagtactgatctgactgctggcgcaatgatgtttgtgaagacttggttgacgggcctttcaaagtgggacccttctcggaggaggcgctgcggagaaggcgagccttcatcgaagatgagccgccgtttggtgttttcgtacgtggggcaacaatcggttgcggctgttctggctcaggggggggaggtacattgcgaaggaagtctattaggctttcctcatcgcgttttggcttggggttcttcttctcctcttcctcttccagcatcgcttctagctcctcatcatcccaatctaaagcgtaggggtcgggcactcggcgctgtgctcgcttaggacgaggatcgtcttcaacaggtatttgacctgcggactagagggcggtttcgtcgaccctatccttgtgtttgtacttgctttatttgatgaatcaataagcctggtgtgcgagccaactgaagccagggacttggtggttgtggattcaccctgggtgctggtaatcgacggggtggcaccatgctcatatgcaagatcgtccgagtccatagtgctgcggaatggcgcgactgtgcgcggaatgcggcgtgctccagcggtaggtggaccttcacggatgaagtcaatcagatcggacgtcgagtttgtttcagacttaggaagcgctggaggtttcgcttgcagtctgggcccccgagtcgagcccgacatggcgctctcggcccgagaagatctccttgacaactgcgcatcggaggactggcgactgactgacttgttgaggattgggggacttgcggggccggaattgcgaataaattgcgcaagatcggagctcgactcataaacaggacgagcgtcgcgagcttgtattactttcgacttctgtggcgtattcgcacgaggcacttgaatgggcgcaggcctgggcttctcggaagcccttgacttgggagaaggttgacttctaggtgataccatcggtcggcttgtatcgactgagccatttgccgattcaacagtgtttggcctttgggctgttgggaaatccatttctcggacactttttggcgtgagagtaaagtgaagcgtctcgtcactgcgaatcagttcttctaagttagatttgtcgtcatgggagtttttagtgccctcagacaccctacttccttctgaatcgcgcctcgggttcggttcttccgaccggttgatgaggcctttcagcttctgggatgtggtagacccggcagtcattgggcgcttttcccgattactactgaagctgccagatcggcgagattttggaacgattgagggatgcggcgatgatgccgaggaagtcgacggtcgcgctgggatacgctgcacagccgcacgctctgttaccgagcttgagactgacgatgttgcagagcgctggctaccacttgttaagttgagcgcactcgggcgttgggcacgcgagaagctcgagtgtacactatcactggaattggaagcaggtctcgatcctcgaacactgtccagcgatggacgaacctcacgagccgaagtgggaggcaggctcacacttggttccgtgggggccacgggtatgggtacttcttcactttgctttttgggaaggctctcaacatcgctcgacgatgcaggggtagcttgtcggtcactgttacgcgtagcatccttgcttggattccgcttcggtcgttgtacgggagatggcttttgcacggtaccttggccttcgatgacttcagtttctggttcaattgaaggactttcggtgtcagctgcttggctcgtcgcgactttagcagcggaagcaatgactcctttcgtaacgttatcagctacgtcatcaggcagatttgacggaggtgtctgttcgggcttgagttctgtagtcagacccgcaagcttgcgacctttgtcttctttgacagtctcggcctcctcacgctcctcatgttcatacattgtgtcaaggcgccttcgctcttcagaagccgcaggcgatggtctacgaggaaccgggtaagccgggtcgacctctggagcctcagacgggcaagtcgggcttggtagagatcgcgatctagcatgacgggagagcggaggggcactgcgggcggagataggagtgatgggcgagccagtatgtgaagatggcgatttaggggattgtaaagtgagaaccatcaaactctgtgggcgtactttgtgggcaacaacagcttgcatagttcggatctcagcggtgtcgaagtctgggaagtcctcattttcaatctcttcgacatcgttctcgcccattggtagaggaatagatactgggtcaatctccggctgggcttcgggctgggcttcaacctgagcttcagactgagactcagactgaggctcctccagcgggggcgaaagcggatcctcagtgatggagaagctgctcttcctactgttcataccgatagtgccagcgacagtgccacgtcgtcgtagagagtcgcgagatgccagccgagaaaggttcggcgtgcgagtacgtttcctccacgtccgccatagccgtccaagcgtcggattcaatgccagcttttcaacatcgagctcttccactaccagccggttcatgctccccctctctttaccgacgccatcctcattttcatcacattcaaccacgagcttaggtgagagtcgagaccttgctgtttcgcctgcaattacaagcgcctgttcaccaatgtgctcgatgatggaggtcagaaagatggcggcagcaggagtgatgttgccgatatgattcgtgaatcgtcgaggcgcaccttcctcatcgacaagaccttcctgggcgatatactcctcttcgtcgtcttcctccaagtcgccaaggcgtgtgtacaccatacaacgcaggcgcgtcaacttccaggtgcgaatgaggtcgaattcaccctctgggctttggccgccacggaactcagactgttcgtcctcctcatctccaagatactcgctcaactcctcgtcggctacggacacaaccaggttcgctagtcggggtttcagtacatcagcaacagcaggtcgaatcgcggccaactgtgtcgactttgcagctgctagaatgttgagaaccaggtggtcaaggaacccattgagagcggataacgcctcaggagtaacgagggcgccagaatcatcattttcgtcagctacaaaatccgcagcgttgaactcctgatctgacgtgataatctgagacgccgacgccggtgcgatgaaggacggaggcggattaacagagggcggggcgagatggataagggagagttgtgaatcgctggagcacactggcgctacgggagcgagatcgcgagcgttagagcgagagcgttgtgccgaattcgggctctggccctctgatgtgctgcattatgggatgcaggtcaaaaaaagtggaactggagaagggaatgtagagagtagcaagttggataatacatgtgagtttccgttcagataaatcgtttgttggatggaccaaagggcacccgcggacccgacgtggtctaatgttcgcattaagtgtaatggatcggactgaacgccatttagttctcactaccagattatgccgcaggctaaggcagcaaagtatcgatgcgggcatcaagtgactgcacgtacagggaacagcccggagcctcatggcagggaggcaaggcaaactctacgcggtgattcccattaattcccgttgccattagttcccattgcggagctgggtctggccttccaggcagcggcgtcgcacgctccttcctagaccgctcggagtccgcaggacagaccgagaagcccgggcccaatctccgggagatagtgtgcacagatactgcgacaagcaacacccaaaagatagaggaaaaaaaagaattcaagcagaggaaaggacagaggacggtctgtcaggtggtgactaatctgcctgcactcgctgcgctcctgcactcctgcattgctagccatgactaaaaagtactggtaggcgtagtcttccgagatggtgcatatggactatggaagagtgatagatggatcggtgattgagtgatgatctgctggtgctaggccactgtgcggatgatagcgtgaccggaaaatggaaccccggccaattcacagccaaccagagacacatggcaaattagcatggcgccattgagatgtctggggagtggggcggaaccgcacttgctgttcgccctcccgccgtccagtctacttgtgactacttgagtacacttatacgattagtaaggactacgactgcaaatacccaaatacccaactaccaaatacccaactacggagtactgctaggcggactgctagttgtactactagtaatcgatcgactctgtctactgcatagacaacagcttcgatatctggcacgcagactgtccagatccagccagcggttaatccgctgctgtactcgttagcgaaacctcatgactgcgatgattccaggggcactcttctgtttggattcctatcaaacatgagctctgtctgcacccgagccaatttttatggggagtaggccgcatttcgcccgtaggctataatgggctgctgtcacggtcgcaggtacgagtcagtagactggattaaactctatcgatcaatccaatacatcatcgcaactccatctccaattctaggatcgaggtgctgaatctcaaccagtcaagccagtcaagccagtcaagccggtctgggcgtttgtggtggagaactgtagtctgtgctaggacggtagggtgatcgccatccgcgcagaggtccacagattttcacattccacaattttctccgctgtgacagggcctggaggctaggagcagtcgcgaacggggaaacactccgcctacaccttttgggcacatttcaaagatcatcttgtggattgtcttgcggattctctcgtggattttctcgtggattttctcgtggatttgcagtggattctctcgtggattctctcgtggaaaatcttgtgg

SEQ ID NO: 5691 - DNA, 9074 bp, Emericella nidulans
catgctcgtacacgggacttagccagcactaccaggatgaattagtactctctccaaaaaacggatattgaagacggggaaagatgaaaaaggagactaacccagccagcctctgaaatgacaaacgtattttccttatacagcccgaccgggatgaacccaagcacgagaataaacacccacagcccaacaacacaccctacaaacgtccggtacggtaactgtcgtcccctcagcaccactgcgcccgtatgtatcgcaatagcaataacgaacagcccgctgcccgggtcagccgtttgaatccaccatccctgcaacacgcacgccgcactcgggtaccagatccgttctgtaaccgcccagtgcaaacataacataaacgccgtcgcttgctgcatgtcgacaagcaggaggttgtagatgagcacgacgtattggttgcgccataatggccatgcgtagtgccgagaactgaacaggaagcgatacgtgaggaagaggaagagcgttgatgttgccaggagcgaaacgaggccgcagacgcccagcgcaataaatcccgctttggtaccgccggttacggtatcatatggcggtggtggtggtggtgcgcctggcgggtagtcgacctcgcgggggtggagatgcatctgcggctctgctccccgttcattgtcagaacgactgtaaagaaagtagagcgtccgaatcagggcggccattttcggatctttcttgctctccttcttagacccatgaatggggttgcgtttgatagcgtcaagcttccgcaggagcctaagtgagacgccgtggctgttgacagagttttaaccctcaactttcaggtctgcggctgaaggggaagatttaaaccagttcctgacagtattctatgagaagggtctaataaaccctgaacccgctaaaaaggttaaaaaacggggtcgttagttgtaaggcacggtgattggacgggttgacgccccctggctgagcctggactcaaataacgtatggagcaaactttggcgaggcgaattaggctcagttaaaaagatccaccaaataactgtccaatcaggattcacgcgccttcccaatctgactcgggaagtcacactgtgattactggctttgcccccatggcacttgtagctaattttgattgtaaccatattagctcatcgttctccgcagctcattccctggattaggcaggtgcatttacttaacccaaggggacggcgcgcatgcgcttttagccagcgatgggcgagtgctcggatagcaggcgtcgtacattactactataaaagggtaatccagaccgacgccatgacggctggccagaacttaatcgattcctttgggggtccatgctgcgcccctggttcttggatcggttgcgaatgccgaactgttcgctttactttcctgaggggaatatttcaatttccggggctacgggaaatatacgggagatatatttggtagaacaaatcgtgctactgcggggcatcatttagtatgacgcctcgacttgagttatgctcaaaggtctgcgcacccacttcgtgacagtcgaagaggtttggtggttggcttaactccattggccagtgccggaatttgtaaggaacggattttagttcggattacagccgagatctgaaatcgccgatttaaatccgaaatcgactagggggcactggtccatgcgcctggacatggtccggttgaactctttaaaccatgcccagcaaatccggtgactaggctcgtcttgctgtcgccacaaccaatcagcttccgtttcgatatcccatggcttcgaccgtagccactgtatgaggacttggatccaacagcagcaatatcctggaagtatgggcaaagaccccgtcttttggttaaggttgaacctaggtatataattcattttcccggttcttcgtttcgtttcttttcattcctgtggcccaggtatacgactacggggtgtctagaacagggctcttctgtcatgaaccaacatcagcgtcaggcgtcgtcgcgcaatgggccattggtatacaatacgccaatgtgcgatatgggtattggcgtcatcccgctggctcgtcaagacccaggcttagccgacaattctttcctactggatcgcggccgacggcatgattggagaacctataccagcagtgcgctggctatatgaagagcttactgactgtcattaactagaatcccaggcaatcctctcagtattaacccaagtctttcacttccttttgtattgagttattgcttcgttgtagcttaaggacccaaacatgtggtgatgctatacaaccaatcactcatggcatagttgtttggttttgctgcagaaataaataaaagaaaaatcatcataacctatcctgctagctggatgggtgttactaataataagaaactacgaggtgctataagaaatccctttgtggtataactagacttaatgtatgtttgctactgtcagcatggctagtcaaacctgattgcatattcttgtacaaatgcacagtagaaccagaaagaatggcctcgaatagtgaatatattctcagtacttatttgtatacatagtcagcaacagtaactagattgacgatcatggacattcacaatggtcgcgggtttcctggaacgcgtccggagtgcagcacaagccaccgcaatattagagaaaagtgtctaacatggtgacacatgctataagatttataatctgctatttggtgagatggctgccgttaaatgaagagcaaatgaccaaactgccttatacaactgtacattgccaattagggcagcccttcaatatcctatctccacaaacaaattcctccagcaagcgaggtgtctggatttgcccagcgctacggaaccaaaagtagtagctgcgcagttccaatcatgtcaggcaaatattttcctcttgatggcgtttgcggcgcaagtgtctagcattatcaactgccttgcctgcactaccaacacccacaacgctgccaccgcggctgcatgcagcattaaggcaaacttaagagacttacaaggtttacaccagtaatatcctactattagcacactccaacacactcagtcaaataatgtgtgtttgaaaactctgcctttgacttggggtatatgaagccagagtgaatgattatcgctgctgcgtaacgatcgctttctttcaggtaccagccatgtcaacttatttattctcagcactcccatcttgacatttattttgattaccttcaactcagatttcttagcaacacatcgctagtctaaagcatcacagtttaacttaactgctccactgaggcgatctttattcacacatctttggtccaagcattatcattgcaatatgcctgctcccttcatggtgtctaccatagatgcgagcttgtatttgttccatcatgttttctttccatccaagctccctcagggggatgactacgacaccaactgtgagcttatccttattgactctgtgatacattccttgaaagagttcaggaccctcgtgcccaagcatcatcgccaggtggtggacccagtcatcgcaatggtcgctcgcctgagaggaattcacggatcccacggtgacatgagcgaaggaagactcaaggaggcttttcagaagctggacgatgaaggtataagtccggctccgtaacataatttctgggtgaccaaccagttataggaggcatattgcctattcacgtccgctgccagaacgccgctatcctgatgaccagggacgagaaggtgatatatgtggaggtctttgagttgtctcctcagaacgaagcggtctattcaacagctggtcgtttgcaacgtcagtttcctggaccgtctttcatgctggaccgggccaccttcaatgctccaggttttcaggatactctcgcgaacacactctacacaatgagccaccagtctgcccctggaaccaaatcaagggtaaaaaaagctggtcaggagcacgatgaagaaagggatacaaccgatccgaagatggtgacagagttcttagtggccttcctgcgtccctacgccaccatatttgacggtctgcaaatccagaagaatacccgtgaagaggtgctctggctcgacaccaggcttccctggcggcggtcccctttgtggctccttgtccgtgtggctcttcagctgaaccttcaaaggctatgccgtcgtcatgagatatcagatgatatttacaagcactacatggtgtattacatgggttcagttctgaacgtttgtcttgaagaagccatgtcagacgaacagtattatgtcatgacagcgaaaatcgcccgtcgattgtgcaagcttgatttatcacaccttcctgcatggtttccgttcgttcaaactgtcctcaaaaaggcgaaccgttccatccaaaaaagctggggcgaaatcatagaccagactggttctcggcttggtaaagaatatccggggaagctgaactttgaagaggatgtttaccactcgctgcctgaccttgataagtggcttgaaggccttgaagagcgacgacattgcttaagttcggctgatttccaaccacgtacggacttattggaattcgataaggcaaaattaccgttacctcttcggactgacgacactgactacaatctcctgaatcttgcagccttcgaagactgggttgagttcaaccttgacagttggcttcaggtgcacatcagcgatgaagacacctgccagcagttgcacgatttgatcaagaattattatcatgttgcattccctcagtactcttccaacccagaagcagtatcagttatgctgcttactatcctagagctgtggattgcttgcgacaaatcggctgttatacttcacccgttacttagtgactacgatacttgcgtcccgatggaactattcgaggtgcttttgttaccatatcgatcccagatggagagactggctcgtgcagaagactatatggagcaacgtcgacagcgccttcgctttcctgaatcttccatctttgaagattttggcacgcggtcctgcttttctgtcagatttttcgataagtccattgagcaccaggatttactagccgagatagaagatcacgctgaacgtgagaggacgaagaaaaagcttgagctgcgccaaaagcatcagaggtaccaggaactctacgccctcgccggtcagagggaatgcacgtattatgaagttatccctgactcacgattcgatcatacagaatcgcgccacagtcctaattgccaacgctgtgcgtacaccagagaggcagattcaatccaaattggtatccacgaatggcccttacctacaaatcctctgaaagcaaagactacggtgtttgagttgaacgttcctcaaccttttgcatcatggcgcgacacgacagtattcttccttctcaacgttttgcagctggattattcttctaagggtaacccgcgggctaggcatcaacctaaagattatagtggtctgtcagcctttttcgcgtcaaccaactattcccggagaattggcctcctctcagaggtcaagcctcatgtcaagacacacagatataagaagaagattatcgatgtaactgaaagtgatgtctgcctagcgaacgggttggtccttcgctacttcgaccacggaaccgattgtttcgtcactcaattcatggccaccaacaaaaccgcatcctcgtgcacttacaagttgccgagacgtagctcagacttacagatgtttctattccggccagcacatagcagaaacgggccttcacctaacactgttattgggtcacaggatagttgcccgcttgatatctcgttagaggagtataaggcactttgttcgatgccgctcggcgtagaaatacagtggcaaaacatcctacggcagctggctatgccgtctgtcgtattcaagaaggacgagacttgcttcttcatcctacagattatccgccaagctggaacgtcaaccaaggactctgttctgcgagcagggcacgtcatcctagatgatgataggtttacaactgccctgctgggtgagatcaacaatactgcagctagaatcaaagaaaattgggagtcagcacaggagctcggcgtactggtgattctcacgcaaagaattctagccctttcagcctctaccgaggttcgagatctatgtcgggcacagctctcaagtctccgtaccgcaagctttaagttgatcacacttgtcagggaacaagcgggccattcggacactgataggcaccggaacgatttgatcgcacgggcaacttacctcgcactgatctgcgtcaccacctttgatgctgaaagtcctgttgtgcagcaaatcctagaggatgagctgaacgcctcagtttggatccaatgctgtatgatgatccacgacagaaagggccttctcgacatgactgctggttctttgtcgcagatcctataccatcgttggcagatcgtctcttaccgctgctaccgtgacctggcacacaacatagtccataagaagtgtccagcaatggatctcgccattagggaggcatgggctgcctaccatccagagttcccttggtcagttgctcctgggggtggtaaccactggttagtaactggtgaccagagcctgcaggtgcattacaatgtgcttactggcgaactactcatcaacggccaaccattggcacgactacccgcagagtatgagcgccacagaacatacaggactctatttgggcaatccgctatggatgtaatgcccagtggaatcccagggatgcgtttctctggacagaggaagcatatgaggcaaacaatacatctggggaaagaatcagctcctggtttgaatgggtttgacctctgcgttcggacaatcaatgaggacgaccaggcccgagaattcgtaccgttcagacttctcgatggcgctcttccggttgacttcgttcagaattacgcccactggtatgatgttgatggcgggtacgtggaattctgcccagtgaaggaaccctggcaatcatcaagctcccactggcgcttggaacgaaaacgccctggacaaaacggctggtgtcttgtgaatggcgcaatttctttggtcaataattggagttatacggctaaatttctttccagcattttgcaaccgattgaggaaccttcgagagtgcattacaagttccatacctcaacgtcctcgctagaaattgatgttccccgcctcaggttgagctttactctccagtcaggggattcagtgattcgatctcgtcaatatcggggcatgtttattgatccggatcagtcactgggtactctcattggcttgcggagtaaacttgtccttctccatgagaacgacaacagccgaaaggttctcattcctgatggtgctgtaaattgggcaagagatggaaaacatgttgctgtgaacattgggtggcagcacggctctaaacttcatgtatattcggtggataaccaacttggtcgcttggttgacaacgggagtctgcatagcaaactcatgctatgctacctacatgctgtcacatcgttctgcctgccagatgtattgactaagaagacaggtaccgaacaggctctgtctgtccttcgttcagcatcgatgcggtctttcatccaactggcagaagacgaaatttcacttctggttaatattgcacgcctgaccactgtgagacagtactatccggacaatgaacgcgtgatgcaaagcattggatggcagaatctgggctctttggcccaccatgatgaatttcgtgagcaggttcaggctatacttgaccaggacagcactatgaggatgttctacccgcactcaaagcgatatggggccattctaccgttttccaaccatgatctcctgcaacgtaatcgaattagatcatcggtattccgtatcactggctttggagcggaggatcatacaacagcctttgatgataccagtatacggaacgtggtcggaattatcaatcagaggatttctcccgcgtgctttgtctgtgatcaactattcatgagggaccctttcattcaggccatgatactagacctccagtaccggctctcagagatttggaaatttctgtgtcagacacacgcggtattcggcccagatgtggtggtcgataaggaaaggctcaagtatgatgcaacctggttattgaacccagtcgacttcgtctcggctcattggtgcagcatccatgaggtacttcgccaagggcctgctcaactaaacagatatcaggtcatgatctgggtctcagcgatggcattttccaataagattccaatggctgtgctggagacttttgctgccttctatgttatacgggccatggactgctgtaggccgccacccagaagctcattccagccaaccaaagggtatgtgctaaatgaaaccgtacttaagtgccagatgcagtcagtcctgcgggatgaaacgccagagtcatcacttgttcccaaaaaaaaagagacttatcgcgcgttcaggcgacgcatcgaacaagagagattgaagaatagggcacaagcgctcaacagcctaatcgcgcgcttgcgttcccaatggccaacggagcacccgtaactcccagtagccaggaagttccaagttgcgatgattattaccacatgcagcaagctatggccatggtacacagatgcttttctgaatggtttaacaatagagaactccgagagtacttaactatggtcacttctgtgatttccagtcaacatgtccagatcatggcagtgcctcgccacagttctctacaccagccgttcctcttctgcgaaaacgcgggtttatctccattgaagacgtgctcgatcagtctcttggcgcgcaccagttctgccgacaaagcagccaggtttaatggacctattgtatgttga

SEQ ID NO: 5692 - DNA, 6657 bp, Emericella nidulans
ccgtcatccttaatcctcgatgtatcctatcatgatggtaccattcttcagaccggcagcctccacactctgatctagagcatcaatcaagttgcggcccatagcattaagctcgaattcaacgccagctttctccttcaggacaggctcggctttcagccattcgtaaatcctcctgaccggatcattcaatgcgaaacgtcttatgactcttccggtgggatgtcggaactgaatgcgtgtcgttgttacagggtcagtaggaggttcggtgtgtggtcgatcacttgcaatagaccaaaatgcggatgtctcagcgtctgcatctgcactttcgtctgcctcatccatctcagcgtcctcgtcatcgaccgctctacctttgcctttgacgtctccagcgctccgcgttaagtcgtcggggtcttccatctttcgagactgtccagcgttcgccccgaggctgtttttcaatgctagctccaacatctcttcctctgtcatagcatcaatgctcttctccttaatttcgcgtttccgtttcgccactgggtttcggacattgtgcttcaagctgtaacggtcgagaaactcgtgaagttgcatcagaaaatcagcagccttcaccaccggagggcctgaccaaatcttcatttgttcacccgtccgcgggtcgacgatggcaatatgagggtagttatcagaaacgtcactagcctggaagtaatattgtaggtatggcgcggcacgggggtcatccttggtgtactgcagaaatatgaaatgctcttgtatggtctccttgacgttggcgtccttccataaatcacggttcaaaacctggcagtcaaagatggatgggtcctgaatattcaccagaagccacttctcatgctcacggccatcttcccgagcgagatcccaaggtaatcttgacatgatttcgaaaggtgggcggtacagttctgcaagcagatttgttttgctcgatctctcggaggcgccgcctgttgctgccgccagcctttcgcggtgggactcttcctcctcttcgccggcccatattgacgtagtatctctctggttgaaaataccaggtcgatcttaaacgcaaacttattagcagcaggatctattacgatgaatgaaggtatactcacctgtgcgtcgttgacgattccggatttgccctaagatactctcatgcatatcatccgcaaagtctacctctggtccaacaagtgtttcagtggtacgggccatcggcgcacgcacttcatcggcagcactttgtcctccgtacatttcctcttgtagacggcgtgccatagctgcatcgtcttcgagcgttgatgtatttgatggccggtttcgtggcgtagattgagcttcgtcttcatcagagtccaggtgcactacccccgacgcatcttcgtagcctgtggaacgcgatgctctgtttgctgcagaatttgatggaaccggatcgcgcgttaattccgctccgtcgttttcaaagtacagctgcatggcctgctcaatgttgaagtcggtcaactgcaggtactgagttgcaagctccggctttgaaccggtaatttcggaaaattgggccacaacgtcgctatccatggcgaacaaatatccttcgaaactcctagacgtagttattataggggtgtgtggcgttatcctcaaattatatccttatacgaattcaaaccacaagcttgaaagcgaagagctgcagacaaacgtgaatcccaccaagtttggtcgagggccgaaagggtcacagcatgtattctatcatctaagagaggttcagagagtgaaaagcacaggctcgacgtcttaagtctcgaataaaggacgacagagaaatggcaagaataaagatgtatttggcctctgctaaagctccatggttgctatcaggctgccttagtgacgcagttggtggacgtagggccggattatatattttccggtctcggcaagagatagcgcatacatcgagatcacgtgggaattagacgcgtcgcgcgtggacgcgaaagtggaggagccaattatgccttcttgggacgagctgcggtcagtaaagcgtctgccttttctatctccccatgacacggccacccagtatcgattgacggatattatataattggacagtacaattttatccataagagtgtcctttgctggttgctctttcctgtcttcactatggctgtgacagccctgggaaagcgccagaggagcgccatcgagacagaaggtacgactatattgtccgtttctccacgctccttccatttgctgaccgtgtcacgaatttgtagcttctcttccgctgcatagtgatagcaaacgccggacacagcacccccgagtccatcgtgagagcaatcagtcaccagaagcaccctcgactcgccggcttcgatctcggacaatatacaacgacgagcctcaatctgagaatgccgccaccacaaaaagccgctcgcctgtctctaggcggaaaaagaagactgatttgcaggaggatcaggagccgtcctattcgaaagagaatattatacggagtacatcccaaacttttgacggtaggcacgaacggcgacgtgtgaaatacattggctgatctgttcagacaacaacctaaaacctgctgaagtcagaactcctacgaaggccagatatcgggatgctcttggctcgccgcctgtcacaccgaagcatcgagttcaggtgggagcgaaagctctaacaccccgtacgccgcgacagttgggaactccgaccactactcagactgtctacacccaagcccgtcagctattcgcgcgaggtgcaaattcggggcgtatcatcggtcgtgaggtggagaaagaaaagcttgcatcgttcatcgccgatggcatgaagttcaaaaagggcgggtgcatgtatgtcagcggtcctccaggtaccggcaaaagtgctcttgttaaggaggttcttgatgaagttgaaattaagccggcaagagtcgcgcagctgaactgtgcgagtatgaggacagcgcgggacgtctacagcaagcttacggaggatctgtgtgatgatgacgatgttttcaaaaagagcgaagccgacaggctcaaaagtatgtttttgtcggacaagaaacaagccagcaaacatgaaatgtttctagtcatgctggatgaaattgaccatcttctcacatcggatgctggcatcctccagtctttatttgagtggtcactacaaggggaatcgaagttgttgttgattggaatcgctaacgcacttgatctaaccgatcgatccctgcctcaactgaaggcaaagaacttgaagccccttctgctcccatttctgccatacaatgccagccagattgcaggcgtggttatcgaacgccttcgctcattgctcccagaaggccaggtggaggatccgaatttcattccttttgtccaacctgcagcaatccagttatgtgcaaaaaaggtgcgttcgcaaaccggagatctacgaaaggctttcgagctcatcaaacgagcaatcgacgtgattgagcaggaaacgatacagaaacatgacatgcagaatctaaacagcccttccaaaactattttggtcgaaaataacaatctttcatcgtcacctaagcattcattggcgaaggggacttcggcacttccttacacgattatgacagcaccccgagctagcattgcacatgtcgcaaaaatcacatcatcagtttttggacagggaacaactcagaggctacagtgcctcaaccttcaacaaaaagcggcaatttgtgcgctggtcgcactggaccgaaaacgacgcgaaaacgacattccgcaaactccatccaagtccaagaacttggctccaacagttaaacaaatatttgatgcatattgtaccctttgcaggacggacaatattctgcacccattgactgcaactgagtttaaagatgttcttggtagcttggagactttaggccttgtcggtgaataccaaggtcgaggtcgtggtggtactgtcgctggcggctcagacgtccgacgcacgccttcaaaatctagcggaagctcacttagcaaagcattggacgagcaaaaccttgtttgcttcgtatcccagaaagaaattgagagtcagatcactgggccaggtgaaggtattcttaggaggctgttttcgggtgaaggtctatgataactctatcatacagcattattttttctgttttcttttatttttgtttttggagcattctggagtctgttagcgattattggttagcggtcactgtttcttgcagagtgccgatctggatcattgtccacttgaatatacaggagcattattgcattacgatggatatgggaaacatatcccacttggaatgatacctcttgaccccaaggggaagggactgtatacgattcacatacagactcaagccgatgagtactatacaagtcaagaagcaaaatgtaaagcaaagaggactaataagaacagcagaatgagatagacatacaggggggtatgcaagatgtaacgatatagtttatacggaacactgaaaagctgaaacataaaacaatgcggaaggccagagggcgctcctagggtccgcagaatacccagcagcagcggcctcaattaaaaccaaggacttgacctatttagtcgtccatcggcttatcctctaatgtgacacccttgagctcggtagcgctctcagcgatactgcttcgcttgctgtctgtgtttgtttctccatgaatgataggaaagctggagcggctgccgagacccggcttgcgggtgtggatgccgctggagcgtgacatggagctccggtttaggctgctggtggtggaactggactcctcaacgtgaggtgtcggggtgggtgtggcagagtcgtccgattgagtttccggcgggggactaggagacccagtcggttcggaaggaggttcttgaacgacggaggattcggcggtggcagggctaggggcagtagtgccgtttgtgatgggttcgggggagtggatgttcacggtggagagctcgtcagcggttgtagcagcggttgaaacagcccctgcgcctgtgggcgaatcgctaccgggcacctctaggctgtttctggtagttgttggggttttcgagccagagacgttgattgggaatcggcctggttctgggccgctggaacggtcacgtcgatgtttgcgcggaggagctgggctgtgggcgcggctgcggtccataatggctctgttgcgggcttccatgccggcccggcggttgctttcatctgtgctgattgcgcgcggacggggtgcggaaccaacaagcccactggactggcgtttcagttcaccgaaaatggtgtccttgtgggcgaagaggtcgcggatcaagcggtaactatgacgctcatccattgtaaggctgttctcgctacggggacggaggatgcagggagctagcgattgggcaagggcagaaacataggtttcgtcggccgatgtcaagtctatcaaacgcgtaaaatgggtcataatagcatcaagcgtggcaatgttgttgagacgaagttgaccgagggtgctctgcagtactttaacgcgtccttcttcagtggtctcgtttgcagtcgtggaataaatcgtcttaatgatttcgtatacttgggatgaaacaagggagtctatccgggtcagcttttgtgccctgagctcttgaggggttcgtcttacctggcaattcgaggaggtataacttgagcacacttgcaacgaccggaatctcatacttctgaagcacttcaaagaaatcgcctttcctgttgttgagggcgtgacggaggtggtgggtcgctcctaatggaacatcataaagccaaattgcacgtctcgactcgtctccttcaagttctgggtagcctatgtctgattgttagttctactctttagaaggccgtttccatcttacagttgtccaggtaagttaagagagtagtcacaataactggcactctcttgcgatccgcccttgcccgagcctcaagatcgactccaaagatttggtctggaagccgttagatataaagtctgtgagatattcgaaatacatacctccaacagagccataatagttctcgtaggcctggaccttaggtatgaatccaccagttctatagttttcaaggagatacctaagatctcccagaggctgaatagtctcttggtagagcatcatgtggtccacagtactttgtaggtttggaatgacattgctgatagcgccggagaaatcaagaacaacggctttgatcgcctttagacggactagctcacattgctccataaccgcaggattgcgtcatttctcctcctgcagcttacacctgaggaggtcaagtttccgcacagcagccttgtaacggtcatcagcttcacgagcctcccttggagcttatctgcggtgtctcgtttgatgctggttatttagaggatttcagccggccgctctcaagacagggaattagcgaatgataactcctcgctgaccggacgagtgacaacccccaaagtg

SEQ ID NO: 5693 - DNA, 7019 bp, Emericella nidulans
cactccttgtatgaattcaatcccgaaatgggaactattgtagtaactccaatttccccggattcttttctttgcggggaatctgcagggtttagggtaaattggccaacaggtgcttgcatgtggaaagcctcgagacggtcaatgacgagctgtttatatacaggaccaatgccattctgagtgcgactcatccattcgcagtatgacttttgggaaagccgcatttctctctttctctctcttcggagcaagctgggctggcccttctcggacgctgcaggctcgagcagtctgcacgccaaaagccgggggctcgtcgagtatcgacgacgtcccagctattgtcaagtcgatctcggcgtgcggagatggcggaactatcgtcttccccgaggactcaacatactacttgaatagcgtgctggacctcgccggctgctccggctgcgagcttcaagtagagggcctcctcaagtttgccagcgacactgactactggaatggcaggacggcgatgatcaatgtaaagaatatcgatgggttgacgatacgctcactcacgggatccggcgttattgatggaaacggccaaaaagcgtattctccccgttttccgttctctatatacgaactccatctataaactaaccgtgatggccaggtatgaccgctttgcacaggactcaagttatgaccgtctgacgcccttgtatataacaggaggtggggatatcaaagtctccgactttcggctgaagaatgctcccaatgtcttcgtctccgtcaagggcgggaccacaaacgcagtcttctcagatatgaggttagatgcgacctccaaatcggagactttacccgagaacacagacggattcgatatcggtgagagcacctacgtagccatcagtggcccgtccgtgtccaagtcccacgattgtgttgcgtttaaacccggctgcgtctccgtgacggtcgccaacgtcacctgcacgggatcccatggtctgtctgtcggcgccttgggcaagagcagcgacgacatcgtgcagaacgtccgggtggagggagcgaccatgatctcgtctaccaaagcggcgggaatcaaaacgtacccgagtggcggggatcatggcctcagcactgtgacgaacgtgacctggaaggatatcactattcaaaactgcgactacgcgatccagatccagagctgctatggcgaggacgaggagtactgcgagaccaatccgggggacgcagtgttttccggaattgcctttgaaggattcagcggcacgacaagcagtaaatatgacccagtaacaggaaaccttaactgcggggaagacggcaagtgcgatgtctccgttgttgactattctgtaaaagccccttcggggggtggtaaggtcctttgtgcgaatacgccgtctagtcttgggatcagctgctcgtctggagcgtcgggatgaggttatattgatcctgtagatggctgtctcggtgagagtgctacaaggttgagcaaagttcagggcagatcagagtatgctaatgccattcactcgatttgaatctcacccatagctgccgaaaacctcactgtcaccacctacaagaacagatgtctctgccaggcacgcagtgtctaaatgtcctcagtattgtcaatgccgtcatttcaccttacatgctcaatccacgttggaaactagaggggcaaactaagactttctgggcccggtacaggttcctttgcctgactcgggtattcttagagtggcggaatctaaaggatgcatgtacaccgagctggatgtcctattgagaagcgccttgaagcgaggaagcttacagcactcctgctgaggtgttctccgttaatcagcattatcacgaaaaggaagagcagtgaccacggcgaaaggaaaccgttggccatagagtgatgaatctgttctaagcagaacgcaggcctcgaacagtcgccatacccttctgatggggtttgaaacgcactgaattgttatatttcaggcgttaaatcatcgggtttgcttaaacaaatacatcgcaggattaatggttgatgcataatttaatgtatccctcagcccttttaggctgccaatcgatttacgtcagtctcgtttagggttcccttatcctattctgacttctgcagtcaggcaccggacgacaaatgttcgtataaagaatcactgattatatgtacataagtaatcatcctatcctaacaccaggtattgcagtaaggcatcatgacctcaatctgtaaatggtaagctagacgatgctcatttacactagatagttctgatatatgttctatcacaaagtgctgcgtgtttaaacagttcgtaagcgtagtgctcttgagagaaagcgcatcgatacctcataggtaaggtgggatctaagtatattattagactgcattgcctctctgttctgtcaaagctgtaatatgataaaaggccatttatccaggtgtaggtattgcacctttatcgcgcaagtcgttctatatcttagtccactacggacgacctaaaactcgtctaaatcacattgtaaaacatgtctcaggtcaaaatttctatttaccaagaatccgtatatacagcttatagcccttcgataagaacatcttccgctcattcctgctgaggcgctttcaagtccaagaaatttagacaatctcctaagactgcgcaaccagatcggcccggctcgccgttggtaatcgagacacagatctgtccgctgtcatcggcgctgatagttccctctccgaagatgttctcccaggacccgttgggcgtcttggagtcgaagcagatctcattctcggacccagatccactgttggacgtgacaacaacgagttttccctctgctctgctccacgcatatgccgattccgcaacgtgcagatggacatggtcattgtccccgagcccgccagcagctgatcgggctgctgagagtagggagattgccttgtacaggtcggcatcggtatcgaagttgctgcgccagaggtcttcgcggttctcgggatcattgccacccgcgtagccctgttctgtcccgtagtagacgatgggaattcccctggcgagaatcacataggcgagtgcgttcttcaggagagacttgtcgtccttattactcagccagcgtgcattgtcgtggttgtctatgaatgtgccgagggcgcttggatcggggaaggagctatcgatcttgtcatgcatgtcgacgatatcctgtgcagaaccggcctgctggtagaagttgttcacggggtagtagactgcgtagttaagcagaccgtccatggtgtttgcgtatccggcgaggtaatctgggtcgccgtcgaaaacttcgccaatggtgtagaccccagcagcggacgagaagtcggaccagaagtccttctcgacatgcttgacggtatcgatgcgcaggccgtcaaattcgtattctttcacgagccaggtgatccattccttgaagagagtgcggatctcctcgctctccgtattgacatcgggcagatcatctgcgatgcggcaggtttctatgctctcctgacttgagtagtcgatcgtacaagcggaatggtatgcgctctcctggctcagagactcaggttggttgtcgctgatggggcttcccatgtggttagcgaccacgtctgccataatatatatgccctattcaaaacatggttcttgagtatattgcactcgaataaaacaccaactgcgggtaagtaccttttcatgagcagcactgactaggcttttgagatcgtccgcggtgccatagttctcgttgatgctgtacagatcctttgcccagtatccgtgatacccgccgtcatgatctatagacgtggtcagtttggtaatgccacatataaatagtctgtgggcgtttgaactgactagcaacaacgggagtgatccagatcgcatcaaagcccattcccttgatgtagtcgagcttgccctctaaccctttgaaagttccgccgcagtaggtgctgagatcatcgcaggcatcaccacctgtatcgtcgctcccacgagcaacacgatccgtcagggcgaagtagatgttgcgagatttccaggcatcgacgtccgctgctgagacggtcgatatgagggggagcagcagtcccgccagggtgctggctagcttcatgattccagcaaaagctatcaataccaaatacttctaaacaagaccgtaacgagtgtatgttaatcagataaactttgatgcaggatgttcatacctttttataccatctcgcccatgatcgccgtctccaatcacgttccttggctcagcagccgcgcctcaggattatacaattacttggcataccacctcgcacgggtgtcgatctcttcatctatgccgtctcttgctcttgatacgctgactccccgatgccccatcgttccggtaaaaagccggggcagtgtggagaacccagctgccagtgagactgaaaagtgtggggatctgcagtccggggatctgcaggacatatttatatgaaacggcaggcatactcctatcatataattcagtgcagccagtccgtgatcagcccgaagcgcggtgatgccagcttggagatattaaagcaggcaaatcctataggctacaaagcccgctagtgagaggcgatacgggcttaggtgagattatgctatcgtaaaagggccgattaaacagcgaattgcttgtaagaacacggagtatacacatcacaggtttattgctttctgtagtgaaatccacagttggtcagaggaagttggcatagaatagagagaactaagtgatcattgtctgagggagcgagctcatggacttagttacagaacagaaagatgggagatacacgtgtcatcttatatagccccttaatattggagtatcaactactccaactccaagcaattactccaactccaagcgctaagccatattcataacactttccaaggtgtctacaaggacaagataaatgtaactagagtcctgcggctagatacttgttcatgcctttctaaaatttagaatgcgcaattggtaggactgatgatatggagaatacacgttgactagctcatccctggccaatagatcacattattatactggagtgccgagttagggctgaagccattggaatggaattattctccaagcgcaaacatgtgggatgcaagggtacactacggtcagtttagtcccagccacccttcgaactaaggacagaggctactaggtagaccgcagcctaatgcccaatcaatcaggactcactcatagcatgagtcatgattagtgggagaaataccagtttgcgttcccagactcattcatgcactccagcgtgcattatattaatgtatctcttcagcacctatcttgcttttattcctgtacagaagacagccctttcttctgtagctacctaatattttccaaacatgcttatagtactaattctagtagatttaaatgctctccgcatgcctctaagagcttccacatgcatttatagactcccgcataatagctatattgttatgggcacctcataaaacgtaccctcccccccaaaactgggtttacgagactttgtacaagcatatgctttcttaacgtaaaccccgtttctagctgcgcactaaatacactttcttctcatccaacttttagtgtacaaacagcaggctatatctaaaacaagcatattgctcccttagattattattaacaaaaaaaaaacaaagactcttgtcgtggccgacactgaacccgccagagataaacagcctctcaggcagacatccggctcctcaggcatcacagcctgctcagatcagctccgccggatgatactgtcgaccggagatggcctctccttgctaatcaacatacagcacctcgctcgtccgctcatttgatacattacatcgcctatatgacaggtcacatctgactatacaacctgaactatctaccgatttcgagaacattcttttgaagcctttgaaaagacataaatagcctatacagatcgtagttaggagattaagaccttcaatgcaatcgctcattacagatataaaattacctgaccaaatcgacgtcagtaaccacctccagagccaacagataccaatcgaagctgtccagcggcgggccaccatgtatagacttccaaagtttatgagcttactagctcctcaagcattcgttctgttttgtctattcttcagtggtatactagcgaataagacgtgctccattatattgactatgcgtctcgccagtagctgtccaggccagctgtccgcataaacattgatccgagcgccttgcaaacgtcgtatttcctggggaaatagaagggataggctctaggaatatccagaaataccgcaagccctatcattcagttatagttcccctatctacgcagcatgacaactagccttggtcatatgccatatcaagttgttatgaatgctcaaaggggaaagggtagaaggaagctgcatcaactacacgaacgtagcctactaaggataggatgccatatgacgattgattctctatcttgatgacgatagttgtcacttcttcaatgtacaactcctcgagggatcaggccaggggccagagatcatgccatacagatcacgtggcacgtgacacgaggctcaacatgatatattcgtatcacaagtaaatgatcatgtcagtaaaagtcggtcttggacaagcagttatatataggtccgacctggcagaactggccaggggtttttatcatggttgagagagcatgtgcccagcaaataaagtcccaacatggttgccgactagaaaggtcactacacttagtcaacattagtatgttgaatgtcttgatttatcgcatatgcaactacaaa

SEQ ID NO: 5694 - DNA, 8017 bp, Emericella nidulans
ccgccacagtatcccgaatcttactataacgattacgttgtgcagtcacctccgcgacgaatcgttatagacgagcatggtaatcagtattacgaaactatccccgcaccgaaaatgtcggcgatgccaccgccggctactcggattccgagggccgatttatacgaggcccctccgccgatgcgccaggctagcgtccgggccgcatcggttgttgaagacccttacagtggtcgaagattcgtgcaggaactgccccagggttaccgtcgggtgacagactatgctcgaccgccaccgactgaccgacgcccttacgcggcgccctttgaggtgcgggacgcgtacccgcgtagtagcagcgtgcaggttcacgactatgcagcccggccgagtcattacgcggaagaagccgaacttccccgagaaagagtagtacgaatcccaagtgtccgaccgccgacaaccagataccaggagccccgcgaagtgatacagcgcgtggaaagtgtccatcccggtggtcgcgacacgagcgtatacgttgacgacgagatgcgacggccaagggagtacattgagcgaccggttcaatacgtagccgcacggcctatggcccgtgagaaccggtattacgagaacggcgagcccgagcgagtggtgctcgacgggccgagggatgtaatccaccgagttcctcagcggtactgagcggtattgagcggtagatttgttttaaaggatgatgatttacagtgcttttctagcggtcttgtacaattgcatccaaaacgcatcaaggcagtattaaagcagcattaaagcagtaacaaaagcaatggtgccaagcaatggtgccacagtgactagggaacaggcgttcaaaagcgactcagatgacacttttcgaagcaatagatttagtacggtctttacttaacacttaattaacacttcaattaacacttcaattaacacgtgaaatcttcagtcataccagctttcccttcacgtattcagctatagtcccgccgacgtcatcttctgggcaggaagcccaggtgcctaggtgggtcagaagtcgccgccaggatgactgtgatgctggacgcaggttcataggccgggaaattaagtatgcagtcgatgtgctctgcaaggttaagaatatgagcttgcaccaggtggcgcgccgcttagttgtctgccaaaacgaagcttaaatactccggactctggctgttgttccgtctactgccaacttgaccggcgttgatctgaccatcactggacgagagggttgatccaccctgtcataccgacgacctctgcaaaccttgttgacagttgtctacctgcttctcgaaaatactactaccactgccagtactaccaccaccagtgctaccagtctaccagtactaccagtaatataatgctacttaataacaaatcattagctctccgttatactccgtatgtcccgctgcgaatcagcatacggtgccctcacgcagccgaaccggctgcagaccgaactgctgttaatgcgagtccagaccaggctcgacagtggcacgtgacttgttccctcgcttgttctcgaaagggaatcaatagtggaccgtgctgaaccggattgcgatgatgacgaggatcttcaggtatgcttggaatgcatggactcgttccataccactgctaaagttctgaattatcaactggcctagcgaagcaataatacgtaacttggaagcaaaccctgcccagctggagcctcggccaaatcagccctgtcttgacctcctgtatcccttgttcgtaatgcgatcagatccttcgaaggggaagcaaagccattgtgacttggacatccagcgcaccgaagggggagattaattcgaaagtcacgatggtcgtcggctcgttggctcgttgtaggctcgtagacttgtcgtaggctgggctgtgtggacaatgtgatatgggtgggttgagacatccgcagttcccgccggtcaagaagctagatgatcacaactgctgagcagtgaacagacatatggagtgactgaatagatcttagacccagcagaagaaaaaagtacgtttgggtgattattttacgtggttgaccgtcgtcgtcgtggtcagactgctggattcagccgctgattttccctccatctcgatccgtctcgatctgctcccactcggcctcctcgctctcgctcactctggctggtggacgactcttcctcacctcttaccttcaccttcaccttccacctcaccaacgtctctccatcccaccacagtcctccccttctcccgtgccagctttacttcttttatccttttcttcccctttcttttcttctctgtttcttttccctgccttcctttcccttccttttttcccgcctccattcctctttctgccctcccatccctcgatacccgttttaggttgctgagttcattccgtccattcccatcccaaccctctcctcctgtgcgcccattcctcttccatcgtccatccctgttgagaccggcgtcttcacggcctgggaaaaccactttcttcttccgttttcctcctctcttcctggttatcctcccacccggtccgacgctcgccatatcctccgcctgactcccatcgtctctctcccctcgattcgttcaaggggtcagagattcgatcctacacagattatgcacaagatcagctacagcacggaccatgcccctgatggttgggagcgaatgacacagacgtctggtatgaagagacctaatgcagagttggcttcccactcgcttggacgggccccatggcgcacctccgatgactccgccgaccggtatcgatcctaccgtcaacctctccttcaatgtgccgttttcctcgactctcgccggtccagatgtggatgatgtactgcacgcgagccccaaggctctccagcggtggtcgtttcctgagggcacccccgaaggcacgcccatccaccagctgcccgtccacaccagcaacgtcgaagccctacggatactgtgccgtcaaatcaccgaaagcagcaatgggagggtcgaggcactggtcagctcgtcggagcccaagaccgttccgtctctacaacgtcggccgcaaagattggctaccaatgtctgcatcaccggtgacggggagactgtgcgaaaaatgcgagccaaaatcctgaatgatacgcctatcttgctggtatgtaaataatgtttcgggtctttttacttcccggcttgcggtgcctcgatttttgttcatgtctcgctaacgttttcgctactgcagcgatgtgcgaccgttgacgttgatacgcatctcatcacggataaccagaccaaggaggtccgaccgcctgtcctggagcacctggacactttagccgcctatactggcacggatatctttctcctcactcccaagcttcgtgataacgatagtgccgttgtctcctcgtatgggtacgccacagacaatggattggatcaacgtttccgggtttgcatctatggcgatatggagagcacggaacatgccaagacaagggttctgatcatgatcgatcaaattgtgagtttgttgttcctgcttagcttacaaaatgtctctaaccgagaaaagctcaaacgtcacgtcgatgccgtgaaactggatctcaccacccacactctggtctgtggtcgcactcgcaagaatatcaagctcatcgaagccgccactggcacagccatctattttcctcctccgtttccgcgcatcttcggttacatccccccaggcgcccaccgtcgtagtgaagacgaagtttacatcacgggcgagactcaggaacaaattgctcgggctaagcagaagctgcatgagctggtgatgggtgtgaaagtctatgtcaaggatgtggttgtcaactccaacaaaatcgacaacatcctgcttgaccggttggacaaggtccggaaggtcatggaaatgaatggttcctacgtgcttttcccgcagttgggcagccagcgaggtatcgtacgtattcaagggactgatgtgctgcacgttgagcgaactgttagggagatcatggcattggtacggtttccaaaaagaactactctagcacagctaacaatccattaggccggccaattttacagtgcttcgtggtggattctcgtgcccgacccgaccccgggtgctgttcgaacccccactcatgcggaagtgcggacaatgctctccgacatctgcaccaattccggcgctgaagttagcttcgacaacctgaacttcaccattaacggatccgacgacgctgtcaaggccgctatgacggtcatcaatcagatccccttcgttcagcgcagccagtatcagatgcgtgtaaagattgagttagcgaacgagcacaaggagttcgttagcggcaagaagaacggcaagatcaacaagatcatgggccaaagtgagtgctagtgataggcagctggaaagaggacatcgctgacaggtaataggcaacgtacaaattatctttgatggcttcaacgagtacaacttctacattgatgtttgtggaaaccagtttgagtcgaccaagagcggtcttgatcttgtcgagcaggaaatgccggcgtcaatttccttccacgtccctgaccaatatcacaagcgtatcatcggtattggtggacaacacattcagcggatcatgaagaagtactctgtctttgtgaagttctctaatgccatggatcgcggcggtatgggcaaagacgacgatgatattaaggttgacaatgtcatctgccggacccctgcacgaaacgcgcagagtcttgacttggtcaaacaggagatcatggacatggtcgagaaagttgatgccgagtacgtttcagagcgcgtggtgatcaaccgactgtatcaccgtgaactgcttgcccgcatgccggagatcgacgaactcgaaaagaagtggaactgcaagatcgagtttcccagcacagagcttgcaagcgatgtcgttacaatttctggtcctgagtatcaggtcccgcaagccgtcgacgccttgctgggaatggtgcctgaaagccatgaacttctgttccagagttcaccggagctgcgagaatttttcagaggtgcagattttcgcgaggacgtttgcgccaaactcaaggatcagtacgaggttgataccactgtggatatccccgatgtgcaggctactgaaaacggatcggattcgcccgcgtttcctcctgaggaccgcgtgatacttgggtacacgcgcaacaatgctggcggtctgaaagacgcaattgacttcttgatctctcgacttgtcgcgcatggactcgatgctaccacggttaaagggccatcccgcggcccaagtctgactccttcgaagagtccttaccgttctttgactcgaagctgttgcagcatgctcccactccgatcgctacagactctcccacccggcccagtttcactgacgagacgagtgagcgtgggtcaatcttcgagcgactcaggaaacccggcagcatctcttcgttttcttcattcatcggccgcaagaaccattccgcctccccggcttcattcttcaagcacgcctccagcaatgcatcaaaggcatctctggtttccatggaatcccgggatagcggctaccgcaacccgtggaatgactctggtgtgaacctccccgaggatgacctgcccgccctcggaagttcccacagccacagcagtagcaatggctggcccgcgcgctttgacacgaaatttccattcggtaccgcgccgggagacatgacacccaagcatgagctccgcgcatcttttgatagtggtcgtcctagcacttccaattctacttctggatacccggcccctattgggccaccgcgttaaaatcaatgtcaatttgcagcagtataccccaagagaaatttcagtttcaaatttttgttaccctttgctatcactactgttacgagcgaattattgtttcggattttttgtcttgacgcagtttttgaactcactcatattgttttttgataccacggagagttatgctctgctatttcctcatgtatagcatggcgtcgaaagaaagaaaaccgcagaccgaataaggattgctaagacttgaattgatttgacttggaaggtgagggcactacctcctagtgccctatgatcagtttccaggcctaccgtctgtttgattatcatggttatgaccttcactgtgaaaccgcatggatgtcatggtgtcgagtatgcctatccctttctcgagccggccagtcagtcagccagattatgttaaaagacattctatccatacaattgcgtctttatctatctcagctatgataccaactgaaccatggagtatcttggtgttgatttacctagtttgctttgctttgctttgtttcgagtcttgcccttgccaacttggtttctctctggcttttggacatcttacgttctagttatttatatactcctgggtgcacttaaaggtatttctaaatgttcagagtcgtagcctgaaaaatggagatgatgagaatagacagcctacaaggtctatatacttattcgtatatacttatttgtactgagttcccggtacggtaattcgtctaggatgtaagctttaggactgttctttcgtttacattaactagtcagcgccaaacgtaaactttctatgattgtgattcttgccgcgttatcctaagaggcattcttgtagggctttaatgttcgtattataaatagcctaccgcccccaggcgataccaagcgctgaataatgcttttgttgataataataaggtgatgaattattagttatagctacatatatatatatgtaaaactcaaactaacatcgcggctgcggcgaagggggtatgcgcatacgcatcaaacctaacctgaaatgacagtccaaagaaatatgttacggtcaacgatcctaacgccaaggtacgaaaaggtaacattatgccggagcggaaataataggtatgggtaggtaggttcgaagcaggaagctcaactcaaaaggccacgccgatagcggattgtcggtggtgatcatgatcattatccgggtgatggttgtggccataggcatagtaatccaagttcaggttggtttgctgctggcacctcgtggattgttggtgccgggtggaattggggctgggtgcttgactgtgtctgagaccgtgcttgtcgagggaaggggtatgtggatgcatatgagtaaggcccgggtatctcaaactccttctcaatgcgggaatcgagcgtggacgtgcgtgctgtcgctgtggttgctcgtcaggggggcgacggcggatctgacaccacggttgttttggcaccggctggtacaggtacaggcacgggcacagttggcgtggacggcgcaatagtcgacccgcttagagtacgagagcggatacgcatggagagcttgtcgcttaaacttgaacttaggctcaagcttggcttgcgggaggatgatgatgggggcgcgaatgggaaggttgggggaggcgcggaggtaggcgttttaggcgccgtggatatcgcagtggtttgttgtaggagccattgcgttacacgactggagcgggatgggggaagggacaggttaggtgtcgtcatgggcatggttgctgagaatggatggtgttgagtatctacatcaatacccatacctgtgtccactggggatgaaacacgttcgtaggtcttgttgcgaatggggaaggacggcagggatttgctttgggtcaggtactgggactgtgatgttgccggcttgagggttttgtggatggttgatgcagatgcggtggcatcgtgtgactgtaacgctcgggaaggggtattgtttgatagaggcggacttcccacacccac

SEQ ID NO: 5695 - DNA, 6637 bp, Emericella nidulans
aggtgggaggaacaagatgaatgaggagggagtaaaagagagaaatagaaaagaataaaagaaaagaaataaaagaaggagaatagagaagaaatagaaagtgagtatgagaggaggggaaaagaagtaagataaggtgggaagagaagggaaaaggcacggtaaagggcggcggaaagaggggatggaaaagtgtaaagaaaagtaagcttagaagaggagtgggaaataaggaaaagaaagggagaaaatgatgagaggaggggaaaaggaagaacggagaataagaagaaaaaaggtaccaaaataaaggagtgatggaagacgccaggaataagaatcccgtcctcctatcctctaacccggcgggtttcgctcatgtaaaattctatcatcattttcatgatatatttcagcttcattctcattcaaagaatcactctcagatgagattgataaatttattaagtcattaatgccggtttggtcgttgaggtaattgtactcggtatccattgtaaactagttcaaaactaattgggagaatcataggttgtatcgaggctggattggtgtaaagtgattacagagtgaaatatttatttttttgagcgaggtcgtctgacctcaacgatttagcgaagtcacgtgagctagcggtccacaccaaggtcgcctgaggttttagcgcggtcgtttgagctgtaacctggttgattggttgtgggcacaaactaagtcacgtgcctttgaaagctcaggcgactcgaggttcgtgcgtatgtcatccaccactagtctatcacgaccccatgccacaagctttccaattgtactccgggcgtagtgatggccccggtccggcgttatctacggattagcaagttttccgtacttgaatgtcggatctacctcgaggacccctccgatacgcgatggcttcttgatagccgcgagcctgttctgcctcgcatcttcgccgctattcggccattagtacttccaaaactgcgagaggagaatgagagattatatgctagaaagaaagggaaacctgtcaaggatattattgcggaaggtgtgctctgaaacctagcctttgagcggctatatcttacaggaacgcagaggatttcgaggtcactgtgtttctccgggaatcgcgcacccgccattcgctcctgacgcggcataaggattttgaacagccgataaataagcgcactcggactgaatcaagcgaggaaaatggtggacaggctgataccggcatcctggttgagagcgatagcgaatcggaagtgaacatggatgcaatttcacaagcggggtcagaggaagaggacaatactacagaggggcagcgcggtaaacgcaagagaaatgagcagctgcaggaactacacgagggtgaggacaagaagatgcgtttcagaacaaactacgagggtttcaatattcacggctggatgctctgtttgctcgttacgcgaaagggaaacaaggaaagagccaggatcgaggcagcagagccaaacgccaagcgttgatggaagagtggatatctactcaggcccagggagatctcgatgaagactagattggggcttgggaattgggatacgcccggacccccgaatcagcaacgtcagccgactgtcggctgaagatgatctagcgtggcgcctgcagaataatctttccatccgagtgcgccgggtgttactttttcagtctgcttgacctcaagggcgcattgcatttgcgcacgcacgcttgtcgcaactctcacagtgctggcaggacgatggaacagttaacttacgacaccccccggtatcactagaacaggaatgacatgctctgcgacttgcggctacgccgataactgactattctcgatcacgtacataatccgatgcagggacaagagaggagctgcgatgcctttaaccgaaacgctgcctgcaagttacgtcccggccagccctagaaggccacattcatgtcttggataaactagatgtggtttcacgcgcaagacatcgagtcaatctgtaacgacgtcccggtatcagcatgcaggtggactgttatcaggccagatatcgggaagcctgcaatgacttgtccagcataaccattccagatttgacgaaagtgctcgaaatcggattcgcattgcgccgagacccgtctagcgctttaattctgcaggaagaccaaactggattgtggcgtcatgtaaagtagataacatgtactctatacgtccgagatcgaacctgatgccatagtataccatgcatgtcataatatctacctgcagactttccactccgcagctccacagaatctacgtaccccctcagctgcacgcaatcctgcaagtcatacgtacctgaagtgatatgccaaggctacagtatgacgtttcacatctgaaacctagcgcagccagcttcatgaatcggatacaggcagtatcatatcaagttcatctcagtatcctgccgtttccagttaatgtggtgcgtaacttacgtggacatagaggtcagggccagactggttccagtgtagaaatttcggttcatcttccggcgagtaatgggtcagctctaacggccactacggaaccctattactgatcccggaaatattaggtgtttcgacttcgaacgtcatgatatcgacagtatattgaattgaaatactctgtagatacgggagcaacgttgctggcccagaggatgtctatagatccaccaaaatttttggttttgccaagaagcaaggaaacgagaccacggcttcccattccaatccgcaggacatggattatcttgcgttggaagttgcatggatcaagaggacgatgatgttgccaagtcgtcagagccgccggtcaccgttccggttacggagttagattattggaactgatatcactatcactacgcggctagattttacggttggcgcggttagcggtcagccaaatgggaatatcatcatgttcatttgacctcccgtgtctggtggctgaaaggtcattttcaccgttgatccgtggtttgtagcctttacattatacgtcctgctagtgctagccagctgtctagtgtgtagcgagcgcactatgcactagttaggaggctagggagcaccgccggcagcccggtagaaatgtttgaagccagaagccttgtatgggttccgttctcaaagggcggaattggtagttcgattactgagacacggtcccgtcggagagcagtgcaaaccccgagccagagttggccgccatgagatcagaggtgactatatgagatcagagctccaactgctggcggtaaaacggctcagggtccgctcggaagaaaatgttgagaaccatggtcaatgattatcctgtccttagcacatccattacccctcggtcccaagaccgatagttgggaccgctggagtcgcggagttaaaactcgaaggggaagcgcattctgtgcgggacaagggtgaagccttcgcagttccccactggtaatcgccgagtgaccgccgtgtatccggtaaatgcttggaattttccggctgaccttctcccgagcctcccggatcgctatcgtggtcaatcatgataatcgtcattcgttggttcccgatatattactgcaaggtcattagcaatgtcaatgactgattatcatcctgtaggctgcgaggcatccttgagcagccgtcttactagcaaggattcaggaacgccgtcgccaacctcgcagattgccaagcagccctagctgcaaagaatcttggatttaggtcgactctcccgagtcaggggaagaacggtgatccagtcatcgttcgctttcatcaacggtgcggaagaccagcgccaattgcgggtcgctcatttcgaggaggaccgcttcctgagttcctttaccagagctggggcggtggaagtttggtgccgtgcctggcgtgccgtcattgccatgtgtttttgccacaaacttggtgactgtcgtgctccagatttgcgatccatcatctgaaaccatgtgattgatctgtccggtcctgtttgatttactgtccatcaaccatctgcggagccccgcggcaaactcgcaacgcgttcatcatctcctgcagtggtgatcataataataacttatttctggaagaaccatcattattggggtcatggagtgctttgccactgctggagacctagcctggttggggagaggtttcgtaacgacctaacgcacgcagtatgcaggagcgcaagagcctagcaagggtcaaggcatcagaagctgcccttcatccgcgcttacacctgcagatgatcgtctcgggcccatgcagtactacactggaggtacgcaggaaggatcggaggatgtgcattagcccgcgcttggaattgtctaggtattattggacatagatgttaggcggtcatacgtggtcgttatttggagaacatgatggacatatttcgaataggtggaacaaaaactaccgagtctctaaccgcgagagacgtctgtcgccgatgcaccgtggcctctagcttctccagtacgggagacttcttaggggcgcaacaatcccaacattagagcaaccagaaacagacccaataatagcaaactggaagtcaagagttgggcagagtgactggacagtcgataatagaattcgatatttctctgcaagcaaacgccaggtatgacaggtcatcggccgctgtttatcagcaaatgctcatgttgattgatgtcttaggcctcgtgttcctcctacccccccaaaaaagaattggagtcgggggttccccgccattcgaccaaacgacatcaaacttcaagtttcacgaaggctggtttaaaaccagctggggaatgatgagtcatggcttgatgagacgacaaacaccgctaacatgatcatctgcaacggcaagtaataagcaagtcttgttggcaggcggggttccctctcagtcggctaaaccgacaggtgatatcgaagattcgagataatccctgttgggagctgattccaaagccaggcatatttgttgtgcaaccatgcggggacctgtcacaatctcacgagactcctgacaccacccctgaccaaggctgcaggggcggccttgccgttcttccacagcggcacagcctgagatttgagtgatcagcagctcatcttgcctgtgctggctggttgaatgttctgctggtaaacttgtggtggcttggaacttggaacctgtcccgacattctggcagactcgctgaggctaagatctccgctcatcctgaattctgaatcctgatgattcatcactcagagtgggtagtgggctagtaagcactatcgagtcgcgagatcatgattggctgacatttctgcgaaatccgctctctttgtcctctccagtcttatccctgccgaccctgtgcggccaggatcgacgaaccggcacgtgtcggcgactgggcaagaatgcacaatctgaatcaaatgacggcagctgacacctgaacattccaccagcattcctcgtacggtggtcagtacatctggtaactggtaacgatacgaggttgacagaaacggcgcgcagcgcggcccaccgctagtcgaccgtacggctccttcgtggtaacaaacacccccattcccaagaacaggcaagtcatcagatctcgaagtgggccactggatatagtgtgtgatttgtcattggagcagtgttttggatttatagtcgccgggaaatgatcagtaatggtgggacagaaaagggggaggcaaaaaccgttcggcggtgaagcagcagaggacgggaacgaattctagaaagcttccgcgggatttcctctttggaagcaggccatatggcggaacccagactagtgtctgagactgacgtcgttcgtctccctctgcccggttagggtggagcccatcttctgaagcgatcagggatgcccttcaaaaaataataataataataataataatgctgagattattttttttaatttttctttttgtttagcttctctgttttcattttatggattttatttgattttttctgggtcccgtcggacatataatctcgacctactcggttcttcctcagggcatcctataataagcgctgtcgaccctctttgcgatttctctcttcaagtctcaagctacaagcctacaatacagcattccacacaacagaccgcacaacagaacatccaagcgtctactctcccaccatcacctaccactactcagacaatcacaccaacaagacttcttcaaaccagcatcatgccttccgtcggtacatctcagtttcctccttgccctggacctcccccaaagggccctctgcctcctcttcccaagtaagcctgtattcggctttctgacgaacctgacgaccatcgactcgagcgactccatgcaatgttcccctggaacactccagggaacctgcgcgaccgtcgttgcgctagggacatcgcaatggaattggatatgataccactcttggaaccttaccacgaccttttctatcagcgtacttaccattactttt

SEQ ID NO: 5696 - DNA, 8034 bp, Emericella nidulans
ctgtgacaggcgggctcggaaacaagacattccacgcgccctcggtgttaactactttaggtgatccccaaacctggatcatgtgcctcctcaccatcctcgtcactatcccttctggtctgatcgttaccttttcctcaatcctaataaaggggttcggttatacttataaggaatcggctctcctgaacatgccgtctggcgtggtaagtatcctctccatcctgttgtccacatacgcagtcgcaaaggggtactcgaggtggcttgcgatcgaccttttgcttgtcccgacgctattgggctcatgtctcatgagttttctgccgaagagtaatcaggccggattgttggtggggatttatatggtaaatacggtaaatctgctcagaactacccaattgactgaacataagaattgatagcctgtgttcaaagactgtcgcccccttgattctgatcttcgcctggacgggagcgaattttaaggggtataccggcaaggtcacaggctgcgcgtttatatctgcagcattcagcattgcgaatatcatcggcccgcagacctttcaggcgagggatgctcctgagtacgtttcccaagctcttaatctgacctttccgcatcaatcgtagagctgtacgtcactgacagtgaatgaacgtcacagatatcttcccgctaaggtcaccattgtggtcgcgaatgctgcagcgatcgcggtctcaactgcgctgaggttgctctacgggagcaggaaccgagaggctgaaaggctaggggctctggtttcggcgaagagctggatggaaaaacgggtcgtcaggcaggtggaggaagaggagactggattccggtatatttactgatttcctgggtctttccagctgattgaggttggaccggagggtttgtgagacagcaaaagtattcgatttatagatactagagctgatgttttccttgaagtatatatataatctgcatatgccgagtatcatctctattatctctacttactcaaatatatacttatatacttatttatatgcttaaacatataattatttgctgtatttaatttgatttatattattcttgcacttacaactctgcactgtataggtatcaaagcggggtaaacatctcaccccactcggcccacttgtcaacgccaacttcaaatcttcaaacttaacactcgtaactatcaagagacaaacgtctacccatacctctcttactccaggactagcaaaggaaatggctgcccttcagaaatttaaactagtcttccacgtccccccatcgtccctcgagcccgtccagaaagcgatcttcgctgcaggtgcaggccggtacccaggaccgggcaactacaccgaatgctgttgggtgacgtcgggaacaggtcaattcaggccgggtgacgcagcaaatcccgccattgggaaggtgggcgagcttgagaagatcgaggagctcagggtcgagacgctctgtgtgggagttgatgtggcgaggaaagcggttgaggcgttgaagaagtaagtttctctttatattctataaagtctttatatatggaagggagattatagggttcagtacagatactgaccgtggcagggcgcatccatatgaggagccgtcgtacggggtcattcggctggaggacttttagcccgatgggattcgatatacggatattggtagttggaaggggagtgaactgtgaaatgaatggtaatagaagttaggtactgcactacgacttctttggtaatctagccaggttacagcctctccttcaatgtaactctctgcagcagatttcaaagcagccgtggctacaaacatgcccattttcaggtatcgttgactttaccatagatatccaacttcaatactggctactgcgcagcgtttattgcatccatgacaaccatgcccgacgactattgcaaattcttcgacaatatatgttctttgaaccctccgagaggttgttcgggacagtttgcgcacgaccttcaacgccacagccatagaagcattcgtgacagaaacatggtcgttatgaactcacgaaagctgcgcgtaataattcacaaggtgcctcccgaagactcgtgggcctgtgcgtcttttatttaaaacagctccagttcccaaataagaccatgaatgccctgggagcaagaaaggaaagatctcatagagtgcctcaggaagggagtgttggacaagcaaagggccatatgaagaactatcagcagataaatggccgagtcctgctattagatactccctgatagaagccacgagttctcagaatcggtgaccagattgagccctgctgcaaccaggtcatgaaccactttttgttcggcctcgtagacgtggttgaggtcggtctctgagcaaggagtaaagtgatcgatttagaccccgagataacggctaataaaaaggatgccggagcaagttcttctctaccgttgactaatgcaaagcgtgtgaagccgggctgagcaagttttcggctttcacctggctttaaacccagtgcacgaaggtattgaagttgccgtaggagggattaatgctgccacagacatatacaagaacacgagaatttcttcattcgatcctggctgcataacgcctagtggaaaactattttcaaggcacggttggcatagaatgaatgacttttgacaagcaacaacaccaagttacgctcggtgcttccactatgaggcaccaatggcctaccgcagatgcccatctgatcaaagtattatctttattattggcatagctcccgagccgccttgctctcattcatggcgacggcatacatcaagagggctatgcggttctatctgtcgatcgaggtcaagtccagcatcaacagatcggccggccaacttccagcagtaaatgatagccatatgcagcggcgtttaatagagaacgtttctttgactaggagtggtcactgagtgagaattaccgccgccaaagcaacaaagaaacggcatctgcacgtcccagggaggtttcattatttataggtgacatgatacatcgctgaggctgtcatacatatcagtgagaagaggaaaaatcgatattttgaaactcgctagggcgatatggggatttggcaagaaactcgagaccatcaatgtttaactgcactataccagtaccaagtcactgaagggccaacagctttcttgagattcagactgccgagattagctccaactggcaaccgctgacagcgcggtcagacagtctatttttgatcatggaagagtaacttatactcaataacacccgcacgtccgacccaagatgtgccgcttgcattgttggtgcgttttcgcaattgtcggtctcgaaagtggctgttagtgccgatcacctacacaaggagggcagtgatgccggatccggtaaacatgacgacgatctcctccatggccgcataacacgtaggcacgtagagttgtgtttgaggggctgagtgcgatgataattggtgtggagttcgtggtagacgatgacttgggcgaccggcccacttccttcaattcccgctctgatcatcacaggcttttcggcgaaccaattaattggaaccaggctgcagcttgcaggtgacgtgatcgacgacatcgtggacaaaagggctgccagagactgccagtgacgatcgcgatcgcgcacgaggaagatgaactctaagagtgtttaaatgacaggtgtgaaccgaaacgccggttagggctaccacccgcaggctttactagttgagcatttcgaaaccaaggcttcgattgactatgacacgagtcgctctggtaggtagcggcaatgtagtgccgcatcagataatcttggttgatgaatttagcaggagaatttagtgagaagagccctatgaaaggacaaatataacggcaccaactacagtgggcaacgtgtttttgcgtcgagcctgaactaccataaaaagcccagaatctatggtctttctagccatcgggctcacttaggggtaaaataaaaagtcaaagaaaaggaaaggaaaaggagaatatagaagaaagaaagttcacctgttggttacagcacttacctagagcgggctttagtgacatattatgaaaggactatctacgagaccagcaacaaacgctgacaagcaaaatgagcgaactgaataaatgctttgagggcattcagttcttgttctttaggccattttcagtctaaacatcccgctattgtggcgtttccttccccagaggttcattacttaaatgacatgggaatctaattgagctagcttttccaatgactgctactgttcgagttacccgtaacctaaagtttcccatgccgcacagctctgccggctcttctcttatgtttcttgagggccgagggtggctgcgatcgcggcttctggaagatgatcctgtacgcgtacaaccctagtagggaagagcaattccgccctccgccggctctatctagcttagactcttaattccgagttcattgaaagactattggacgatccggttcggaacaagattcggtgtggttgtaagccggcctatcactggactattgatccccatcaaaagcaaatatcgggccggagtaattcttcagtatagtccggagacaatgattccggtccagcatgtaaagaaccatgagtataactgtctattatctggccctgtagcttgctcagagtttccagggttatcgttgttgctgcaccagttcattctcaccaccatgggtgttcccgatgagctgccgccaggctcatcagagacggacacgatcgtgtcttcgtcgcagcccaccaatcgttctcccatggacctgatcagtgaagctgagagcttgaacctgcgcagaatagcaacgaaccaatcaaaagcccagtgccgaccaggctcagcagccgttccctcgcatgacaatccacccaacgatgacctagaagacgcaacccttgaccccaactccgcctcattctctctcgagaagtggctacgggctgcggtctccgacgcttcacagcacggtctatctaccccgtctggaggaatcctcttcagaaatctgaccgtctcgggctcaggctcggcgctgcagctccaaccaaccgtgggttccgtcttgactgcgccattgcgattcgcgagtttgctgcgacacaggcgaatcgagcctagacgcatcctgcatggatttgacggcgtgatgaagactggggagctgctccttgttctcggcaggccaggggccgggtgtagtacattcctgaaaacggtttgtggcgagaccaatgggctgcatattgacgcggacagcgtcctgcattataatggtataccttcagaatagactgccgtgaccgggtcctgaaatagttgggctaacgagatccaataggggtatcacagcagcgtatgatgaaggagttcaagggcgaggttgtctataaccaagaggtacatctttcctgcttagttcactgtagctcgactcatagcatgttaacccccgatcaaggtcgacaagcactttccccatctaacagtccgccaaacgctagaatttgctgccgcagcacgcacgcctgcgcaccgtttccagaacatgtcccgcgacgagttcgcttcatacgcagcctcagttgtcatggccatattcgggctctcccacacacacaacacaaaagtcggcaatgatttcgtgcgcggtgtgtcaggcggcgagcggaagcgcgtctccattgctgagatggcgctacgatgacaccattcgcagcatgggataactcgagcagaggccttgactcggctacggcactgaagtttgtccaagctctaaggctgagtgcagaccttgcgggtgctgcgcatgccgtcgctatctaccaagccagtcagagtatctatgaggttttcgacaaggtcactgtgctttacgaggggaggatgatatttttcgggcccacaggcactgctaaagaatacttcgagcggatgggctgggtttgccctgccagacagacaacaggcgatttcttgacctctatcaccaatccgctggagaggaaggcgagagcaggaatggaagacgtcgtgcccaagacaccaaaggatttcgagatatactggcgacagtcccccgagtacaagactctgctgggcgaaatgactgagttcgagacccaacaccccaccggcaacgacgagcaggcctcagcagaattgcgagctcgaaaggagaactcgcagagtaggaactcacgcgcagcttcgccatacatcctcagcattcctatgcagatcaagctcaatacgaaacgtgcatatcagcgtatctggaacgacatgtcttcgaccatgagcacagtcgtcgggcagatcgtgatagccctaatcaccggctcagtattctacgactcgcccaacacaacggccggtttccagagcaggggcgggacactcttctatgctgtgctgctcaatgcattgacagccatgtccgagatcacgagcctctactcgcaacggcccatcgtcgagaaacaagcgtcatacgcgttctaccacccggccaccgaggcgattgccggcgtggttagcgatgtacccgtcaagtttctgctcgctgtcgccttcaacgtaatcatgtacttcctcgcgaacctgcgcccgtgaaccagcgcagttcttcatctactttctaatgtcgttcacggtcatgttcgtcatgagcgcggtcttccgcactatggccgccgttacaaagaacgctgcgcaagcgatgggtctcgctggagtcctcatgctcgcgctcgtcgtgtacacgggctatgttctccctgtcccctcaatgcacccatggttcgagtggatccattaccttaatccaatctactacgcgttcgaggcgatgatcgcgaacgagtttcacggaagggactttgactgtattgcttttgtcccgtcgtatgcagatctggacggggatagcttctcttgctcctcgctcgggtctgttgccggagagaggatggttagtggagatagctatatcaatttcaactatacctacacctacagccatgtctggagaaacttcggcgttcttcttgctttccttattgggttcatggccatctacttcctcgcgtcggagctgaactcgtcaacaacgagcactgccgaagctctggttttcagacggggccatgtaccggagtacatgcgtccaggatacaccagacctactgacgaagagaaagccgtcacacagagcgacatcaaaccgtccagcccatcgccgacgaacaccgatctccctcttcccccacaacgcgacatcttcacctggaaagacatttcctacgacatcgagattaagggtgagccacgccgtctgctggacgacgtctcaggttgggtcaaacccggcacgctgaccgcgctgatgggtgtcagtggcgccggcaagacaaccctgctcgatgttctagcgcaccgaacaacgatgggcgttatcacgggcgacatgtttgtcaacggcaagggccttgatgcaagtttccagcgtaagactggctacgtccagcagcaggatctgcatctggagaccgcgactgtgcgcgagagtctacggtttagtgcattgctacgacaaccagcgtctgtttccatcagggagaaacacgactatgtcgaaagtgtcattgagatgcttgggatgggtgactttgcagaggctgttgtgggcacgcccggggagggactgaatgtcgaacagaggaaactgttgaccattggcgttgagttggccgcaaagccaaagttgttactcttccttgatgaacccacaaggtatgttctttgcgtccaagagatcctacgggagaatgtgaactaacaaaagcagcggcctcgactcccaatcctcctgggcta

SEQ ID NO: 5697 - DNA, 5127 bp, Emericella nidulans
tctgtgttgtcgcgcccagccataacggggccatggttggcagcgactgcaagtgggacggcctggactgagctctctccacgatccagtattttaccgtacgctggctggtttatttcatcttgagcctacgcttggcgggagtacgtgcaagccataacgcatcttcttaaacgacattgacattggtccaggctacatttcacgagactaaaaaagctactaacgtcgtctttcccgtcgctcgactgtcaagtaaatcgatagagcctcgtagcgcaagcaaagccaggtggagtctgcaacgaatgttccaaaaccgccaatcatcactgtcgacgaaacagttctaaagcaaccggagtttccaaccggctgtggggcagtctcgtactagtcggatgattcgcagttcgcgcctcgtatcatgcttgcgaacagattgacgaggcagtcaacgccacggccactactctgctcaagcgcttggagcataaggcgactgggatgtttggagttggggcagccctgctggcggctgacagctgccgaccgaggcgttcttctctcttgagtctccctagtgaattcgcgataatcccgatcttcacctcgaaacaaagtcaagcaagcatagccacacccctctttctacggacgattgttgcttgtcttaatatcattgtgtcgatccctttccactgcttctattctccttctggggttatcccctgtagatacgtacatagtacgtttgcagaataccccgcgctccttatttggagggagaggccacgctcctattgtccggtattatttcgagggaaccagaccgggtgatgtgaagaatcgatgcgtctcctcgccctcgcttccttgggagcattcgcccaatgcctccgcgctcagatttcggttatttgcatcctggtcgtgctgcttagcagaccacaaccggcttctgctgaagtcgatgctgttttcaagtcagtaagtgaggcatcacctgtagcgctcaattgttgctgctaatacatctttgaaagcggcccgatctttattctccgatatttaccctcgaacgtcgtgttccccaaagtttataccccggctacattttcctgggaccatacgaggcagccaactcaggtccttacatttacgataatgatggggtatgattatggaataagcatgcatccacgctaaagctgatgaatgtaggacttagtttggagcggttggggcaattccggccctgggaatgctcatggtatgcatgtatgccagtacaaaggaaaagaccatctatgtttcttccaggggattcagcaaaacggatattgtcgaggccatggtgtcatcatggacaatcattatcacatcgttaagaccgtagtccccggcggtggtatggcagcgagcgacatgcacgagttcaagcttatcaacaatgggaagacggccctgatgacagtttaccagcagcgacaattcgatatgagtatatggaacatcaaaggtggcatgggctggttgatggaaagcgtatttcaggaaattgatgtggaaagcggcagggtgcttttcgaatggagatcgcttgaccatgtcgacccatcagtcagctatacgtaccctggccacacggatacctcgggcaccgggctggaacctcgctccccgtgggattactttcatattaactcagtcgacaagaacgctgatggggactatatcatctcctcgcgccacacgtgcgcgatctacaagatctcgggtcgcgacgggtctataatttggacgttacacggtgcgaacccgacttttgagaacatcaactttagtttctcacagcagcatgatgctcgttggctaagcgagaattcaacccatacgttgttgtcgctgtacaacaacggttacaacggtttcaaccgcacgcacgagtactcttctggcatggttattctaatagatcatgtcaacaagactgccacgcagcttcgggagtatgcgccacaaaaccacgatatgatcagctctagccaaggcaacatgcaggtgctgccgaacgggaacgttttcataggctggggaaacaatgcctatgtctctgagcacgatgaggaaggcaacattctgctttggggttatatcgacaagggcaacatcatgaactacagggcccaaaaattccagtgggatggtaatcccacggacattccagctctatggacatattctaagacgagtgatattactgcctcaaccaccttctacgtcagctggaatggcgccacccgcatcaagcactggcagttttacggcacaaacaactccaccggtaactatacactgcttggaaagacccgaaaggatggattcgaaacaacttatatagttcctggttattaccgctacacatatgccgaagcgcttgacgcgaaaggcaagatcctcggcaagtcacgcgagcagtttaccttcacgccgtcgccagtcctccaggcctactgcgaagagacgaattgcgagaacactgaagcgtatggcgttcccggcgaagaaggcgcacaggctctcatccccgaagctggcctcaataccgttccctgggttgaccctgaccatcccggtgcgcaccatacttggggacttacatggcctcctgttccagaggagaagccggagaatgcgaagactgtttatagtaagtaaaagatctacctctacccccaccttccacaatttgcctcttacacagctgacggctcagattcagtaggctgggtcgcaccgacgttcggtgttcttctagccgtcatcggtatctacgtcgtgctccggatgtatcgcagacaccagctttctcgatggggacgacggagaccaaccgaacatctagacgaggccagcgagtcgaaagcctctgtagtttcgaatttgccctggtggagcttgtggcgatgggcgcctggtactggtgagccagcacgttacctgcctctgagcgaacagaggcaagcacgggatgatgcccgttcgagatagtacagctgagtatcagtaataagttaatgtctatacccctgtatattaccgtaagatttttcgatccaggaaagtatggccgagtacgactcggacattatgaggccaggctggcgcttgtagaaatgcagatcgatctcctgtaagctgctgatgaaggtgaaacgccgtaccccagccgtactccaaacagtattcaaagtaatgtcaagcggaagcgttagccgatcacagcttggacctctgtattgcaaatacgacaatacggatacagtggggagcgtcgcaagctcgggaataatcctcctaaattaatgctctccgcagctacaaagataaaagcgatccaaataatgacgcgcggttaacgggacacttgaaggagcgtccgaggtcaagaatagtagacagaatagagaaccgtaagtttctctttgattaaggagttgggttgtagatagctagtactatcagattgcatagaacgagtaaggaatgttctttggggatacgaactgattcagtaggcgcactgttgatcttactgtatcgcctgccttccatcactaccagacgagcttcttccctcaccctcccacctccaagaccaagcccagcctctcgttaccttttgtgcttcttcgatccgtactactgttattagtactaattctatatttgccggataaactccgtcgtccactcccttttcttttctgacgtcgtccagcccactagcgctctttaaacggcccggtccaacctcactctcacctaagtcgccctgatgactggatccaatcgccaatcgccgggctcttctgtttcacctaatagcaacagcgtgccctctccgtctatccaaaatcctaagactcggaatgctcgtcactcccgcaacgtctcttgggctaccggtctcgatcaaggcggcgaatcctcttccgacggctacactcaacagcagcggcgtcgcgggtctatcttctcttcatcccatgccccagagggcctttcaggctgcaacgacgatagcgacgaagcaatggcattgaggaacacctcgtttgactggaacgacactgccagaggctatgttcggtcacgatctcagagccaacaattgccggcgcctggaacggtggagatgtcacccccgcggccgggccccgtgacctggatgtctctaccgcagaagaagcagctggcattgcttggtctatgccgggtgtttgactttcttcagatcgcttcattgcaagcgtacatgttctaccagctcaaatacttcgacccgaacctttccgattccgatgtctctacgcaggccggtatcctccaaggtgcctttacggccgcccagtttgcaacggctattccctggggacgggttgctgatgcggagtggggtggacgcaggttcgtcctcctcactgggttgattgggactgcggtctcttgcctaggcgttgcgtttgcaacctcgttcgcgcaggccgtcttctggcggtcgttcggtggtgctatcaatggaactgtgggcataatccgaactatgatcgcggagaatgtcaaggagaagaagtaccactctcgagcgttcttgattctccctattgggttcaacatcgcttctctttttgggcctggtaggttttccatattatgctctgcgagaattgttgattaatttgtctagttatgggtggcatgctttccgatccggtcagagcctacccttcgctcttcggtcctgactcctcgtttggtggtaagcatggggtccagtggcttattcgttatccatatgcactgcccatgctggataatgcgttcttcctcactttctgtgccgtctgcgttggccttggtctcgaggaggtaaagtcccttgaatcatgtatatcaggtgcatgctaacagtcgcagtctttggaatcgtgcaaggcagagcctggccttggtacatattccttacgccttgttgcacacggaggcaaagcacgcgtgcgtgagaacaaaccgctcgaaacaagacgaccatttgccgtctatgaagaatgggggtccctg

SEQ ID NO: 5698 - DNA, 5402 bp, Emericella nidulans
atctcgagttctagagacggactggcttttgtgaagcgaaagcagacattcctatcattcttcgtgatcggattctaccagcaggttgtccaactcgatttgctcggacatggcggacccagtattgaccatggtacgaaggtagtatcgcccgtaagagccaatccccggcgtcacagaactaccgaatcgagaacgaaacctgttccctagacaggaagagaaagcaagccatgctttgaagtgttagtcgcgaggatatcatataggggagcgagcggtagcaacctataaatagagtcagaggtgtaaagaacactagaaaaagtagcaagaagaaattcatcctggaatcgacgacagcgctgtggtattccagtctcgcagtcgtttctctcaatgaggaggaaaggctaggtctgtcagacgaccggagcgagctctcccgattggggaaagcgccatccccactggaatttttgtccttaaattgatccccgccagttttttccctcgattttttctactctcttcaacaaaaactcgaggcgcaaatttatcgccaataaacaggatttgctggccaaatccttgagtgacttttattgtcatgttcattcgttcttgatggtaagttcgaatcagcattatttcgcgcacagatcaaatgattatatacctactataatctgtcaatcccctgaagctcgctatataatctcatcaaagagcacaacgtgattgagaaacgtattgaaaatgacttgatctacttactgccgattggtttaccgtacttttctttcctgggcgatggactaacatttgtctattgcagtagtaaatatcctgatcgcccacaatgaaccccagtccagaccttccgatcccgatctcatacatcgcgggtaactactttgtcttttcggtcgacgcagccacgtttttaagacgtgagcaccatatatgcggcgtcctggccgggactctaccacaagtaccacagcagaatatcttcactggcctgccattggagctaatgccagaagaagcaaggctcctggcggagaagggcgtagcttgcattgtagacgaggtaaacttccagaagcaggggatgaattgtctcgtggaggaagaccgcaagaagtatctcgaagaactagaattgcaaggtgtcgagtctatgcagcttcaggtgcgccgaaaagaacggcaacgggaggaagctctgaagaagaagaatgagaaggctgctgcaaaggcgaagaaaacagagcggaaacaagataccgccgagcctgcgtctggagaagattctatcgttcctttctttgacgatgcccagccctctgtctctcctaatcaagtatcctcccggcgtccatcgactctagccactcctgacgctatgggaatcaccccagttgtatcccccccgtccgttcttcagcagctgcgtgcaggtcatgttcggtcgcttcgagcagtcccgttttagtatcagctgctcgcacgttttcgctctaagggctactaaaaaaaaccgggcttcgatttggttgccagtacatggcatatccaggggatccgttgcggttccattctcactttcttgtggtttcagctgaatgggacgagcaattggacttgatgacaatcataacgggaggtcgactcggcacaggcgtcaagaagggttttctcattgggggagctgacaagagccgtggcgatcctgaagaagcaggcgccaatgtgagatcgttcagtattgaatgggcagggatgtgatcattctgtggcaagggccacgccatcgatctacccgtcgtcatcacgcaagccgatatgacggcaactcgtgtcgacagctgccgtaagagacatcagcggcaagatgccgtaaaggtggccgcaacctggcggaatcgcttcaggtcacaccgatctttatgcccagccagtacacgatatgcttccacggcggacttaaagcaggtcacgcgcagcttgtgtcattgaatgtgtcactcattcaagtattagagccgcatctcaagtatctggaggttgagcggagcctctttcacaaattcataaagccctccagccattcagacgatggaaaggctatagaatatcattaacatccttcatccttatcctaaccacccatattggggtcgtcgtggatccttaccgcaaacctgtcattgactcagatcgacccgtcacctgactcgcctgaacgctctaagtccctggtccgtccattgtaaattctgagtaggaacttgggtgtatatagctcagctcctaaagacagcattgcgctaagtgaaaaggcttcttagtggagaacgttgtgaagtagcagtggacaagtccttctgcagtcaaccaagctccaactagcttatgacctaaaatctcgatgcatttcaaagatattccacattgcgccatttgaacttcttgttggctctgtccaccggccgattctgaaactggctgccgtgaagctcgaagacaaggttcttgctattttcgatcccctcggcaccattttcagtactcgcattctcttctgcgcccttgagatcaggcagcggcacacaaaaacgaaaaacagtctgttccttaggtatatctagttgcagcttgttagtttcaaatttagaccacctgtaaatgacggcgaggtactcactcttaacctcatccttctgcgtaacgatcacaaacgtaaattttgtatccctaaccacaatccctttcaacccaaccctccccgaacaccgactcctaaccacctccacttctgcaccgtggaaatccgcgctgaccaatttgctcccgtgcgcaagcgccgacaccagctttcgatttttctgttgattctcctgctgcttttctcccttttcctgcttctgctgctgctgctgctgctgtaccctccacccaccacccccggggcccagatccagtacctccaacatatactgcacccacattcgattcaacccttggaagatctcatacttgcactcctccttcggcagtctgtacaccccgaactcccgtttctcgcgcgcagagagcggtttcggtttctggtgacggaggaagtattccttcttacgaagacggtggaggcgccgtcgcgaacgattatccgcaggtgttgggaatgttggtcggaggtagagaggcttttgcttaatgcgttcgttgaaaagggtttcagttgtgtcgggcgagtgggcgcgcgcaaggagtgtttgcgcaatgtgcgcttttgaagccatgttatacgtcaattatcgtagttaaatttgattccctgagttcggttcgatataatgcattcagatgtatcgcaaggttgtgcttcgtttgggatctttaagttcttagagtaagttgaaatcggaatcggcgcgcaaagggattttgtagcttgcctgataaggtaaagtccgatatctccggccgcaataattatcatgcacgagttatctcaaacttgatttatatttctcatttgggttatattcttttaggtacatactgacggcttcgcagtaatgctgccttacggatagttaggagtattccattaactgacgcaaagcatccctcagcaaccatcggctgtactgcatcatataccaatattggcgttgcttttttctccagaacttcgggtataccatcgacgatcattcgttcttggtcgtaagctttggttggagttgaaacatattccctcggcccagctgctttccccgcattaatgcccagcatcaaatatataagttcagtctgttctcataccacaatgtagacgactttagacgtatactggggagtgcaccagctttaagcaattatggaaaacgaaagggatcaatctcaattctcaggacttccacctttcccagacgatgtgccaaccgctccactgcttcgcctttcgttgaaagatctacttgcagggaacgaaacagagatcgaaaaactaagcaaagcatgcgaggacattggtttcttctaccttgatatgcgagacgcaggcacagtcacgcagattctggaagatgccgataaattgttcgaaataggagccggcctatttgagctcccgctaggagagaagaaaaaatatgacctcagtagccaaaagtcttacttcgggtacaaggcacagggagctgcggttgttgatcggcagggtaacctggacaggaatgagttctacaatgtcagtccgcttcgttgcttgttttcctggtatcgcctacactaaaacatttctaggtttcgaaagacgacatcatgggcatatctggaccactcccagccccagacattataaataaaaatcgccacattctcgaatcattcatcaagtactcgcactctatcgtcacactcatcctcagtatcctcaacacaagcttgggtcttcccgagtcgactttgaccaacatccaccgtcttcacgctgtaagcggcgatcaagtacgcttcgttaaagcacctccacagcctgctgatgaccgccgtactgctctaggcgagcatactgacttcgggagcgtgactattctattcaaccgcttgggagggcttcaagtgcttcctccgggtgcggacgcagagtggcagtacgtaaagcctctcccggggcacgtaattgtcaacctaggagacgccatggtgaagttcacaaacgggctgcttcggtcgaacattcaccgtgttgtctctcccccgggtgatcaagcagacaccactcggtttagcctggtctacttctcccggccggaagacgatgtcccgctgcggcgattggaagggtcctctcgcattccgaatcttgatgaaggtgtggtggaagagaatatcaacagcaaggactggatcattcgtcgagccctaggtaggagagtggatgtgcctgatattgagtatgacaagtcagcagggacggagatgctgagtaggagattaaaggtgtaatttgccgcatatagtcactctataagtacataccttgggaattccatcacttaattgtcagatgctcgctcctgctctaggccgaactacatgggcggtccgtttaacacgtgagttgagaacaccagggttccttcactgctcctatcactatcctcttttcacattttccatcatctacagaacaattcatctttcaataaactcatcaatgcctcattggcttgataagtgttacttcttccttatcttgctctacgctccgttttttacgcatctgtctcctacaatgtttcagcgctatcgttctgggtgtttcttcacctttggccacacttgggcaacacatttagctagaagtgcgactcttgact

SEQ ID NO: 5699 - DNA, 6305 bp, Emericella nidulans
gattaataaaaatgcaatcgactcttcttcttctatcactgtggctctaagcatatactcttcgccatatatttcattgtgaacagttcgtcatcgaaaaattgtacaattgaggggtagatcagagtgggggagctcctgactgtcccgatcttttttgcctttctttttctctcgatcggccctgtctgacttctcttctccctctggggttcagaaaattgccgtcaattttcaggatgtctcaagcaaagtcaggtaagccattgagctttttcgtcacctccatcattctcgggtctttcctaagctgcatttggaacttccccagctctcttccaagtatagacttgggtcttgtttccccacagtctacatttctctggcttcactgctgtgtaaataaagaaatccttgactgattcgaatcattttctctagctattctctctgtctacgacaagaccggtcttctggacctggcaaaaggccttgccaagcacaatgtccgcctgctcgcctccggtggtaccgcgaggatgattcgggaggcaggattcccagttgagtgcgttctcattcaccggcatccgtgtattcgtataagtgatttgggttgtcgattcgattaaggatttactagcagctatatgattattccagagactgacggacatcagagatgtttcagctatcactcacgcacctgagatgctgggtggtcgtgtaaagaccctccaccctgccgtccacggcggtattcttgcccgtgatattgagtccgacgagaaggatctggccgatcagaacatcgccaaggtcgatttcgttgtctgcaacctgtacccgttcaaagaaaccgtcaacaaggttaacgtcaccatcgaagaggctgttgaggagattgatattggcggtgtgactttgctccgtgctgcggctaagaaccactcccgcgttaccattctctcggatccccaggattaccccgaattcctcaaggaactcgaggcaggtgagatcaccgagaccagccgccgatcctacgccctcaaggccttcgaacacactgcggactacgatactgccatctctggcttcttccgcaagcaatatgctgggaacggcgagaagcacctctctcttcgctacggaaccaatccccatcagaagcctgcgtcggcttgcatgcctcagggcaaacttcctttcaaggcactcaacggctcccccggctatgtcaatcttctagatgctctcaacgcgtgggccctcgtcaaggagctcaagcaggctctcggatacccggctgccgcgagtttcaagcatgtgtcgccggctggtgccgctgtaggtgtccctcttagcgataaggagcgcaaggtctacatggtcgacgatattgccggcattgagtcctctggattggctcaggcatatgctcgtgctcggggtgcagaccgcatgtccagctttggtgatgtcctggctctcagcgatgttgtggacgtcaccaccgccaagatcatctcccgcgaggtttcggacggtgtcatcgctcctggatacgaaaaggaggcgctcgagatcctgtctaagaagaaaggtggcaagtaccttgtccttcaaatggacgactcttacgtgcctgccggtgaggaaacccgtactgtttatggtgttcagcttaaccagcaccgcaacgacgttgttatttctccctccaagaccttcaacaccatcattactcctaaggatctcaagaccctccccgatgccgctctgagggatctcaccgtggctaccattgctctcaaatacacccagtcaaattcggtctgctacgcccttaatggtcaggttgttggtctgggcgctggccagcagagccgtatccactgcactcgtcttgcaggtgacaagaccgacaactggtggatgcgtttccacgaacgtgtcttgaatatcaaatggaaggcaggcaccaaacgtgctgacaagagcaacgccattgacctgctgtgctcaggtcagactcctcgtaacgagattgagcaggccgagtacgagcgcgtcttcgaggaggtgcctgcgccattcacacaggaggagcgcgaatcctggctcaagcagctgagcgaggttgcagtctcctcggacgctttcgtaagtccaccaacaatgtcttcatggtctcttactcactttccatcccccagttccccttcatcgacaacgttttccgcgccgcccgctctggtgtcaagtacattgctgctcccagcggtagccaaaatgacggtcctgtcttcgagaccgcggagaagcttggcattaccttcgtcgagcaaggaacccgtctcttccaccactaaactctgtgtccggtcaggtcacatttctagactgtagtagcaaggtagttcacgtacagaaaaggaatacccacggctttaaataccttgccttacctttataggacatgtttgtaacgattttattgtttcgaccacctcgaggatcacaaaatggatatttattgattgaggtcttctgattcgctattaagatgtggtagaccatggtgagatgggaatttcccttcataaaactgtaatatgaaactggtcagccaggtgagctactagcagtatattctaatcaatgccgagttactagcttctaccaggaagcttgagcgaggttcattgcacagcgcaggtagatcttgaactagggaggtcgcttcattagagctgtctttggtatcgtgggttggagagctggatgtggagtgctccttgcttaagcgacagacatcacttcttctaaggtagcggagattttagtgaaaatatccactagactaagtctacatgatagaaccaaggaactttagtaggtaagaaagtgaagttccctctaagctttgcatattctagcgtctgcgctgttcgctagtaaccgaattcacgtcgtaaaccgcaagtatatatctgaatttcagccttgatttcgcattcaacatctcagcagagcggcccttcgaagtcaatgtatacttaatctcatcccccgcaagaggtcaacgaattgatacataatcttttcctggactacctcgtaccagcaccgtcgtttgattgcattcaattagagtcgggtatagttcttggctcgtggactcagctccatcgtttcaacttcacagctgcaacactagtcatctcgagaagctcagatatcctgcacttcctcctatcgtctagttccagtgaaacgaaaattccgattcagtcaacctctcgagtcaccgttcgcttaactggcatcactagctcaggtaccggacaggtgcacgtgacagcgggtaagcgacacctcagcaacctcctgaggtcaccttcccgcttccccagtgtttccctgctaatcaacacctcttgtctccattcctcagtacacttccttttctcctctttcttcttaccctcccttcgccgaccttcaactcgtccccttttaccatacaccttccttgtatttgagtcgattgatttgcgtggcgttttgggtggttaggtcgtactgcggcccttgtaaatatggctcctcttcccatcaaattcacggagctcattaatgtgagccccttttcccctgacagcttctatagaggtaaatagagatgctaacgcgtgctgtctgttttacagttgacgaatgctgaaatcgcggtatgtgtttctgcgctttagttccatggcctccgctccggaccgtcgacgctaccgtctcagctctaattcagctgcgccccttgcttgtctactttactaatgcaacgtccatccatagccggcgtcgattggtttcaatacgtgtgtaagtttagagtcgcgtctgctacagcttattagcggctttggatagacactgacattagtacatcatacagactctagaatcggatcacttcgtctgcgtccgccaaaaactcgatgacgaggataagccccaggttatcatccttaatctaaagaacaacaatgagattatcaagcgacctatcaacgcggacagtgcgattatgcactggtccaagaacatcattgctctcagggcgcagggccggacaatccaaatcttcgacctctcagctaagcagaagctgaaatccgcggtcatgaatgatgacgttgtctactggaagtggttcagtgaaaggagtctgggattggtgacggaatcctcagtctaccactgggatgttttcgatcccacccaggctcagccattgaaggtctttgatagacttccgaaccttagcgtacgtactgccactgaagcaaaagcggaaacctggttaccgggactgatgatatcttattctagaactgccaaatcatcaactatcgagtaaacgacgaggaaaagtggatggttgttgtcggaatcagcagtcagcagggtcgtgtcgttggttcaatgcagctatactccaaggagcgtgggatctcgcagttcatcgaaggacatgcagcctctttcgcttctattcgagttgagggctcgcccctggaacataagctcttcactttcgcggtgcggactcagaccggtgccaagctgcagatcgccgaatcgacctcaggagccttaccccaggtttcaaaagaaagcagtggaggtgtatttcccccagagaggcagtcaacgacttcccagttgcgatgcaggtgtctcgaaagtacgacattgtttacctggtcaccaagtacggtttcattcacctctacgatctagagacgggaacctgcattttcatgaaccggatatctagtgagacaatattcacgaccgctcccgactccgaatctgccggtctcgttggcgtcaaccgcaagggtcaagtattgtctgttagtgtcgacgaaaacaacattattcaatacttgatggaaaatccagccatgtccggtctcgctgtcaagctggcttctaaggcaggccttccgggtgccgatcacctctaccaacagcagttcgacaacctgcttgctcaaggtaactactctgaagcagccaagattgctgcaaattcccctaggggattcctgaggacgccagagacaatcaacaagttcaaaaatgccccacaaactgggcaaatgtctgttatcctccaatacttcggtatgctactggataaggggacacttaacaagtatgagagtctcgagcttgttcgccctgtcctccagcagaaccgaaagcacttgctggagaagtggatgcgtgaaaacaagttggagagctcagaggaactgggtgatattgtccgaccttatgacatgaacctagccttgagcatttacctccaagcgaatgtccctaacaaggtcattgcgggttttgctgaaactggtcaattcgacaagatccttgcatattccaagcaagtcggatatcaaccagattacacacagctcctccaacacatcgttcgtgtgaatccggaaaagggtgctgagtttgcgactcagcttgccaacgaagagtctggcgcactcatcgaccttgaccgcgttgtggatgttttcctttcccagaacatggttcagcaggccacttctttcctcttggatgctcttaaggataacaaacctgaacatggccaccttcagacacgcctcctcgagatgaatcttgtcaacgctccgcaggtcgctgacgccatcctcgggaatgagatttttacacattacgaccgtccccgtgtttcccaactctgcgagaatgctggtcttatccaaagagccttggaaaatactgacgaccctgccgtcatcaagcgcaacattgttcgcacggatcaactcagcaccgagtggctgatgaacttcattggccgtctttctgttgagcagaccctcgactgcatggacacaatgttggaagtcaacatccgcaataacctgcaagctgtcgttcagatctgcacaaagttctccgaccttcttggacctagtcgtttaatcagtcttctagagaaatatcgcaccgtcgaaggtctgtactattaccttggaagtattgtgaatctttctgaggatcccggggtacattttagggtcattgaagctgccactgcgatgaaccagatctcttaggttgaaagaatttgccgtgaaagccacttctacaccctgaaaaggttagaaattcctcagggaaactgtttgaccgaacattgccgttatacttttttgaccattaactttggcccaactggcttggacctt

SEQ ID NO: 5700 - DNA, 5008 bp, Emericella nidulans
gattttgcgccagtcaccatctactggagcgttatttgaaccagtttgatattcaccaagtttttacccgcgaggaaattgaccattggcttgtctacaaagaatcccctcaaaaggaacaggttatctggtcgtacgtggtggaggaccccgaaactcacaagattacggatttcttctcattctataatctcgagtctacggtgatccaacatcctaagcacgactgtgttcgcgcggcatatctctactattacgccaccgagacagccttcttggacgaccagaaagctctcaagaacagacttcagatgttgatgaacgacgctttaatcttagctaagaaggtacgtgttcttttgccctgatagcgaattacgcctaacttcggcaaaggcccaattcgacgtattcaacgcactcacttcgcaccacaacccgctcttcctggaacaactcaagttcggtgccggtgacggccagctccacttctacctttacaactaccgaaccgcccccatcgccggaggggtcaatgagaaaaacttgcccgacgaaaatcggatgggtggtgtgggcgttgttatgctctaggctcttcttctcctggatcgcttcttgtattcatttgtcgaaatttttgtggcttcacggggctcacctgtaattagctaaatcaaagcgtctttgaagggattacagatgttcgagcgtagacagacgatcgtttaccttcgcaacatctagaggccagggcagccacttaggtaaacatcattaataatgccaattctgccggaatacctaagcaacgaaccgtattttatctaaatactctagcttctaaatactgtgaatgtaaaagtgatctaagactagcgcctccttcatgataggtgttgagaaaattgaacgtttgtctgcaagcaactcgatgcttacttagcgtgcttctataaatctggcatttccggttgcggtgacgtttgtccccggtccagactctcattcccctcactagcaaggctgcacatcatacaactctcgtcggaaatccatcaactttagaacatcttagacgctctatcccctacttgacgtcggacttactttagtcagaccatgggtgatcgaggttgaatttctcaatagtcggcttacgatctatttaccgagatacctagacatcacaccttccgtaacgtcctcgatatatcacaggattagcctggagaaaccaggcagattgattgattttataattgctcttgctggaagtactgatgcaaaaatgggagtgggacaatcgcatgaagatgctggctatacttctccaggttggtggctattcccactcttatagcagacctgacgccgaatttgttcccatcatcgaagaataagtctgatgcagacgcagagcaattgagcctgaaactagcggagcgctttgcaacaaaatgctttaccccactagagctcacccacttcaaggacaacttctatcagcgggcgacagagcagggagggctcaagtactggaatgagaagacgctctcagacttcctgagtatcccggatcacagtgattctcattgccctctggatgctgggccagttatcttccgcatggcgtcgtatcttggggctttccctttccagaattcgctagcacctagcgttctcacgttagaggctttgataaaggtggtcgtgctactaacggagcgatatggcaaagtcctccggcgaggccaaaaaaatagaatcaggttacttttcggaagtctagctgatgtcgcccggaaggagattgagaagcctgctgagaatgaagggaaggaagaagatataccggcccctttacaaacccgtggctttgatatcgatgcgccggccaacgataactatgatgaagatgatgaggatgatcttgcactcgctgctttggaatcacttgatgctatcgaggtcttcaagcacgactcgcgcatagacaagagggtctatgaggcgcgcatctctttgagcacgttccgtcgtctcctgatgctcttgcttgtgatcgcgccattgaagcctttagaggatatttcaaactatacggttgatctgaatgagacacgaatgctctctgttcgagaagaagctgacagtatcctggccgcttttgagcaagaggcctctggaggaatcagctataaaacattcgcagatacaatcactagctcttttccatatctattcgaccctttgacgccattatttgagcaccttctcttcagcaagaatctagacttttcccagcatcgtggaagcgatactaccgaagcggaacaaatgtcgcaaccggtaaaaagctcactcgcgtcaatcacacttccaggaagcttcgaatcaactattctgagcccaagtatcatatctcacctttccttcttcctcccttcaacttcagacaaccagaacctcctacacggcaacgtccgccttcaccctgtcttctcaatcgcagcgcatggttcctctctaacctcattctcccacaacgttctcacctggcaatcaggcaccctcttccttctctatggacaagacactgatacaggagacatgctcacactgggtgcatatctccctcaaccttggaaatcgccaaccacaagccaaagcacctccgacttctcatcatccgtcctcccctgcctcttccttctatcaccatatcacatccttctacggggtaacccctcaccttccgtcgttgacaaaccaaacacacccaccgcatacttctcaactcatcacggcattgccattggctgccgaataccaccgtcctcgcgcacccaaaagctgccgcccacgcccctcggcgccgggagtctcgtgattgggacgagccttgagtccgctgaactccacatctcccctttcggccatgacggcgtcttcctgcccccaggcgcgcagccaactaaatccaaatcagagacaaatatcgacatctacaacctcgaagtatggggtctagtgccgggttccaatcccaatggatcatcatcattgcaaaaaagcgccgtggagctccagcaagcaagctgggacttcgaagctagagaggcagaacgcagacgccatgtcaatctgagtgctggggcaggggactcggctctcgagcaggcgaggtggttgttggagactgcgggggtaattggggatagtagcggtacgggaaggtatggggggagtacttgattcatttctttggtttgcttgatagtcctgtaggagctttccggagttgggttctggctgccatgtttcattcattgcaggtgtagtaggcagtacggcgttgtcacaatgtgttatcaatagatttacgcgaatagtcgaagcaaaagttagattcagtctctttttctcccgatactcttacaaaacacctgcgcctttgtaataaggtctctcgtagcaaggcgccgtggtagagttgtctagtgaaataggtaggaatgtgattcgctttgggtgcgaaaatagctagtctgatgccctggcttgccacaaatagcccaccattatcttacgcgttaatgtctataattactggttgtcatctcactgacaaaacattgttaggaccttctacgccataagcatatctatttctattcaattctataaacaagccaaactatcccaaattgtagcatggatgagtctcgctggcgcctctttacctccagctccacccccactatgagcatgagcatcagcatcacagcctgcattctcagcatctgcgaaaaattgaaccccaacacatttgggaccatcagtttttgttcggcccccggaatgataaatccgagtggttatcgctgtgcggccgttaacgaagacctcaagcacactactgtcgaagagagcatggatgcgcaggggttcttctgtttctatttctgacgcggtgttgtcgttggtggtcgtggctgggttagtgtatgtgaatagtgtatgcggggtgacttctggggcgtggttgatgtcggggttgatattagatggacgtggacgttcaacctggaatgtctcatgcacagggtcccagaaaagagtcgttttggcagtgtaatctgggccgtcgatgtcagtcagtcaggtcctagttttgaggctcaaacgaacaagtatctagaatgaattgacgttttacagggaacacaaagtgcaactgaccttcgtcgtggaaaataaccattccaacccggctacatttccttccaaccgcaatctccgcatcaacctcccacctcgtcgtgtccaaggggacaaagcagccgctgctctgtgtacttgtggtcgctgccataaccgtacccgcctcgtcgacattaaaggacaaatccaaggcctcacgcgtaagtaccctcgcacctttccgcaactcctcaacacgtggatcaagctccacgcccagcgtatgaacggtgtacgtcccctgctcatccggtacggcttcgacggaggtaatgtcgcctaatgaagtcgttgagcgcgcgcgctttacgcagtgaatcgtctgaagtgtaagcgtgcgcggcaacgagaccagcccgctccatccttgctctttccgcgtcgtgtcgggcagatcttcctctgtgatccaaccgaacacgacctgtcgctgggtgacggggtcgaagaaggaattagccgcatagaaaagtccactatcgaaaatgccaccgaagagagtttgcatcaaagcagtctgtgtttggccccgggtttcgttttgcttgatgcaagtccagagctgggagcgttggatgcggcgatctcgggcggctgggcgatttgggtctgggctcggaatgcatccctccacgcccatgattagaaaatcgcgtgaagtgccttccttgtttgtcaacgtgacgagatttgagacttcccagttcacaccgagatcgccggaccagcgggacagggtata

SEQ ID NO: 5701 - DNA, 10970 bp, Emericella nidulans
gttgtcgaatcaatcggccagttgactcgtattttgcgacacgagcaattggtacagcaagtctccagaccttcgaacggcatttcaccacctgtttatccatcttcccggagcaatatcagcctaactctgatcaatacatcgagccacgaaccctagccccaatcatctacctccaaaacgcgcgcctcatgcttcatcgccacaatatttcaccattctgtcctcctgatgtgcgttcatcggcgttggattattgtgcctccgtttgccaagataccgcacggctcctgtcgcgatgtatgcgaccgtcccctatcacgggcaacagggattggcgtgcgctgctggcggtgtcggggtccgcgatgctgtgcgcccatctgtggcgctgcatactcttattactctttcgccaggagtacgaagctgcattgatatgtgttcaagctagctctgctatgagggattcgcgtgccatcaatgctgcatgcgggcggaacattgtgtttttcctgaaatgccttcttggccgattgcaccgttctggccccgtggaactggatggggacgaggaaatgatggcgtatgtgtccggtgatatgcagggtaccagcaatggaagctgggtttgggaaagcagtgagactgggtctcaattagagatggcttctccacaaaacagcgcagcgcaacccagtcttgaggatagcaagctatcgcaagagccgaatgggtgggaaggctgggattggattgaacagacggtacaatatcttctcgccgaaaaggagcagcgacagcaaaaagaagcacagagcctaagactgccgacagagccgtcgtatcgcggcagcgaatctgcgactggaagtcctgactctgcgccaaaccaatcgacttcatcacattcgcgcatgacgatagcgagtattatataatcttgttcaaacctccaactcaggttctgctacaggatagtggaaaccagaagctagagcgtctttactttttttgcattcagcctgtatagcctgcaatgtagcggtcattgcgtctgatatgaatttacgtgtgacctggtcagcattcttgtacattgtgctgtcattagactttgtacatatcttgagcatctagcgaaaaagactaaaagaccaaattcttcaagcgtttgcattgcataaacgtatccatgtataatcctaacaaggcgagaaatgggctgtacaatcaggtctccaagttgatactccgtccaaaccgggcatacagagcaaccttcaactgctgcatctcgtcgcggagatcactcagcgtttcctccagcttggcgacttcagaatcaatctgctctgttgaagaagcaagaagcgtctgcgcttcttctagtggaagatggacgaatgagtctccgattctgtatctaaaggccttcgttagcaccattgtgagcattattggagaaatagggaaactacggaatcaattcatcctcatcggcaagctctagctctgttgagatctcttctaagtcttctttgtctttctgcaaacagttactattagctgagcccctggtatcaaacgggcttgaagattttaaataacgaaaagcagctatatcagaatacgaagaacagagatagacgtacctgcttccccttcagcttctcttcgagaacagtctcacgctggtgaagacgactgaagcggttgattttctcttggtcctcacggcgcacttcggtgtcctctgagttgccgatagcggcctcgtcttcttttgagagcttggaggacatattagctcagtgattatattcgacgcggcgaacttaccatgcgatggttcatcattttgaatgtttcggttattgactacgatggtgggttaaggatgaggatattttggtatttgagtggaggtggtctgtgcggggcttctttgatgtactgatggactcgattacgaagtcctgcaaactgatctatcataatgtacttaatgtagttagcagttatatttctatgtatatctgatcatatcttctgagagataaataaaatcgaagacctgtttgactgtctctttcaacatcggcttgtaggatgcttatactaggcgattgaccggataaacagaagaccgacgtcaagcaaggcagcacgagacaaaagcactcaccagctcccacctagctagatatcaacttattttttggccgctttcctttctcttcagcgtttggtttaaataacatctcttttgatcacacgcgctgcctcgtcagctgcctgccctgcccgtctgctccgtctgagctccgtttaatcaccgcctagcagcaacacaccgtcatcgtcaccagcctcacttccaatccaccccgaagttcacgacatatccccgattcgaatccttccattttctccataccaatctcgtaacattcgacgcaccttcgggagtcttccgccatgcggatattctcctcacctctcatctctgccgtctctttgctaccctgtctctctttcgccgtcagcttcgactgctccagcatccatgtagacaactacaattataacctcaaggctctaggcggagtccacgaaatctaccatgccgagcaagtcggcgaccttatcgttaacacgacatatgtactgaatctgtgcaacactcttaagggcgcgtcaataagggggaatttgaaatgcggcacgtcaaagaatagtatggatacaaatgcgcttagcaactgaagcgtagtttatctaccggtaatgaaagaaactaaccatttgcctagtttgtgggttcaactacacatacggagcagacggcgccaccgaaaatgattttgcgttcccgatcgtcgggctggagcctatgggccagggggcgaaagatgcggagataacacgattaaagaaggaggatactgagaaagagggtctgagggtaaaactgtctggagggggtgagtacccggagcctggctcgaaaaagaagaaaaaggcgggtgcggtcatcgagtttgaatgtgaccctggtcggtcgggtctggagggtcttgtcaaggaggacacaaagcggcttctccgcgcccgggaagaaggtctggatgagggcgagggggatggtgaaggcgacggcaacggggaggataaagagccattctacgatggatcagacccggataaaagcctgcaatacaagagcttcgggaaggcggatgacgaaacgtatatacttagtttgagctggaagacacgctatgcctgtggccattacacagaagatcgtggttcgtcttctggccacggggggttctttacttggttgattgtgatgtataatcaaccccggccaaacatgcttgacttcgctaacatggttcagtttcttcctctgcgccgcagcatatcttatcttcggctcgtggctcaattataatcgctatggtgcccgtgggtgggacctgcttccgcacggcgatacgcttcgagacattccttatctcttccaagactggctgcgccgggtagtcaacacatttcaaggggcgggttcgagaggaggatacagcgctgtataaatataacgctttatttctctgtgatgtttcgaggaattgcatacgaacgggaacaggtttcttgaccggcagattccttcaggtaatgctttttctctctgtacgatggaatgaatgattggccagtttcgcatttgctcgttcgatttgcttgtctgttttctcatttattactgttgttggacgagctgatatatacctcagctagattttatcagtaaatgtattcatacggagtaaacgcatcctttatccatcgctttccgcgaatctataacctgctacagaagcttatgagcaaaagtacttggaccaatttccagtcttcggcttcggccgttgaccctcataggttctgtatcctgaaatggttgaacgagcaattacttccttcgaactaggtactgggacgtgctagctagctagactttagctcacaacagttccagtcaagatggatacattctcccttcattcagaaacacacaatttgcaaacagaacaagaaaaacaaacctaggaaaaaagcaaaactgaagtcaaagcgtttcgagtatcgtgcataacaggcaaattcatccaatatagatttccatagtgcagattgcgtgatcaaaggctctcatcgcgacatatatcctaatcccattccatcgcctaggataatcctctcaactttcaagtcgatctgattcaatttctttcttgtcatcgtcttcaacccccacggctggttgctggccatgccttccttttctcatctcgaatcaacttgttatggagtgtacgtactcatttgctcggtcggtacctgcataggtatgacctgcacggcttgaccacggcacctagactttcatcgcgaactgcttgaggaagaggtagtcggccatgttggcgttgaccgtcttgcggatcagggcggcgccctcctcgccgtatttctcgcgccactcggcgtcgaactgttcttcggatctgggggcacggggctggtcaaattggtcagctggactattctctcgtctatcacgagctgatcctgcgtggtgtgctggtgcaatatgcatgcaggctaaggctcacggatttctccacctactaagtccgcaccctacctagccgagacgagaagagcaaggacaagtaaaaggaaaacttacatgcttcctagcagtcaaccctcttgaatcgattgcatcgttgtgaaatccattccacttctcaaacgcctcccgcgcgtactcatgatcctcctcgttatcccagtttagcatggcgtccgtatacgtgatcccgacgctacggcaaaacgcctccatcatcgccgctggactatcgagcatatcatccgcgtcgacgacacagatctccgcgccgatgccagcatccgggctggagacaggtttatgcgtaggcttctgctgaccatcctgggcactggcaaggatctcgtcggcgtctgcctcgtgagttgcaacatgaggtcccactaggccctcagcccgcaggtactcgaagaaccggcgcatctcgtcatacccagcttcagcggggtcgtagtaggtgaagcccgtggtggcgtcgagaggaggaattgtacagcggtagtaggaggggacgctgtaatgcggatcgcggataaggaaggcaaagtggaatgtttccaaaatctccttggggatgacggtcgggtttcctggttcagagggagtgtcgtatgggtagggcgctgtgctgttgcccttttttatctcgctgccattcgcgctgccattggtagcccgttggcagccgggtggtgccgttggcgttggaatctccgtcactgccaacggccgtcgggtgttcagcagtagctgtctctgtgcctacgccgcgcttgattctgttgagggaaggcgcaatactggcgggtttgccgtgcggaggtaagagataatgcaggatgtctttaatgaatattctcttgccctatcgtcgaacgttagtactggctcatttctagatcaatgtggagggatgtaatacctcattttcccttccttcgcgctcaatcctctcgaggatagttttgtacgtagactcgctgaatccgctctcaatccgccccttctcgtcagcctcgtaccgatctgagagcctctcagggccgtagtagaatgcatcgccgaagggctcatggatacacttgattgtatctctctgagtcataaagacctagcagaagatcagtatttcgcctggctaatctaaaaaaaaaaagaaaagaaaaaaatcctcaaaattggacaggagaaatacccgctcaaaagccgtcgagcaagcccggggatgggttgcaacgaagataggtttctgctgagccatggtgcaagtctctttcttctcgtttgatcgagacgtatgtcaggattatcggttcactatctaccagggaatttcaccgccggcgaagctactgatagagtggtctgctcttgtgaacttgaggcttatcgcggggatttatctgcactgcaggtgtggtgttgtacggatggttgtccaccgatgacacggtgggagatgagagtacttggaaacagaactgaaagtcctttcaagtctgaaagagcaggataaaatggttggattgaatattcaggaacagatggggtggccccaggaactggcttggttttatacttgggagtctgccggaagtactggaaggaggataccgtcaggtctggacgaggatgcgctttttctcatttgagttcaaccgtcagagccaaatactgcgtatggaaaataataatattattattctcactgagatggagtcggaccagaattactgtgctaacgactccgtcggtttcactcccagcttccagccctgcagtggaaggcacgtcaatgcaggcgttgtaagtggctactagtcaaacccactctcctgctgctcagcgaactggccctgggtagggcgatggcgccagctgtcacctatattcgccatagataatgatcttctatcttattgtcagggtgttgatattgatctatataaatcccggcttttcagagcttcccgtcaaaatttcaaccactaacttctggcttcccaaggtcaaaatcaaggtcaacatgggcgactgccgcaacacgacaaggcaccgagtcattacggccaagatcgtgatctacagttgctactccgctttcattctttcgtcattggaagcagtcggccgcggatggggggcaagacttcaaactgttcctggaaatgccggtctcaaaccaagcgaggggattgtgcgcgcggtgcaggcacgaagtcgagaccggtagtttagaggggcaacggcggtacagtcgaaaatctagtcagctagtctccatgggagtggacattgaggatacagatcaggaaggattggaatatggtcgtgaagcggagtggttaaactcttcaatatccctgtcgccacattcggtcgagacaaactggtgtttccaccttgacgtcatgagacggacacagcaggatgcgctaccgaggagtaaggggaggagtaagagaagaggggagaaggtatagcccattttcgcattgaacaagaataactcgcgctgtgatagcaagtatgcatgcgtcggttgtgaacaatacatggtcatctggccgcgatatctgatatgcccgttaagccactcagctttttctcagcttcgggatgggcctgggactggaggctgcgaccggggaccacttgggacttggccggccaatctcgtcctgattttgcatgacatgcgtcgtggggtgcaatgctacccaatgatgcgtccctgttgctaacgtggggttgcgacgggctataattatgggtgctaatgactgccatggctggcccgtggatagcgccctggcactggcggatcagatctgaccaggctttcctcgatctgtactcctgccgctgaagaggggccactttccttcggatatattgagttcaggcaaccagagtgcaaaagttctggaggaatcgcatttaaggaaccatatgaagaaacttcaaggacgtgggacccatgtagtggtgagctctggagccgttgaacttgaacagctctaggacttactccattgacgctatttgttttgcgggtacaccgcctccgccgcctgcagtagtgccggcagaatcaggccttcgtacttggcattttcttcgaagctttcccatcttctatccatacagtaatggaacctcttgatgggctgtcaggtacaagcccgatgaaaatttgctgcgattagtttctttctcaatgtcttcactatattgagcacattttttcataaagtttctccatggagcaggctcagcagttccagatccagcaaccgccgcattcgcagtcccgcagcctcagccgcctcaacagccacagcaaccccagagccaccagctatcccaacaatcccagcaacctacagagatccagccaaacccacaaactcagcaatctcagcaatcccagcagcttcagcagatcccaccatccccgcaagcccaaccaccacagcaaccacaacaaccgtcgcagccgcagcctccgggacagtcaatcatagaaattccgccagcataccccccgttacccgcgcccccagatgccacatatcgcaccgagactgaagcagtacaagcgatcaagacattcgcgcaggatcatgggtatgccgcgatcaccaagcgaaccaacaaaggtcgtgaggggaaaatcgaagccatctacctaacctgcgaccaaggccaggtgtatcagtcaactgcaaaagagcgtcaacgagagccgtcacgacgaactgggtgtccgtttaggatacgcattagccatcttaagaccgacattctgggcatgtcaaagttcgtgacccgtcccacaatcatgggccctcgcggccgggctcacatccgtcaatccgccgcgaggagattagccagaagacgcagtatataaaggctcttcttgacatcaatatgccacccagtcagattctcaaacaactccgtcatgtggatcccaccactgtcatccagattcgcgatatctacaacctccgccatcgcatatatcaagggaaacccccagtcccagctgttgttatatccgacttcaagcagtctccattaaaaaagcgccgtggtcaggcaaactccgataatctgtcttctggggaggcttcgacgtctggagctgtggagagtggtctgggggatgatcagggcgtcgctactcctgtcagtggagtgcgagtaacccaggatatgcataccccggaacaactgctgtacgacacgctgttctgagattctagtataggcgtttttgatcgattagcgctagggagataccaatttgataagcctccatttgataagctaggcctgctgaccgctgcgctgaccgctatattttgcctgacataagcatcgtctgatacattgcctgatgttctggatccttctggaaggcggtagaagctctgagtgtcgtcatgcatttgcatgatgctttgggcaccgtcatgaaatctcgagttgttactcttttggaggagtctcgtttgtccactactatatattctgccgcttatgctcagcttgtccaagcttctttcctccaaatcatactttcttcatagcctaatttgataccctacccttcctctatacctcttcggagatttcatctcccccacctaacatcatgaacaccgacaagtacacagacaaggccaacaaggccttacaagatgcgctagaactcaccatcgaacactcgaacgccgaactataccctgttcacctcgcagttgctctccttgacccctcacaaaacgaagatgacgggccatcgctccacccctctcacggagattccacctctctcttccgccaagtcgttgaacgcgcgcatggtgacgttcagctcctccaccgtggtcttatgaaacggctcgtcaagcttccgagccaagaccctccgccagagactcgtagcatctctgcgcccttccgaaaagttctcacagctgcggccgatttgtccaaaacgcagaaggacagctacatcgccgtggatcatctgatccaagctgtatgccaggattcaaccgttcaagctgctctcaaagacgccaatgttccgaacgtcaagttgattgataatgctatccagcaaattcgaggtacaaggcgggtagattcgaagacggcagatgctgagagcgaaaatgaaaacctcaagaaattcacaatcgacatgacggcgctggcccgagagggtaaaattgatcctgttattggccgagaagaggagattcgtcgtgtgatccgtattctcagtcggcgaaccaagaacaacccggtactgatcggcgagcctggtgttggtaaaacaacaattgttgaaggactcgctcgtcggattgtcaatgcagacattccagctagtttgtctcagtgcaaacttctttctctcgatgtcggctcactggttgctggaagcaagtaccgcggcgaattcgaagagagattgaagggtgtcctcaaagagatcgaggagtccaaagaaacgatcgttctttttgtcgacgaaatccatcttctcatgggtgcaggcgctagcggcgagggtggaatggatgctgccaatttgttgaaacctatgcttgctcgcggacagctgcactgtattggagcaacgacgcttggtgaataccgaaagtacatcgagaaggatgccgcattcgaacgacgattccagcaagtgctcgttaaggagcccactgtctctgagaccatctcgattcttcgtggtttaaaggagaaatacgagggccaccacggaagcgtgcgaattctcgatgccgttatcgtcaccgcagctacccttgctgcacggtatctcacggcccgtcgactgcctgattcggcggtcgatctcattgatgaggctgctgctgccgtcagggtagcccgcgaatccgaaccggaggctcttgataaccttgagcgtaagcatcgacagctccagatcgagattcatgctctcaagcgtgaaaaagatgaggcttccaaagcccgtcttcaggctgccgagcaggaagcggccaatgttattgaagagctgcggcctatgcgtcagaagtacgaaagtgaaaagcaacgtaacaaggccatccaggatgccaagactaaattggacaacctgaagaacaagcaagaggaagccgagcgatccggtgacaccgaaaccgcagcagatctgaaatattacgctattcctgagacccag

SEQ ID NO: 5702 - DNA, 8189 bp, Emericella nidulans
ccatcccgaccatcgccaccgccgcgttttggaggacatccttcaacagtcgattcgacccagcaatatcgacgacactgtacatgagcgtgaggtctgtctcgccgacaatagggcccgtgtttcctgaggccacggtggagacgataagtttgggcagaccaatctttgcggcgcttctcatgacagccgagatgagactcgtgccgccgctgccgcctacgccaataattccatggacgtcctgtgtctgtaggagttcggacacacatttcgtggcacaggccgtgatgatagagattgcctcgccgcgggggaggacaaagaggtctttggttgggcttggagagtcgagatcggaggcgtacgggtattttgttatcaggtctgtatgcgagactgtgatggctgggtcagagtcaatctcgctgcggacgccgcagtcgatgagagtgatcgagagaggcgtgttgaggcggcctgctgtttggtggagctgggagtggaggtagagcacttcggagcgttttgtgtcgagcgttcccaggaggatgaggtgcatcttggtctcggctgggcgtgtttactcttgagcgactctatatgaattcacaatttaggtccagatttagattgtctggatggagcctgctttgctcaatttgatccattcgaggaggctgtaagctgccggtcatgtgaagcggggaagctccagcacgatgacttcagtttttgtgtgttcgtttagggacaacattcctgtctcagcatctcaccaacttttcacttttccattctctcctagttcacagagagcaataagatggcaccaccaacctcccgccccgagattctgtcgcgcctccgtgcccagatccaagcgggcaagcctatcgtcggcgctggagccggtttggaaccccgcaatcccgctcatggtatcgcacacagagctgaccagcacaggaattggcctctccgctaaatctgtcgaggcgggcggcggcgatctgatcatcatctacaacagcgggcggttccggatggctggtcacgggagtctcgcggggctaatgccatacagcaacgctcacgaagtggtggtcgaaatggcgtccgaagtgctgcccgttgtgaaacacacgcccgtcatcgcgggcgtgtgcgggacagacccacttagggacatccctcgttttctctcccagctgaaggggatggggtttgccggggtgcagaatttcccaacagtaggcctgatcgatgggcagtttcgggccaacctggaggagacggggatggggtatgacaaggaggtgaagatggtgagggccgcaagcgaactgggcctcttgacgaccccgtatgtgtttaatgtgggcgaggcggaagcaatggcaaaggccggggcggatatcctggttgcccatatgggacttacaacgtcgggcacgattggcgctaagacgggcaaaacgctggagcagtgtgtggatgagatccaggcgattcgagacgtggcggtgaaaataaacccagatgtgatcctgctgtgccatgggggaccgattgcgaggccggaggatgcgaggtttattcttggacgagtggctggcttgcatgggttttatggcgccagttcgatggaaaggttgcctgttgaggtggccattaaggatacaacggcggagttcaagaagattgcgttgaggcactaaaacaaaagccatctactgggacatcagaggttcattagctaggcatgtgcaagaatgcaatggctataattatcttatagcccctctggctcgcaatggagcatcctggaggcgcctcatatctactcattgaaagccatcaggatccctggggtctcaaatagctcagaataaattgtcaagttcgacgttcccacctggaaggctctccctgaatctgcctgcatctcaacttggacagtggatgtaccttaggcgacctaaaaccataagtgcggaataacggcagtcctgacgcgcagatttatatgcattaaatggaaatgaacttttgtcaagaagtctgttctctataacgatcttgaacgtctgtgctccatggccggcgcagtatgccagtgtctacgagaaatgaccttttttctcgcatagctggcccttttgtaagtattgtaagcagaaaaatctgtagttccagagcatgatgatatttgtttacgtaaacataaaatgaagttgtgcctgcagaatttttcatgtacatggtgataatggtaccgaggctagacttgattgtttgtcctggataaatttgattaagacagaaaagtcgtgtgatattttgttgagacatacaaactcaacttcattatgtaggaactgagagatccacaagttagccagctatattgtgtgcagtccatcaaattgcttccgttattcaatgaaaaaaaacttgatatcagcaagcatagtctgaggataatcggcaaagtttcgaacaagctgccgcagatactaccaggcgataaagctactcgcaattgggtttacgacatctataaatagcatggaagaatagcggatttcggacggccgctgcataatacgccaaggcattttcgtatgtctctggaataccttgcacttcggctcctggatcgttctggatacagagttattgtagtatgcctgtgatatgtatcttatatcttacgctcaaatcgtgccaggcgcttctcgatctcgagactatttatccggtatctctcatggcttttgtcagttgaagagcaccaaagctcgccgttatctacgtactttctgttcaacgggggaagctttaggcgtatgtctatctcccctcatatatcctccgaacgtagccctgaggtttgacacccgatttgaccggtagaccataaggcacaggtccccaatgtattctatcaataatttagtccatcggattcctaacagcacagatgcacctcctctaggaacagccacaatgtataatatgcaactgtacctgttcggttaagagccctgtctggcaatagatatacacggacagttatcctatcacaaattttgcatctatagcattgctttatcccctctcttcatcaccttcggcctcaagattgactgttgcgacatgctcgcgactagcctcccacgctcattccaaaccctgccctccgtatacgacctcccctcaccccccacgatggtcttaatctctctcaacaaccagtcacacaaatcaaactcgtcgcagaagaacctaatcgcaaaatccagcgtcgcacaagcggcggcatcatcaaggaacatcccgctatgtgctagcggcgtgaacgtcagatacgcgtcaagcatccacgccagcccggcgtagtggtctgacttggcggacaagggggtgcgacagcggaaccagtctgcggacgtttttgccgttaggggaagacgggcttgatgaggcggttggggctgttctttcaccatgccgtggagattatgtgcagagattccctccggggcttgtcgggcctcgaagaagcgagcaataagtccgaaaagcgtgttgtagagcgataacgattcaattgatatggtgccctgctcaaccttcttctgcccagtttcttggggtgtgagacatgattccggcttcgagtagatatgatccggaggggaagagtattcaagaagagaatctttttctttcttgtggaagtctgcaagcataatgacacatagtctcgtggtggcattctggacctgcgagatttcaacttgtctcgtcgcgaacgtacgtgtatcccggagccgacgcacagagcaggtgatcttgctgtctgtcaacaccggcgcaaggaaactccctgtcacactgtagagattgtacccatccggtgcggtctggcatgctgcctgtactccaacaccgagggcgcagccaccgtaagagtaggaggcggtgttgccttggcgctctgggttgaagcgtgcttggaatgtctcagggccgacaggttctactgagatgtgttcggccagggtgcgcgcgatatcaaggggtagattcgagggcattgcgtcgatggctggtatctcctcggttattcagggttcaaggactataatagagtttgcagcgagagccgagatcggcgatgaccaatcagttcaagctctaatgatgacaaatcaggtacctagcgcagcctcggtccaattcttgtcaccaaagggcgtacagcagaacctaattgcagcaatgactatatgcttgatactttcctgcatccagctatgaccatatgcttggtgtctttctacagcgagcccaaagctgttgttactttctgtgaataaattgccagcggataggtaaaccactaacaaacacttctccatcaccatagacctatcagagcaaagcgttgaagaccgtctttcgagaccttagacgtgaacctgtctcgggcagaaacaggtcaattataatggcaatattggagtatttgctttttgggccttaacggaccgaaaactcaaaagaggagctaacttcgaattatgctctatcagaatcttcagtaacggccatcgcccctataaacattcctcatgtacagcaaaccagctataccacaacccttaacttccaccccgtcttcgccactcttgctgccagcgctgacccagctctcagcacaatacaagtccccgaaaacacttgtgcccccgtatactctccttgcatcgcctgaatcagcgctccgtcaatcgccggcccggtcagggtcgcgatgcccacaaagctaagaatcatgccaattcttgtccccgttttccgtacatcagttatcattgtcgtcgctgtcgccgggaaaagagactgtgctgcgccgccggctaggccgtagatcactgtgaagacgtacagcccggcaacggtatgcacggctatccacgcatagacaacaacggcagcagtgaagttcagcgggataagaatgttgaattttcctgtgactctgtcggcgaggcgagttgggaggatccggccgagcacgcctacgccgttctggatgagtatgaagttctgtgtatcgcgtacggcgagccggtctctcgcaaatgtccccatgtagaaaaaggcaaagtagagaccccagagattgaggaacatgctgagcgcgaagaagacaaacggcttctctttgaaagcagcgctgtcgaggaacgggccggagggccgaggggggaggcgaggatggaagaatagtaagccggaaatctgggttatcaacatcacaaaggcggctattcgtactgtccagccaaagctgaggctgtgaatatcaagcaactggtgtattaggacagggtatatcatcccgcctgttgttgcgccggctgcggcgatccctactgcaagcccgcggtttctggagaagtatgacgacgtgacagccagtccgggcccgaaggtgagaccgttgctgattaacatgcagatgccctgggcgaggaagatctgccagtagtccttgcacaatgacagcatgaagaacccgaaaacttggaagaacgcaccggccatgtacatgagcctgaagtaccctgcgtctgtagcgcggccggcgaagacaccaaaaaagaagaggagcgagatctggatgcttccgatccatgagatggtggaactggattctggaagggttttggtgtacagttggttgaaaatggaaaagccgttgcttacgccccaggtgttgaggaagacgaggtgcatacacaagacttggagccaggccctgaggccatgatctgggggtggaggcacagacttctcggagactgggctggtgtgttgtggtgctctgatctatgcagaatgaggaagatcctccttcgaggtccttttcagcgctgtccatgttcagctaagtagactgtacttggagtgggctacactgatttgagtctcattgtgtttagatcagagccacgacttagttataccagctcagacttgattatgaatctggcctcgccggattcggcctgctcgaaactagtgtacgggcgagttcctgattattctatcaaatatcgtcatcttttagaccgccagaccaaacgcccaaacagcaggtgccaatatacctaaattccaagagccatgtaagtacaaaattctagatattggctatttacctgatacatcagtcgatacagcattcccctgagcacttcttagtgctgtaaggggtgaggggtacgagcgccttccttgttaatcgccagccgcgtctttccaagttactactatatgcatccaccttgaatagtcggaatcttgagctcttgtggtaaatctggacgtaaacaattgcaaaaaatccctttcgacgtactgctttgggctttaacttacgtgcgacgctgagaaagcggcttgattaccaattaaagccaacctggcattcgcagggatgcgagcggaacgagtttgatacctttttctaggctgtaggactttctcttgcgacaaaaaggaagagatcgtccagtcaggccaggttctccagtagtataatcggaacgagactgaaggggagcgcccctagccaaaatcgctctttttgaatgctgtcgaatccgaggtccttcaggccaatacttccaatgctcgtccgaccacggttcttgttatgcatctctccgacctaatgatctcaggtgattcaaaatgccgttaatacctatattacgttgaggttcgggaagaatggaaagatggctgtgtttgcttgcttgcgaagtaccttttgtgccggtttgataaaagaggtagccccaaaaacagcctatctcgcgcttttaacaaatggcgcgtggagtcgccaggaaacaagaagcaggagtacattgaagatattggcattggccaattcagggagcagagcctctcaaatcggcttcattccatgggccgcactattgggcgttacccccccttttttcggtattcagcttcagtttgtttcactaatgttccctttcaactcgtttcataacgcccatggaaactgctgaagtattcctcagcggccaacgcgtcacccctggggcattttggtctgtgcagtatatcaccaggttttgactactcaaactcaccttcaatttcctggttcagggacgcagggtccacatagacggggggaaatgccgaagttgcgatttgtgtactggtggtggactcgcttcgaggccacttctcctcgcatcgaggaccaccaccaaaaagggcaggttactgcccaaacttgcctctgtacacactcgtctcgatcccaaacattatcgcatttgagcaagccatcatctggctcgctatggagatggatgtgcatggggtataagggcgggcagtggcctcgactttttccggttcaatcaatctcatctcgcatacactatggctcctggattagaactgctccctaagaccacggccttgccgacaaaggctgccaatgccatcaacaatgccgtctatggcagagactctgatgtgaagtttgagagtgccgagaagcaccagcgggtgttaaatgtcttcagagctttcattgccgacctggttcagcaatatggtgacggacaccctgggtacgcttcctactgagtccattgttgtagttcagcaaagcatagctaactcgctcttacagagcgcccatgggcatggcggccatcgggattgcgctgtggaaatacgtcatgaaatactcgcccacgaattgcaactacttcaaccgcgatcgctttgttctttcgaatggtttgtattccttccagagaaagagagggaatgggggacacaaaacaaaactaagaactcattgcaggtcacgcctgtctctggcagtacctcttcatgcaccttgtcggcgtcaagagcatgacccttgagcagttgaaatcctaccactccacagactccagttccctatgccccggccatccagagatcgagaacgaaggtgttgaggtaacgaccggcccactgggtcagggtgtcgcgaacgcagttggactaacattagcgaccaagaacctcgccgcaacgtacaacaagcctggctagggagtcgtgaa

SEQ ID NO: 5703 - DNA, 6467 bp, Emericella nidulans
  unsure (1)..(6467): unsure at all n locations
atcaagcttgactggattcgacgtcgtttcaaggctcgtcgcgggcaattgtgagtacttactgcgacacaacggtgcttttctggactcggactaggctcaggtctgtgatgaggtataggtacataaagacaaagcgatgggtaaaagtactaaaaaggatatgagacatgaatcgcggggtatcatcgtgcaacaaccggtgcgcctgtaactgtgcaagtgggagagaagtttgctgggaagagaagagcggcctggaatctgaatagagaagcaagagagataaaaggaaagaaaaaaaggaataggagacgaaaatgggatggaagtgtggacgaattatgccagatatattccagctcatcaatctaggacaatgacttcgggagactgatccggcgttcgctccggtactgaagcagaggcagaacggtcgacctttattcgctgttggattccagtgtgcaggacacttgactttcgctttaaagctgtttgagaaatccgttgctcagaggacgaagtgtcattatcggttactacatcccaagtaccgtcggctctgattttcagagcgcgagcgctttcatattggttcgtgcgttccaatcggttgcgcacgtcggccagaaattcatcaacaatgaggttttgggggcgagcatcacggccgcatatgggacatttccagtccgcttctatcgcagattgaaatccagatttgaggaggcgagtccctaggaatgtctcatgatcaaagcattctgtgtggtcacaatgacgaccgcgcacggggacagcgaagatgcgtgcagtgtatggatcaacgaggctgaccttgagatcgtcgctaacaatactcagctcatcgccatcttcgtcgggattgagtgcaagcttagcttgaatgcgcttttgcgactcggcggctggcagaggctgggcaagagcctttgcagacgcaagggagcggaaggtgagtacttctacagccactgcataggtgaagttctttcgttcagcaggtcctaggaggaagttgacttcgatcttatttaaaccttcttggaggacaagcgtaatgtccacagggagatctctggtgttgtggattttgcgacgcgggaatagctctatattgttgatgtgcacgtatattgcagtaggccatgcggtttctgcaacgcaccacgaattttcgttcaaactgacagcagattgcggggtcttaatgcatcttagacgataagtctggctgccctccttaacggtccgaagcagacgctcccctttaccttgtccacgataagatgcgcggcggttcagctcatctcctgacaatgaaatagactctgtaacggcaccgtcttcctggctgaggattttgggtttcataaagaatgaggtcatgtgaggcattaactctgtttcactgactctagtgccatcgcccgagataaaccggttgattggatcgcgaagataggcctggtggatggcaagccgattagggtttggtcgtgtggttatcaccgggggcacatttggtgggggtaggagcggcgtccagaaaggttggcgtgctgcctgctgttgtagttgccgatgctgtggttgaagtagcgtcgcataatgtaggttaggagactgtgttctgtggtttgcaaccatttgcgattccagaggacctggaacaagccgttcgttttgtgaccctgttcgctgagcttgctgtaattgctgaagttgttcaatgttgctgaagctgaggctgagactgcgagtgagggggctgttggggatactgttgaacgaggtgcccctgatgcaattcatgcggcatcatgacttgcggcgtagtggctactatgggtgatataacttgccctggcagggcccacggctccgaaccgcgctgttgtgcgtcaggttgctggggtacagattgtcctggaagcacggacggtgttgcgctgagggaacttctggctgacgccgaagccatgccattctggcctcccgctgcagaatgcgactgcatatgtggtgaatggtgctgcacaaagtgcaggtttggtggtgctgatacaggagtgggaacagtctgtcctggacgtgaaacgccatgagcgacaccggcatttctcggtaagcctgcgctaacgctgtccctccgtgctgctgcaatagccgcatagtacatagatatgatttcttcgttttcacggcgcctctgttcagtggagattggctccgagagacggcgcctaaagtaatcaaagtctcgcaagaagatttctcgcattgaaccttctgccttaacgccgggaatccgccgtgatatacaaaggaaaatgttgaactgtaatgtcatggagatgacaccgagcgacctcatatcatccatgagcggtgggtggcctttcgtccgcacaatgtcttcaaaaactgcccattgtatcaccaggtcagccagaaggcgcagcatcccctgaagctggatgtgatacttccaatccttgagtagctctgatagtggggatggaaagtcaacacaccattttagaaagttcgacgcgacgcgctgattatccaccaaaagattccggacgatatacaagcctttcacatgttcgggaccaaagccggggaggttcttgagctgcgccgagtcgtagctgtcgaggcagtacacctgatggagggcaaggaatatgaggtcctggtgcgtaagggcataatccagaagttgaagtcgtggagcctcaacgccatcgtggacaaacaacgaccgcttttccttcgctacaaacgcatccaaattccgttttgcgcgcacaaaaaactccgctgtaatgactgaaggacgatctgaagccaacgtttgtgagagggtattcgggtgctgctgtggtaacggaagaggatgaactggagcagtaggagcgagatgagagtagccaggcgggctatatggaacgaagcgggggtgtccttgctgagttgctgaagagtttgcctgttgattgctcggaatagaggccggaaatgttcctacagtagaaccatttggttgcggacgccgttgatttgaagcatgttgctgcagcggaggcgacgggaaagcagtcatggagggactggcaatgggggccccatttctctcgccggcagctatcggactggtatgcgatctggggggaatggtggggtccggcgatggaagtgaggagaccgactgctgttccagacagccctgcttctgtgtctccagactttcctgactctgcttctgctgcggtattgtagtcgaagagggtgaagtctggagacgagtggctgcatttcggggaattgtgggcgtaggcgaggcgatagcactttgattactgcggaatgaggcgagattctggtgtgagggcgggagatctggcatcggaggagctggagaagctggagacgctggagcaggaggagcacgagcagcaaaagcacgagctgaagctgccggctccggggttgggagtgctgtcgtctgagtctggtcgtcgcgctgaacgagaggagaattcatccacgcgtacctcgctttccgagcggcccccgcgagaaactggttagcggtggagttttgtacggtcacttccaaccccgagaccgttatgcggcgcgcaggatcgggcgggcgactattcttattaactgcgggcggggtcatcctggcatgttgagtgtgcgttcatcggcaagcaagatggcggtgtttgatggcaatacccgggttgtttgattgcaatcaagttggccgggcgcaggtggtaagtttccgctttggggagggtgtgaagccggtgagaagaaaaaagaaacacagccttatagcgcaaaccagcagaggtttcaaattctggtcattatgatggatttcgctattcattgagtcgagtgatactgtgctattcacaaggtcgactctctaatggctgatccatgcatttgcttacctattttgccggagctcctatattaatgggacgagagtgccaggtcacctaagcagtgaaagatgagtcttttcttcagcctcacaacagtaggcgacaagccataatgggactgccaagaagtcgttcaccgtcagcagaataatcgttcaccagcatcagccctctggatgcattgggctgatgcatttgtggctttgctctggataattctactcgaaatgcagaccagaataccagtcaatcagctcttcttgacctttgacctgtccctataactgtctcctcagtacgccccaactttgcagcgaacccctggcctaatcgctgaagtgcagccgggcaaggcacgtagccgtgaagaggcggtccagcgtgtctgacaggtcttggtgcgagcttaagtgacagacctaatctccagcactcaggaacgacggtgtggctggagccagactcgccaaggccaggagtagctgagaagcgccaatcttcagcgtctttcaatgaacgctgcactctttgatccaatgcaagcatccgtccagctacacggcaaatggctatcccatgcaagcagccgcaacagaaagccgcagcaagaaatgcgcaatccgcaatttttaacaaacatgaacctgtccacaccgtttaggaatgagggccttagaaggtctgttctatcaacttgatgagcaagcatgcaagcattacccagtcagcaaggggtttagattctccagcatcctggacgctggagatatcgcagaggccaaagttatcacgaacacatcaaaacaaaagtcgaacaaggctagcggctttggacgctgggaccctgcagcaccaggggatgggtgcttcgaatacgcatagggatattacgcatagggttattttctgtcttttttctctcttctctgtctacattaggtagaaccaagacgaagaaatgaaggagaacattcccgggacggaaacgcgaccaccaagaatctatgattgggtcccttgcgagtgactgtctcttggaatcatattccggtctcattagagttagacattcttcttttcgtatggatgtgcaggctcaatactccgcaggccagcctcagagtcaattgcttctatagacctgtcgatcgctcacgggagaaagtatatattcgaccagggtccagaacacactatagcttcgcgaccaaagccactactttctgtattgaaactatattttgatcttcatcgacaagctaaataaagttgatgtcatgcagccaatgtcttaaatatttatttatttttttcgaagaagagagattgaagaagtaaaagtatagtaaagcgatggaaggttgagagtcacatgacctatcggtatgttgatatctgacgttttcatcgacaaggtacgcagtgggttagcatggaattaatatagggactttgggtgacagttcaactccgctaaaatagcaggttgttagcttaattgtcctcccgcaggccgtatgctggctccaatcacagacacgtccgaattgacacttcggcttcaactctggtatcccctaggaattcccctcgtccattgcccggagagaatagagactgacattatagttcagtgctctcgtccttcccttcctgtcctatgaaatattttttcatgaaaaattatatgcgatttaaatagtttggtccgggcctcaaccagaaccattccatcccaaccatcctttgatcaagcatcattttaccccccacctcagtcatcgcagtcaaaaattcattcttgcttccagacactcttttctatcatcatcatcttttacgatctttcatcatttttaccatagtacttcatctagtactgcatctaatcgcgggtctccgtcgagagagcggtggtgacggccgcagatccgcccttactcttatattaaattccatattgcatcgacttattatcggaggacggagaatcccatcgtctacgtctcccttccttcccacctgtcctcgttcttctctgccagctgcatttcctggggcctctcgggctgggcacgatggctctgaactcggcgcctcgtgggtatcatacaggagatcttctccttgttgttcgtgagtcttttcttcacctcggtcgcagcagcgctcctcccaccccactctcgtcatcttccgcgcctcggccacctcccctctccctttctgaggaggtaactgacgcacccttttttgaactatacagatgatttcaccgcgcgctcagaggatgaactcgacttgcgaaagggcgagagaatcgagttggtcgagctggacgatggcttcggcgatggatggtacctanggaaagacctaaggactgggataaccggccttttcttggaggggggtggttcgctctgttctggacattccggaggggttcgctgacatggcccattg

SEQ ID NO: 5704 - DNA, 5969 bp, Emericella nidulans
cttacctcgaaatatcaattaaagatcttatgactccttcaagacacacagaaactggaacacttttctcagacaaaacaagacgctgaggtgcggcgggggaaattttctgagctgcggagctcaaaatgtcaagtttatgcctgaggcagataagtcacctgaggcagataagggcctgggaaaatatggcactaaccttttctggccgggttaggtctgcctccttcccaattcggcttctcatcaacactacgacgccgctcagctatacacagcaatcaacaggctctataagtacaataactgcaaggcagacaatctttagcttgagaagatgagaattgacattgtagtcagtgttcgtgcagtaatcttgggagaccatgcttgaacatgagccctcaaggtcgccatactcgcagcgggttgtccagcgctcctgccttctggtgtccgcgccactcgcctggcgatcttctactgcggtttatcctcgatctacctacatgtcttgttacatagcccgttctgcatacataagtcggcagttttatttcctcagcattgactacggcgctatttctcttctcccgcatatcgagcacgccgatggcaacggtcacggtagatgtctacagaacgccgctcgccagcaagcagtctttgacgaacttctaaagtgcgcctagccccttaccgtacggaatcgagaatcggcgatgcctctatattatactacggggtcgctaaccctgccgcacgactccccagaatgggacgccatagcaaaggccagccgcgcgacacccaagtggcctgttagagacgtgagtctactgctgcctgcgtggaaggtcccgcatctaatcataacttccagataatcttcatcagtactatcagtcccttcatggtagcggccttcatagaatggatacttttccttgccgctttcgtatactgtctcattaaagtataccagaaagccgaccactggagcatcagagctcttgctgtcatgatgatcatccttttctcagccctaaggtcggtcttcgccgcagtagaattatagaaaggtatgagctaatacgcttgaaggggaatcttcctaccagtcatgatcacaacacttccttttcctccgcatatcaaagacaagtttccccctgctatggtgtcgtttcttcagtggttcgcgttctgggcttttgctggacttctcacggtaccatggttgttctgcgtttacaggatcgtcaccaactcgataggcaagacgcgaagaattcaaaaggtcctcgatgccaaaactgcgccaaaagtcgtcatcatcatgccagtgtacaaggaagaaccggaaacgttgatcaaggcagttgattcggtcgtcgatagtgactaccccgggtgttgtatccatgttttcttatcctacgacggtagcctcattgacgagccataccttcgtgtaattaaccacctcggcattccaatctcacttcggagctatccccaaagcatcgacgtgacatacaaaggagcaaggattacagtttcccggttcaggcatggcggtaaacgacactgccagaagcagacatttaggctcatcgataaagtgtacgcggattacctcaaggagcatgatgatctcttcctgcttttcattgattctgactgcatgctggaccggctttgccttcagaatttcatgtacgacatggagttgaagccgggaagcaagcgcaatatgttagctatggccgggatcattacgtcaactaccgaaaaaaattctctcattaccgtcttgcaggatatggaatacatacatggacaactctttgagcgatcggttgagtccggctgcggcgcagtaacttgccttccaggagcgctgacgattctgcggttttctgcctttcgcaaaatggccaaatactactttgcagacaaggctgaacaatgtgaagacctgttcgattatggtaaatgctacttgggcgaagatcgctggcttacccatctcttcatgatcggagcacggaagcgctaccagattcagatgtgcaccaccgcgttctgcaagaccgaagcagtgcagacgttcaacagcctgttgaagcaacgccgacgatggttccttgggtacataaccaacgaagtttgtatgttaacggacgttcgattgtggagacgatatcctctcttgtgtttggttcgcctgttgcaaaacactatccgaacaacggcattgcttttcttcatcctgctcatatcgattatgacgacatccagtagagttgacgatttgccagtgggcttcgttgtgatctcgctagctctcaattacacgctcatgttctatttcggtctgaagctcaaaagatacaaggcctggctctacccaatgatgtttattctgaaccctttcttcaactggctgtatatggtctatggaatatttactgcaggccaccgcacatggggagggccaaggaccgacgccgctagggccgatgagtttactacccccgaacaagccgtgaggcaggcagaggcacagggagacgagctgaacgtcgaggtagaaacttttcgatcagcagttgaaggaaaaggagtgcctgtccacccgtggaagaaagtcaccggacgcttctcaaatggagatcttatgcctattaaaggagggatggtcaatgataccgaggctggcttgacgaagttcttgtcgccccttccagaaatacctcagattggcctacatccaccgtggtccacagagtccgtactgtcttctgtggaatctatcgagatgccacataacgtcgagagcctgatgaatgacgagaaatattaccttagtcgcaaggctcaagagacctcaacgcctcgtcgcagcgtagagtcatttcacgattctcagaacacaaatgatccccgactaccaattccaagcggtgatggcaaccgtgccatcatagaaaacagattggccagtccagcgccgtcactggattcgacaacaacagcaacagaagccaccaagtcagtggagacaccagaagattgtcaaactacggggtcatcatgtccaccgaacgagtccagtaatcgccttacaatggccagatgtgtctcgaatacagaagtctcccaaacgcagcgcttgagcaagaccccgagtccggcaaagtcacgaaagcgaggaacagttgcctgagaatagtgttgaggcgattcaggcaaggcagggcaagtgacggtaaacagaagggatattatgtacttttagggcattggtacaaaccggttagcatgattatactggaagtgtgtccttcatgtttttattagcaaagaaaatccctagtcatacatctctcggctaccacggagtcatctcgatgtagtcccgttcattccttatggcaatctttagctgtaagtgcgacatttggaagcctattctccatactgcgttgccaaccacctcaccctcttggctggtaaaacggctataatatcttagctaattgatgcaaactattacataatgctaatgcgcgtatatcttggccttggtttcctttatctaattatgaagtaagattcctatgaatgcacgaatccgagacctgtaccacacgcaaagcacccctgcgggagaggactttaggtgatagttatactcttggcttggtttaggtaactaatcttggcagctactggtttaggactagacttaccatatcgataagcgaccagcccctccaagcatagattctgccgtagattggtaaggcggtcaatgaggggcgtccaggtgtccagcatgagccagaaggttcgatgggcatcggccaagcatcaaggctgcacaaagacaaaatatcaacgcaaaggtttctcgctcaaatagatttgggcttttgcaaacgtacatattagacgtcgaagtctggatttttgatttcaaattgaccagcgtgttcttgcgaatcctggaagtggatcgaaaggaaaaagtcttgaccgcttgacgacccagaagtgcccacgttgttggccctagccacacctccagatacctaagaacagatcctcgagtggcgccgctgctgcaaattattattaccatcactcattctcccctctcacctctcgctctcttctccatctccctcccgattccccctcctaccatctattcacccccgcatttcagatttccgtcacaatgtctgtcgtcggtatagattttggtgcccaaagcaccaagattggtgtcgccagaaacaagggtattgacattgtgcgtatcaacgccccgccgctcaattttactgtcgagggacgctaagctaacatattctcaacaaatagattgccaacgaagtctccaaccgacagacaccgtacgttcttctctattttgtttttgctttgactttgagactaactttattcaacgattagttcccttgttggattcagcgctagaagcagacacattggtgaagccgcgaagacacaagagacctccaacctcaagaacacagttggaaacctcaagcgcctgattggccgcgctttcagcgaccccgagattcagatcgagcaggaatacagcgttgcacagctttgtgacgtcaatggccaggccggtgttgaagtcagctatctgggcaagaaggagaagttctctgccatccagctggtcgccatgtatctgaccaagatccgcgatatcacctccaaagaattgaaactccccgtcacagatgtcacaatcagtgttcccgcttggttcaccgacatccagcgtcgcgctatgctcgatgccagtgagatcgccggtcttaaggttcttcgactgatcaacgacaccaccgctaccgcccttggatatggtatcaccaagcttgaccttcctggccctgaggagaagccccgaagggtcatgtttgtcgatatcggttacagtgactacactgccactatcgtcgagttccgcaagggtgaacttaacgtcaaggccactgcctgcgaccgtcactttggtggtcgtaacttcgacaaggccttgactgaccacttcgccgatgagttcaaggagaagttcaagattgatatccgcaccaaccccaaggcctgggcccgtacccttgtggctgccgagaagctcaagaagattctgtctgccaacacagtcgctcctatgagcatcgagtctctcatggaagacattgatgttcgcgctatggtcaagcgtgaggagctcgaggacatggttaggcctttgttggaccgtgttaccgttcctttggagcaggctctcgcggaagctaagctcaagcccgaggacatcgacttcgtcgagatggttggaggctgcactcgtgtccctgccatcaagcaagcggtcaacaagttctttggcaagaacctttccttcacactcaaccaggatgaagccattgcccgtggatgtgctttcagctgcgctattctttcccccgttttccgtgtccgtgacttctccgttcacgacatcgtctcctaccccatcgaattcacatgggagcagtctcccgacattcctgacgaggacaccagccttaccgtctttaacaagggcaacgttatgccatcaaccaagatcctcaccttctaccgcaagcagcctttcgacctcgaggctcgctatgccaatcccgaggcgcttcctggcaaggttaacccatgggttggtcgcttctctgtcaagggagtcaaggccgacgccaatgatgacttcatgatctgcaagctcaaggctagattgaacttgcacggtattctgaacctggagtccggatactacgttgaggacgtcgaggttgaaaaacactgtttctgaggagggcgagaagaaggacggtgatgtaagttcccagccaagttattaaactcagcgt

SEQ ID NO: 5705 - DNA, 14565 bp, Emericella nidulans
tgctcctctacgtataagttgaggagctcaagacgcgttgagcaaacttagtcaatttttcaaagacatcaaagtgcgagttcgtatctggcgtattcgaggaacctggtcatcgatcttgatgaaattcggccaatgggaagcactttgacattatgctccacggtatagatcttgctgaagttcaatctcgacatataatcaagattctcactcggattttctggaaccacctccaggggctccttggccatgcgcggctccccaacgcccaaagttggcgttgtacctctcatatgtacaatcgcatgcttgtccgggtccacccctcttttcgcaacgccacggccatgataagttgtaatcgcgctaagcaatggtcaggtttagtatgaacacgagacgtcaagcaggcacttacaaacaccatgagcattgctcatactgtctaaagactaccatgcggcgaatagtgctgtaaattggctccccaaagcggcctcgatacagcgggcctctgctgacaagggtcccgccggctcgcccatcgttttcgtgccacaagatcgaaaagacctagtttggtcagttgtgatacattgagcgcgtgaaatggggtttcaaattgcatcggtgccgaagaaacaaaacaaaacaaaaaccctattaaacataccttaccctctcggtagtaatgaggtggttgaaccatgtaccctaagctattagatatacttcctttgcctagataatgaaagggactcacgcggatccaggacactctgtgacggcagagacatgggatgctatttgccgattagaggcatagatcaaaagttcgcgagagagtcaagcttactcccggtgttggcatcacttcaggataagagccacgataaggcccaagttgtaccgtgtgtggcggatactcgacctgagtgttcgtattgcgtcgggtagttccgaggcggtaatcgttcccatagcgagatgtctcctcgcgctcgtcgaattgatcttcgtagtcaggttcctggtcgtattgaatgaactgagcttcgtagccaggctcatgaccttcgtcgtatatatggctgttggaccgcccagaggagtaaatgtaatgaggttcttcttcgctgtatacgtagtttgagaatcagcatgatatgaccaaagtgaacctcaggttactcactggccggacgtgccccttgaagatgttgggttctcaggtaccgtcacatgtcgtggtatctctctagtggcaaatatcagtagagcaacaagaatggctctctaatcggcggaccttgagctcgaatagtaagcataatggctttgcacatcatagccttgtgcgtggtgggggcgtccctggcgcgcgcctaagatggagtaagcactgtcgttcatattagaatggctgtgcctacctcgcgcatagggatgaggttcctcagcgtaggccgagcggtcagagtcgtaaccgtcagacataattagagcaatcgcctaacgtctcacaatccaaccgaccaacaaattgcaaggagccgtgattccgtcgtgattccgtctttccgatactgggcccaggatgaagttggcgtactttgacgacgggaaaggagcccgactcgtctgacagactcattgcttataacttggtttggttttcagctcgcaaagagatggactgccagaacgggtcaggatgaggctcttctgaagacagtcgacccccgctttcgaagatgcaactgcatgtccttgagttgtccaagcacatgacactggccttctcctctcagctcgatcaaagcaatctgcagctcgtcgacgactggttccatcgggagattatggagggtggaagtgctgggattaaatcaccattgcctgcgctaggcccggcgcgatccaaccaggcggagttctccccacgacttacttcttccgcttccctccatccctctcactcatctcgggttctcggatcgttgtgggagtcatttcgcttccttcttcttggttcgctgcaacctgtcgtcatcctcgtgctgatactctgaactgctcggccttgtcggcctcgtcggctcctcccgtgtttcgcgatatgagacggccaacaccttgcgacgtttccatctttggatcctggctcgttaatagtcctcgacggacctcctcgaatatgtgaatggctatttctcccgcctatagaagcctctgactttttcggcattcgagttgcagggcagccaaacgacgtgtctcattccagtcgctcgggttacgcagcaagtcgcattcatttttgtgcatcataaatgcaacactattcgctattattggctttatttatgctcggggcgttgggttgttaatttcagcctgattattgctttcgataacagcagacactcgccgcggagattgggtttgtcctgctatcgttttagttaacacctcgatgccgtccatcgccgactctgagccaccccctaggagatctccgtgcttagcgtcttttgcttcacgtgggctcgccccctggtgtacggtgagtccgccactctacggtgaaggcctatggggccacacaggcggatggtcgaatttaaggccctcgagaatgcattccggcattactggcgttccagggcaaccaaagctcgacgctgggtaaggctgttacctcaaacgtctttgaactccaagcttgcgcctgtacacgtacactagtgtgcgattgctaacaatgcatttggctgccctgcagaatcgccgaagcaggaccgatccaacgcccaaatccgagagtttacgcggtcagtcgttcactgagtcacatgttcctccccaacatccattgccgttatcgtcgccagggctctctctcgaactcgatgggtcataccattgtataaacacctccgatgcgcaggggaatcccgtccagccagcgcatgactccgaacaatatccgcttgaccgcggatcttttgcgccaacacaacctagccctaaccaccgtgcaattaacgaaggacaccatgaagtaagacagcacgcgccaacaactgaagaagaaagtgaggcttcaagaaatactcgagaggcggaacttttgcaactatatgaaaagtttaacgacctctccgccaagagagtgcgagctcgacagtcccgtatggcgttaaggtataagcgggaggacgagcttgagctaagagtaaggtttatgaaacacctcaactccttcttcgccgacatggaccttcccgaagcggggccaattatggaagagtatcaacttctgcaagttgccacggaagactatttgagactggaggatagctatcggcaagaggaagatgaactagaagaacaagagtacttgctctctatttcgattgagtccttgacgagatcgcaaaactggggacctgagccgaattttcaacccggcactagaacttggagtccagtctcagatgatgatgcggccgtccgagaactgccgcattgtataactgcttatctgtcacgcataggagacgagcgtattcttcaagagcgccttgccgatcttgactcggaatggttttttaccactgaaagacaagcccaaaggctacagtataagttgtccatggaagacgaggactcaaaatatttcctgaagacatatgatgaagaaagagccagaatctggaaggagctaaacaatgcccaaatggatgtggtctctttgcacgcgatctgtctcgaagaaggacatcgcggattcgactatgaggacctctcagcccttaatatataccagcactacgtcgatgataccttatgggcaccagagacaggcccattaagactcccccttgacgagtacttcgtgttttcaggagagtcccaagtttcgagtttagatcaagactaccctattcctcttgaacccaacagcggcacggctgaccagtcgccgttgagacgcttccaattctcccaggcactccaacaaacatcctcgatccgctctaacgagttcataaacaaatggatgctccaccagctccgtatctcgtcaataggtatatggcacctgcaacgctccccgcgttggcaatcacttcgcgcgcagggcttgcgcgagtatgagattagccagcttatccttgattggtggttctctgatgaaacggcgcaggcgccgtcatctgataattcctatctaaacaatgccgatgacggcgacgctgatacctttgtgggttatgccaatggccagggaagacacctgaagaaggcatcttcacagtccctggtatcgtcgccacgggtctcagccccgaagctcggtccacggcgttactcgaggccataatcggcccttcccttcgatttccttatctacagtcatgtccttcctacaatttctgtctttctcaactgttttgcctttgattatctgcgtagcatgcacaagcatatcaaactggacttcagtgttagagcgcttctgttttcggatccaactcgctcgcttctcatccttgtgatgcaggcctttatgtattacacaacacatggttttaaaattttgacattttcgagtaacaccaaggataatcatataccaatgggggccttcaacgagatattgatgtgtgtatatttaactagttacggcaatagcataacacggctagcttgtggtgcgataaagaaaatacaatagcaggcttgttcctttccagctttcatcgtgtccatattcatcattaatcacgtaaacaagagcaaaacgcaacgccaaggtataaactcgttctcgtaacctgatcccaattcattccattgtcccatgaactcataagtttcaaagtcccgatgtcctgtatccgtaggaggtcggcagtatttacaatcatttcctcctcgtcatgaatacctcgtctcgtcaccatcactatcactcaaactatcccgccgtctgctacgcgccccatcacgtcggtagcccttactcagaccgggtatgggatgatggtagctgatggtcccaaggtcttcttcttctgtgccaacattcgagtactgataatcggagcgagattgggagttggacgagaaatcaagcggttcagtgtagtgaccgcgcgactcgccgttacgcggactgctttgtcgcgaggacgaggtgggaggtggtcgactgcgtctttcgcggcggcgattgtgtctgcgggcagaaggctcacgaagcatacgctctgttgtggtctgagacattgtttcctcggttcccgcgacaaaggaaaagtcacggcggccctgactgtgacgcgccggctcatacgcataatcacggacttcactcatctcactctggttatattgggtcggaggcgcagaagtatcatagtcactaccgtaataagtgccgtcggcttcgcggcttgatgccgccgatttgggctggtttttccttgcggtaagcgcggacgtcttcgtcaacttcgccttcatacttttcattccgcttgcgtcggaacttatcgcggaggttgcgcttgcgcttcggtcccttctcagtgattgttgtggccgtttcatcgctgtatgtcggtgccgtgtcggcaacggtgtatccgtcgtcctcgccgaagaagctcttcccattgatgctgccaccgccgagtcttgtgcttcgggtggcattactgagtgttcggccgtcagggccttttcgtcgcagaacagttgacttgtattcctcccagtcgccttccttccagacgaacccaccatccttggcccagaagaagaaccaaatggatgccagaaccaaacctgcgcccagaattgcgaataatgcatataagccacgcatattgatgttgtttgggtttatagagccttcgcccgggtggtatgttttgtccgcccgcgcaacgagcgtgtgggttttatcaacaggggtcggtgtgaaggcatcgtctctctttgagtcttgctggaggctctggtggatgcgcatcgtgctgctgagaatggatcgaccaagaatgctggggaaccaccccgcatgctgggctggaggcatggtggatagagctggcaagagcacgttgcccaagacgtgcctttaagcttagttgacagcagaccaggcgttatatctcgtaaatgcagttgacaagtattgaagatggagtttgccggtcgtaatttgcacctttgaatccagcccggttagtatacttcagtagagttgactagacaaccgaatttaggaccggattgacgactcctgcttcagtaagtttctcaacgacaatttcagtgacacaaaacgagcgtacacttagatagagatcgaaagaatgcagtcagagcgatcgtgagatcgtggctcggcccaaaaatgcggtggttggagaaatggagaggctgggatgacgctttgtttgggcctggccgtggccggggtaaccgctgactcatcactcttatcgccgtagttagcccaatcttgtctaactttaaaggcggttggtgcctaaggcatactactatttacatgaatcatgagcgttcctcacattgtacacttatactaagccccggcagcacagttacatgagattccgagtgagaaattcaatgatattctcttcaccgacaaaatcttgtcttaagtcgataccaggatgcgctctccaataattgctaccagtaattgctacccgtaagcattgctacatggagtattgacgatgcatcttagtataggccaaaatcgaatcatatcctgcgacgttgagcgttgcaccgcatccatatcaagctcgacttgtacggagcagaaaagaaagataagcctcgacattgctttcaagggtaatattcgagtacatgcccatgaggatgtggaggcggagtctccgcatcgcatgctcgatactcagcgctgacaagacggagatgatcagatagatgtctgatgcgaagggcctctaagcaacgacgtaaggctcgtcccgctcagcgggtcgggagatggcatgagacagggagccatgtcgcactgcggcacgggggtataagcctcgtcaatattgagtggccatactgacagacaacgagactcagagtacagaggcgtgagtcacgtcgacacctgtttggtgggtattgggcagaaatccagtgagcatggaagaaggatcatggacaagctgagcacgtagcattcaaaatgagcaagagaaaaaaacgagaaaaaaaaaacatccattgaatcgtcaatatctgagtctgtcatgcttcgtaaataatcgaattgttgagatcgagtgacgtaaagacactaatgggtgctgagagctgccaaatcagtatcagcctcagagggggaccaccgcctatcaggacagtcgtcccttcgctgttgtaattcgccccatgacgagctactaagagcactccgacatgtccttgtctcgtaaactcagcttacactgtaggattcagtccgactctggctctatgacgagaaccgtatttgtcgccctcgcgaggcaaaaaaagggacgttcagcgcccataggaggcttcccacaatcaaatgcggtgtaatccagcgagcaagcatcccctgtcatcagtgaacaaataaagggagatccgacatggtcggagcaattcacgagcagcatcgggtaagaattttctagcgttcttctccgacttctatggggccgcttcaccgaatctcctccacttgcagtcactatggtggaggcaaatgttattgggccgcaacagtcagtcgtgcatatcaataaggttgggcagccagcgggcgacagtaccggaggctggagtggcggatcttgactcgaggctgatctggtgatgctgtctgtgttggcggtctccctgagaaaaaaagaaaacggagaccaggagtcgaagagagggaacagcgaggcaagcaatccaacagtagagacaaccgccaaaacaatgaggttgaggtaagaacggcgtctggagtagaataaacaaggttcgtccaaactgttccatggttggtctcagctcagatccacgagccgtgctggatctgttgatccagcggggtatcggtaattccacgccccatctatatttcatctactgtatcatccgtaattaaccacatacacacatacaatccgtctgtgatggttaaatcttgcagcgccgtgcactcagatatacttgcattcatatctccgagaagctccgcagttacgtgcattagacttgccaggaccagaacgcatactttctgctggaaacctacctagtagaacctactctataccatctcagtcagattcgcgtaaccgtgaaagaactctagcatccatacgcgctcttgctggtggtaaactttataagagcagcaaggtggcattgaagatggagtataaacgttttcggtttcctgactcgtcacatgttcctatcatcagctggagcacgagctgtcggaaacgtttcacaatcttcatagaaaactgttctcgagttatagttcatcactagacgggccggtatgctgttgtagcacccactgttcgcgtctccagatgaacgaggatgaacggggaagaacgggaaaaatggggccattgctcagtaaatgacggtttctgaagggtggcgtccatcttggacgccgtccatggccgattccgagttatggccgggagactggtgacccttgaggcggctgagtcggtgactccttgcgtcgcaagttcgtgcctgcaacggcagggcctgtcagacgtgcgttttgtggtggagtaatgccactcgcgttggccgtaaaggccacacccttctggggtatggtgtcctaggccgttggtgttccatccacgacgatggatatcaagacgaatatcgagacgagaaactgcatctgcctgttgagaaacggacgcctggatgacagccgcctgttaggccggcttcgattcgaccacgaccatggaggtatatatagctgcaggtaattgcgagacggcgaagcgtccaacatctgatgatccgacatggcagttagtggcagatcaggcatcgctcgacagccactcgcctctgcgtgcatccccacctctttggtcggtcttccgggtttcttcgaaaattcgaagagaatttgaaaaatcatattcgtcatctcgagtcgaggatttgacccggcaagggatagagacacgacgaaatagagaaaatattattactccggctggagtgcgagcagttaaaaagtctggcatatctgcgcgtgccctttccgcctcgctttttctctgcttcccctctctgcgtgtctgcgtttctccagttatccagtcgtccaacggcacaactcactactgggtgccttttattactgctgccatcctctctcgtcttctcgcattcttccttcataccatcttcacaccgaacccgaccgggccctgtatgtccccctctgtcaggcccagatccagtctcagtctcccaaaacccctccaacaaccgtcgccggttacactctgctgcagcatttcgactttttcctctttctagccctccactcaccgtctgccagccgacttctgcagaataagcgcgcttcctcgctcttctttccctttcgcctgatccgttggtggattggttcctgtcttgtctgttcgctcccacccgattctctcctaccacccacttcgtcgctagtcctgcgccaactcctcttgaccaaacacctctcttatttttcttttttcgatggagttactgctatctatggacggctctgcatccactgctcatcgctgacaatcaacgatctagacgccctcttcatccacgcctaacttgctgatctgcacttgtgggctgtgcttttgcgactcgtctcaaggagtggatttctagattgaaactttccagccagaaggggggagaaattatcaagtgggcatcagttggggaaaaaaaggaaaaagagacaagaggatcggggaggaagaaaatttttttctttgactcatttggatgagcagcagcagcgctagctgctgtgagtgaccaaaaccccccgaagccctgttgggtcaacacgtttcacgtcatccacagtgccttcaccaaagccagcaccccctcccgcttggggacccaactcgggccttggcgccgccaaaaagtcatgtccaggaaagctcctctcgccgcctcggtcgaggaatatgatgaggacgctcatgtcagtctccctgaaacccgtcaattcgccaacgtcactgccaaacgctccaagtctgacttgaagaagtcggccagggtgcccttcgtcgaggctgccagtgactcgggttactctagccgcaccgctgcgacggtcaacagcacccaatccgccccgtcgggctcgagacatcctcccgcccctcttaaggtcgatacatcgcacaaaaagactgatcttgaacgagttcgttcaagaacaaaagaacggccacgagatcgtagcgcccatccatcacgggaggacagaatgcatgcgggcccttactcggccggctatccgccggtccatcttccacggtcaccgtcggtatcccaccgacatgaacgaacgtatactaggcactatcctagcaacaactgggaccccgagcagagtgtgtatcacccagcgcacgctgagtcccgaccaagagagtaccaatattactcatcgcaagcgtcttcctacgattacccaccgccgtcgtcccagacgtcgcgttacgctccggcagccgttgttgtctcatccagtacccggcctcatggtcggtctgcccggtcgaactcctaccatgcgaataacaggcccgtgagcttcaatgggatgatgccttccatgaacgggatcatgtacagtagctctccggttggccgatatgaccatggcccgcctctttcctcctcggcttatgcaaactcccctgcctattctcccgctccttccgtataccaacagccgccattttatccctatccagatgccacaagcccgcccgaacgtatggatcgttcaatgtctcggcctagggagcaccgccagccccgaccgtccatatttgagccccccgcgatcgactatgatacttctgaggaagaggaggaagaagaggaagaggatgtggagggcgagttgatggaaccatccccacctcccccacctcccggaccgccccgtcaagcacggccacggcacccgtctcattcacttgatcgtggggaagacgaatactaccgatcgatgccacggccgccactcaagcaaagggcccctccacctcagatcatccagaaacggcccgggctacaccacaagtcagctactgccccctccatcgtgtcagagcgtcgcgggtcgcgttctctcgacttcaccgaacttcaggatgttctctccgagtatggatacaaccgaggatcgggtggaggaactattatccctgagcggaaccggagtctcagacgtccttcagtctatcatgattcgtcccgatccgcagcccgagttgctgtggagcactctacccgtcggcggaggcctaaagtgtatgattacggcccgcctgatgaaatagaagagaaggtggggggtgcagaggaataccaggcatctcagtctagcaaggccgcggccccttcaatgagtttgagtgacgccctgctcaaggccaaagcgaactctcaggctgcaagcgatagtggaagccagaagagccggtccgccagcagccgtggtagcggtagcgatgctcgtactcgacctgggagcggtgcattgaccacgacccgcgccgaagatgatgacaacattgtcatgacgctaaatggggttaccatgaacttcactcaggaatctctgggagggaagcggatcagtgtgcgaagtggccaaactggagctgttgaattgaatatcgagggcaagcgtccaaagaagtacttgacgggtggttccgagtatacaactgccagtggtggttccaggaagggcgaccgcaagtccgatcgcgtcagccgccgctctagtcggtcaacctacgctcctcctcgttactagtctgttgcatcgattcctggctttttggttcgatccaagccctatctggaatcttggcgaagaatgatgaaaggcagacagtgcgtttcgcctgtttagtacatttgttcttgtgattggatatttggggacaacaagcaggggaccgtgcgaagagacgcatcagtacctagctccgttgcctgatcaaaatcctgcccaagaacttaaggaaggacagtcgcagcaaacagtacgcctgcaattgttcgataccatgattctcggtgtgggtaaattttggacagaaagcttgagacaaggcaactagacgttggaatatttccgttcttatattccttgggacagcaaaagtttgatggtttttgggtacaaaaagactggcttttgaattgggaggtttcctcgatttctgttctgagcattgactcgatcatccctccgctatgaaaaaaagacagcgggtttcagcataacgtctgtcatgttcaacatgattgtatgattcttcatgacctgcaacgatccacctcacgcctgatgtttagttgatgctcatgtctctcatgtcctgccatgccaagtttatgtttatggatacggttatgttttatgtctgtgtgcatgctactatgttatatgctcgatatacctgcatttacctgtctgtataattttcttctgaataacccaacttgtctcttcatcgtttgtttgcgttcctccgttatggtcagtcagcatctttgaagaaatgagccgggagctggatgaaaagatataccccttgtttttttttgttcttgttcttggttagcaatatgcatctatttctcttcaggttacttccatctcgattcttgcttctgtttctactcgttaattccccatacgcatccacgttttgcctagattattacctatcttgtagtcagatgtgttggccgaaccaacactgtctgacgttacgccatttcatgtatttcatattgtatcaacttcgtctgtctcctatattctttataatccacgccccgacaaccttgtcgatcttacaacccttcgcgggccactctcatacttataccatcatagacgtgcaatttacccgaccttttggtttcctcatccgtaatattctttccgtagtgaaccgcccacgaagagtcataccaagtatctctatcttgaccaaagtacgaaacatcagaacgccggaattcaagaacggcaatttgctttctcgaagctcactttcggcaatacagcacagaaagacccttcggcagaacggcattagcagcgctttcgattctagcaaagtagctgtatttgaactactttaagctcaaagaaaaggtgcgatgagtcggcgaccgaataagaagctgctatctcctgccatctggaaaggcagggagctgtcaggagcgtggagcattgacggcagcatctacctttgagcaatgatatacctacttagaactggaccgtatgaaagctgggttggatcctagactggaataggctaaggcgcattacagctccagggctgctcctcatacgggagaaaggaggatatagatagcctttatccctcttgcttgaggtcatcatgcgaattgaatgtgagctgacagtaaaatagaaaggtcaatactctaagtacctagctaaccatccgcccaaccgaaagagaaaccacatggatcgattttggttgcttttgccttgtagttgtggcgcgttgtatgtggagaggaggtgccgtgattattttcattatggtacctagtggtcggtttgcacatataatgattgcatgtagtgaaggggaaagaagacacagtccttcagtgtaattctgaatctagcgtgagcctccagctttatagtataaaataaccactgcctcaaccacattcagattgcaacatactcccatctcaaattatatgtacagccaaccccacaaagccccaaccccaaacaaatatagtctatgagagaatatacaaaacatatatcacaaccttcgtcgtcctataacacacacccatcctacccatcctcgataaataggaggtaagtttatgatctcctcaaaaccaacacaatatatcctaataccctatagcctgcgataatccccagcaggatcccaacccatttgcctgttcgtccagtagcatacccgtaaccctctagcactcctgtaccgcgaatctggcactgatctgcgagaccggtgacagacatacagttgcattcgcacccgttagaagcacaggagtagattcgctcggcgaattcgttgaccatcattccctgaaagacgtaggcctgttgcaagacccagagaagaacgcatcaat

SEQ ID NO: 5706 - DNA, 7471 bp, Emericella nidulans
ttccgttgttaccgcatctgccactgaaaaccaagatctgttttggggccttcgtggtgctggtcataacttgggtattgtccttgagttcgagatcaaggcttttgacattcatgcggatccatggacatttatgaccttcgtctacgaggccgacaagatcgaagagtacttcgaagcctggaatcaactcgaggacaccattgccgaccccggcctggttatcctgaacgggtactaccgcaacttacccgaaatcaatgcggagaaggtgagccctcgttcttatttccccacgtccgatttcgcggcatacagtaacaataacccagcctgtcctcgtcatggagctcatctaccagggttacgacaccgcagcccctcagtatattgaggcctaccgtgctatcggcccaatccatgagacgactgttaccgatatctactggaacaaactctttgatatcacaacttcggtcgtaacgaccgggtctgtgtcccaagccagaattgggccggctatgtcaactccgtcgtccgctgggaccccgcgtccatgcgcgagagctatgagattttcgctgaccttgtcgccatcgaaacttacaacacctctacattcattttcgagtcatatggacggaagggtgtccgcgactttcccgacaatttcaacgctgtcccgccggaggaacggaataagcacaatatgttggctgccttcctgttctggtccggcgatgacgagaccgagctcgccgttgcccgtgagttcggagagaggctgcaaattgccagccgcaacggtgagatcgctcactcttacgtcaactacgccataggcggcgaggagcttccacaggtctacggccgcgacgttgaccgccttgagaagctccagatgatcaagaccaagtttgatccttacaacaagtttgggttttatgcgtccctcgcaagcgcctgaaggcatgagcggaatgggaatggcaaggactatctgagagggaagtgaagggagccggaatatagggttatagacctaagtttttgtcgccatcttgaacttgtcctggataaaatcacaggctttccgatgcttgaggggttttcacagtttcaagaaacgaagtaccggtactggtcacagataaactcattcgctgggtgcatggcgtggaaaacgccgcttcctctgccattaggctgcgtagtacactgtagataacgataccagctgtgagcggaaccattgaagctactttaaggaacaactagtgttggatgctgacactggtgtggtcactaagctacgggatgttggacaggtgctttacagcaatcacccacaggcaatttaattcaacggccagcctgtactctcccggaccaagtggaggctctgttttccatgcgtaaagagagtgctttctacttctgcaaatagctgtcccccttgctagccagctattttgggtttagcctaagacgcatattcagcgtaccaagatcatcgtaacgtggtattgattagaaagtcctgtaacacttccggcagctggttggacgggagctttggcagtattggaatttcatagtacgcacatcgtcaatgtatgacaagatattcattcagctctatgcacctcaagcgacaaccgcctcaagcctccaccaaattgtgaaagcgaaggttgattttgttcttatatatctcagccccgtacggactaaatcccatatgcgaagctgtcttgtgaacttcatcgaccctcgaccatcaaaaaagttattacatagtgtgccgcctgatacataaatacatactgggagccattggccaatcgtcattcgctgggcaatctgtatacaaccataataatttctcgtctctaccgaaatccccagaggctccgcaactccgaagcccggtctgaggttttccagccagtctcacactcaattcgtgccaattgcttgagaagcgcgatcttctcagaggcatacttttcggtcatatctgcggccactgaaggaaccgggcggccccaagggacctctaggtgagagccaatccacgtggactggttacgtccggatgtgtcttggaaggagctcacgtgattttctgaaaacgccgtgccagcaatataaagaggttgtaattgattgacccagttaggactgtattccgcggacctggtcagctctttccgcagagcgcaacagcgaggcacatactgtgaaatattcgaaacagagatcccgccaagttcacgagcatgccagacaggatcctgccatttcaattgggccattagctatcagatgctttcaggacacatgtggagaagaatggccttttctcgatctccatgagcgcaatagtccagatctgcttaccattacagagactggcgcgtcaactcttctcctgaggcagccagattgaagaagtaaaatagagccagcatgataaaaggtattaccacaaactgttcatacaattggtcaatggtagcatcagagcaaatagttggaacaacttactggaagatgaccgggaaaataccgcagttggaaaaggattcgtagccgtcgacggctccctgagtaggggacaagcttctttgggacgcaggcgccaccactcttgaagttcgtcccagagttttccgacggaagagtacgcaggatcgctatccctattgctaagttgggcgtccgctaggagattcacgatccgtgcaaagacgagaattgccaagttgcaataatcgtcaagcgtgccattggctgctaccaacggaatggagctattatcgacccacgagtcagtaggaatgagaagccgtttgccgctaatgaaggcggcccagacgtctattgcaaaaagaacacagaatcagacaggcgcctttgaaatagggttcggctgagggttcatcttccccacataccgattcgagcgaaggcccaaaagcaggcctttacgatgccgctacatgaaccgttccattttcgagaatgcaagagactggcgcagccctattgtaaatcccacacggtgagttgataaaataaagcgtggagacaacggatacagaccttcaggtgacgccgccactcccacacgcatgacgccatcatctcgtagacacaaagaagagtgcaagtcgccaacacggttgcgcttgcttcatccggatcctgacggagtaagagttggattgtatattgatacagctcgagtgtcagtggtcttggctggtcctggacggcatcccgttgtcgcgatgccaatgcgatagccgatgcgaggaacgatttcgaagccatcatctggtggacactgctcagtgtgaaatgcctctccgaatcagtggtctcacaccaagtcccagtctcatagagatataacgagaacaaacgggcactttcctcgcttgttatgggcatcgagggctccggcaaccatgacgcattccgagacgcagccagtcctaaagaaaacggcagcgcatatgaactaggactgtctcccagctgctgcactggtactggaccaccttgtcgcagcctgttctcaccaatatcacttatactacctgactgagtaggggatagcaaactttcaatagtgacctcgttaacaggcgaccttctggcatttgcgttcgcccggacagaatcatgtgaggcaaaattgagcgtgggttgaacatggtccgcccgggggatacccggacatgtctcattaggcagcggggactcgtcgtgtaggggatcagagccacacggtgaaagaccatcgcaaggctcccgataatacctgactacctctgcagtatcatctattatctaaaatctcactggtcagcatcgttctctcaacagtatcagagcacgcaaggcaatggcttggaggctatcagggccacataaaagggtgttccaaacgattgcgacggtaaatcagaaggatggatgataggcattctgtctctttacacaaaggcgtcgaaagagtgagggccgacttacaatgggcgcggaaggctccagcgacgacctcggatcatcattctgtatatcagtcgcgggatcttgccgtcccttctcgattgctaggagggctgccctctcgggagttgataaccggaggctacgggagggatgaaaagaggccttcaggccccactgacagatgtatccacgtgcttcaatttgcaaaccgtattcagctctggcaggtcctgcgacaatgccaccagcttcatattcggtgggctagtgagagggcatttgaggctgtttcgccgttgtcgagtcggataagtcctggcttgcatgtgttttactcgccggtcgaggccggaagggcgaacgggatagtgaggggaggtaagcgagcctatcgtaactgacctagggctctgggtgggttgcaaagctggcgcgggaatacagagtactgacgcagtcctggaagggagccgctgtgcacattactgaagaaggtgtttgatgacgagttgcgatgtgagagtcctgaggtataaacctagttctcccgtaccctgcttcagtgaccgaggttgacgtcttattgtccagaaatccttcataacacctcccattctctctaaacgcttcgcttcgacgactgcctaccagttttacgaattactaccatctctcgggaaccttgtgacatacattcagcagaagttttgtgggacagatgataaatgccaccaacgggcggcgtcgatcctatctgccgattcggtagatattaactatgatagtatatcgcatgcactgacaatgagtgggttctggtcccaggctccaggggagcaggggtggacagagacaatcggaaagcatgaaggtgggacagataaagtggagattggtcttttgggagcagagcccgcgagtgagccggaggagataaaagtcggtggattgttggctgttgttgggcaggatgaggagctgagtatgtcctgagattttcgtccaactggcagcgactaatctgtggttcaagaacctacactgttctcgttcccctcacgacatcatccgctccatgaagatgcaacgtactcggtcacgtttccgcctccaactggtttgcatcctacgatgaccatctcgatagcaccggaagcgctcaaggagcccccgcggcgtcctgacgcaacctgtgcgctgcatgcctacctcaccttgccttctaaactattcggcgataagtaccagctttcgaccacagacccgttgttcctcaagtcccataatctggcctctctccgggcagtggcaggggagacggacctcgaagctccggactggtccatatctcgctgggggtcgaactggctgcttgaactagctagcccgtctgagtcggacgaggtcgcggaagagtggaacatcacaatccctctacacctgcgatatctgcccccgtcagaatcagggtaccaacccgcatcagtaccctggcccgtggttttctgggcgtgtagcgcggaagatggcacaaaaatgggagtgaatccatttgatcgtataaacttgggatgggagggactatttggccctcgaacaatgttctaccagctacacccttcgccgagtcctgaaggtggcaacctggtagaggaattggaggtaccagttcttacactgaaggaaaacagtggtatcttcaatagtcaggtcattgagctgggcacattcgcagttatctccattggcttcttgtgggtgctgtggaagttgggcttagtggcacgctcatcgggaatccggccgcagcatcaacgcaaccccggaaagagggataaagctgaataggcggtctctagcttggtacgctgcgaatctagtgattgctcctcggcgtagcatcctaagatagacaggatagcatatgtcacgtattccagaggccaatgggcttaaacagtaaatcggaaccctgaatagcagagctaaagccgccaatcatgtggtatcatgtcggttccatatcgaattcgcgaatgctgggtagtgcaacaaggatatcgcacagccaggaggagcttgggtaatccataagagtgtgatcccattgcacagcatactccgtaatctgagtcccggcgggagcagacatggaagggttagattgcagcgcctccctaagcgtccggatatcttcctccttccgccgctgatgcatcacaatcatcagataggctgtcgtataggcctcgcgcataacctctgtatcatacgccgaggcaacctcgtgcagcgtatgcatcgaatcacgcagcatcgctagtgacgcacggttatcgatagccagcagagtgcatacaacctggaaggggacattcgcgatttggtgccacggggaattgactgcgacgagttcggagacggctttaagacctttccccgagagcgctaggacgcggtcgaggaggtctcctgagatgatggagttgagggcacgtagccggcggtagatgcagagcattaggttacattggacgaggataagatggggttggctgtagactatgttgcaaacgtccgtcagggcaatttcgaggtttgagatgtcctgtgcttcgtttggatctaggctttcggaaatggggaggaggttgaagatgtctgttgctgtttctactcctgctgagaagcttgctgtggatcttggatttgggtttgttggtcgtgggcttggggggagagaggttgcgccttgaaggacgacgcgggagcgtccgagttcgaaggatatccagacattcagatggcgggccatggcgaaaaggcgccgtcgggtttcagggtcgcaggattcgcttgttgacgccagatccagtgctgtatttgatgacggctcaatgtgcatgcctgtcgcttcaatgaggtgcatcagagagcagctggccatccaggctgcgtgcgcggtggccgtcatcctaaggtacgcgaccctcaacacccaacccgtcaccgtttcaaggggagaaaccggttcggactgcagactctgctcaaggattgaccgagcagactcgacaagttgcagttccgtcgttgtagctcgtcggcgggaaaaaagatagccaaaggcagcaacgccgcagagtacggcgtcgtaaggatcaaagcccggaggctcggacgtggccggcagccatcgcctacttatttggcgcagtagagtatcctgatcgataaaagggtagcagggatccaccctctcaaagaagatgccagccaaagatcgcatctcatcctgggagatgatctcgaccactgcccgtggctgaacagatgccatgtgccgcccattctggagtaggaaaacgggctccaacattccagccaaaaaggtgcaattttggagtcccgccacatcgttctttggattgaggcgccgcgcaaa

SEQ ID NO: 5707 - DNA, 7515 bp, Emericella nidulans
tatccagcccgaccttcctaacacattggcttccagttatgggggaaagctgcaacgctttgagcgccagatccaccactacggctccggtctcaacgccctgcccttgctgtcccatttccgcgacaatcctcaggatacgtatcttcttcacgtaggctacggcgggatgaacggtccgctctctaacatcgacattgacgggttcgcctctgcctcgttccactcttggccggatacgctggcgtgggatgggtacagtggcgactatggtcccaacttcctgggcctcgcactcggctcggcagtgtacctggttgaggacatgaaactgggcttagttgcctacggaggtaatttcaacagaacgtctggaagtactgccgttgtcgcaactcgggatgcagcgaagcaccgtatcttcattggcccgatttcggtctacatcaccattgatgcgggtgcgatcgaaaagtttgagtacaacactgaacagcgtactgtctccttgacaattgccactaagtctagttcggctcctgcgacttcagcggacgctgaggcggttgttatctggatagacaatttaagcggcttaggaggctatgagcttgtcggcgagtatacgcacgagcgcggaggaacgaaggtgtcattcggcaagcagagcgaggtcacagtcgtggttaggcctggatgagctttccaagcatagacagaaatgagagcatatattaagctatagaatactaagcagacagtaaccctagcccgttacacccatgccctaccgttttccctttgaaatcttgaataacccaaaccgtttcagtttctggataagcccaataggaattctatcgactgacccttttggtgtgatctccgttgtctatctcccaggtcctgaatggcctgacctgggacaagtattatgaggttgggtctgccatccaaggaggcaggagtatggtaggagtgaacttggtcctccaatcgctctcattatctagtcctctaactccagccgttacatccttttgcctagcatgaatggaatttgcagaattttgctctgaaaagagggccccggtttgagtaggccagaatctcccttgcatcggtgctcaggatgctgcgtagacaactcagacttagtatcgttcttcatagttctgctgtaatggtgctgatcgatgatcccctcgacagttgaagtcatgatgctctagccagtaaaccgctagcgtgtgggaacggctgagtctagtataaagtccgtactctgggaatgtatgcagtcgtcaccagtttagagaacaaaaggcttcagttcatctccaccccacccgttcctgttaagctgtttgagcacatagaaaaccgggagcaaacactatgattatcttcagcccatcgaagtaccgtgggcacctcaaccaagcactttttcgatccacctcactccttttctctcctacagtcaccaaactgctaagcatccaaaattgaagtacagagattcagtgcacaaagacaattgaaccgcccttgccctttccctttaagcccatgccctcctgcgccgagttgtaactgaccccatagacaatcagcccatgctcattcagcagcaagatcgtatccccatcctcagagagcgtatagtctcccagctcaaaatgctggggagccattggcctcagtgctattcctctcggcagggtatgcacacagcccgaacgattccgtatcgtccagtcgcccagtctgacagctcggttcgtgtggtttgagagcgtgacggtgagtgatatcgatttacgccggccaatgcaaggtcgggctccggtctccgactcgtccgtcacagcgtctgcgtctgtacctgacgagtccagatggagtctcgcctcgcggattacaaccccctcttcgatgatatccgggcggagaatgtcactccagcctacgcctgaaattgcatgccccgatgagggattggtatgcacagcctggctcgcaaaggccaggaagatacctagccactcgccccgcggccggtcgctcaacacaaccggtatcagaatccggacgcgcacatggaaagtggaagatgagcccgccatcctgaaagacgccgtcgtcggcgcggaatttgcgcgcattgccctggttcatgtggatgttgtggatcaccggggccgagccgcgagtgtcactgcgagattcagaaccgaacaggtaaaggttcgctttctcgcggacggcatgttggatatacggcgacaggacatctatgatatcggtgtattggccaggaatatcgtggggcagaagtcgaccgttagtgcttgtgaagaggctgtcgcggatatagtcgagacccagagtcttattgttctcgacggggtgaaagccatattccagctgcgagagtcggttgacaatcgggttctggccgatctggtggttgacccagtatgccagccgggaatcgtccaggtcaccggacgtgatgttgatggctgctcggtgtaccggtaggcctgcacgtgcctcctgcaaatggctgggatggacacacccgttcaactgcgaggtcggtgagcccgtgtcccggacgtacagggagagctgcggcgctctgggactctgctggccgtcttcgagtttgtaggtgatagcacggcatttcaagaccccgtagttgtcaactggcatttctttgatacagaacgcaaagagagcggagcagcagagctattctagaactcatgcatggttgcgggaaaagatgagctgaagggctagatcaatatatatcgtcgtcaataactcgtcctgagagggaggtcccgttcctagaccagagtctagacccggcgattgcccggcagtggtcaattataacatcaaggaggaagactagatttggctttctagtgtttgcgtacttgattaccacacgagccccgatgcgtgagtattgaataaccgaaagtagccgccagaccggccttagatctcacccacatcaaagattctgcaaacagcgattagatgaagatacatccttgcttcattcatctggccagaccaagtccttccaagcagatgactctcggtcttctccgcggcaaaccaagccaatcacccgtactaagtgagatcaacccgtctggattgcggaagaattaatgcagctggctgccaaagtttggagatataatggtagacccggattccgtgtcctcgaaccagcgttgcggtacaatgccatgcgccagatggaccgcagttagaatccagacaaagccattggcttatccagtcatgccatccttgggttggcggttgtcagtaacgtcggtagggctgtatgagtctcatggctatatcctttggcgacgcggtacaggatcgtgcttctttcaagatgaaatcataatttcaggccagagcatcgaatgtaaatcaacagccgtaaccagtaccgcgcattggctgattcactctgtgcatcactgggacctgcgagacacgatgcggtcaccactttagcttggaaaatcacttacaatgtgacaaattattcgcagatctggcctgttgtaatcttgaggtccagtctgaaaagtcctaatcagccctctggcagagtttctgctgctagagctacatctcgccctggaactttcataggagtggttgaaagtcccttggtggcaggtctatatcccgactcacatgtgcaatacgcatgacgtaacgtattttgaggtaagatactcgtgtgttggacctggtaccgtctaccatggatagcacgcgcatacagatgctggcatagtgtcccgatgactatgtcccgatgactatgtcccgatggttatttcaagatctattgttgcagggctcttctagggcaactagcagcagtgacctgtgtggatactgcagcactcttatgagattagcctaggggagccctgcaacaagccaaagctacaatatccaatcatcgtctacgatcatccatcaatataccatcaaatacaccaaatcaaccactcgttcatccttgaccctgttaccttcggtccctgtcagttagttaggcagacagtacaaccattaacgtcatcgcgcgcgattactgatacggaaatacaaggccacgtgatctctggtggcttgactatacattgtgtagttctaaaaaggttctcacgtaccatatgtatacaaatttgacccccatatatccactatttatcaaaccccacgaaatttcgcgcgagatcttgaccgcccccaggatatcccatgtatctgacccgtcccaccagcgtcaataccaattcaaataattgagttgcactttcaaacactaggtgccagcgggaagatgacccgcaccggatcattaaagaatccgcataggatattattagctgctgttgataaaatgagggcatctgctcttcgggaagacccactttatccatcatataaaaaacgagcagtgaagagaaatacccgaacacgccggaactttagtcaaccagaccggcgacatgaccgccttttttcagacacaatacgaacatcccacagatgcagcctcttgcgatactggtttggttgttgggaggtgataagagataaacgcgaggtcaatgatccacaggcgcactatggtattatcgcatcggggaatgttcttatcaagcatggtgagacacgggagcagctccagaaggaaacaggcgcactgtccattgagatggaagccgcggggttgatgcaagacttcccttgtattgtgatccggggtatttgtgactacgccgattcacataaaaacaagcagtggcagggatatgccgcattggtggctgcttcctatgcaaaggagctgcttagttgcatccctcgcggtcaggtcttacaggagaagctggcggctgacatctgtaagtgaattctgaaataaggttcatgactatattgttgagtatgaagaaaattgtgtctgattttttttactactttttgcagcgacaatcaattagcaggttgaaaatctgaatagaaccgctgatagtatcagccagaagattgatcttaggcatctaagggaatgcaaaaagaattcttacaacccttgtacaacggctgctaaacagctctcctcagctggccaaggatgcccagaaagccattcaggctgattatatcatttccggaaaggcattgcgagagcattcagcgcactgctcctcagccgctacttaatatcgactacaaaatgctcacaactgcgctgaccgtgatcgatacgtaagatgaagatgagtcagaaggaagaaagatatgagacaatagtcattctccaggtcttaacccgcgtcttcgaacccaccgtctacgtcttctagcggatggttagcttcttttgaagtattaatatgcagaattagaggggccttgttttctttctagcctgattaccctgctccgccatttccatctaaagactcttattcttgatctctgggttcttcgtaaggatattctgggtaccttctgtttttggtctgttgggaagtccggcttctcgctgttatagcagtcttggtaagtgaagcacaactgattgggggactcaagagatggtgtagaaggcttcgcaggtgcggattttgcagcttgctcgacgatcgggaaaaggtcagagataagaggtgtctttagctgccaagataggtggagaaggtgttcaggctgatccaaggtctgaacctcattgtcaatctctttcataatttctgttgctcgtggattactgtttggcacatggatagaggttatcgacggcctcgtccctctctcagcattccctagcgccgacaccatactaactcgtgtattgccgttaaaattctgtggactcaataatccggcagttagacgtacctttctgcgtcttctaggtgtgttcagcaggttgctagtcccctttggggaatggacggattttttcaatccatgcatatcatcgtatctttgcttcaataatttatccattcatcccattcctttggcgtggctcgctctctgctgctggcataatctgaccatgtaaacctgtactcttggtactttcgagctctaagacgcgccgctctcttgtttctggctcaggcggagttactccattttggaaatgaatgagataggcataaatgtaattcaagcttgttgcgtactcaattttctccgtcactcctgccacgtggttcagactcggaccaacactcagcgcacctgaaacgccagaagcagcctccgcttcagtatcagcgtcaaaactgatctccacagattaatgggctatgtctgcgccactgccatgcctcgccatcctgaggctggtaatgatgtgcagggtacctaaaaagttcttctcgagaacaaattctcgaacaactggtataccaagaacttcatcaaggtatgctttttgttggcatcataaaatatgtctccaggcgttgcaagctgaaattattcgtgcttatttgtgcgttatacattattggtgtagacgcttcacaacctcagagggaaaagtagggtttcaaaaaacctcacgtttccaaacagggaacagcatattgtggtgaagtagtgtgatgaagtatcctttcaatacatacttgggcttgttcagtttggtcgtccgcagtcgctttcacagcagtgcagatcaggcctcaactggcagtgggtcttctacttcggcagactgttcaccgtcggtgattgtcaggcccactggacgcggttactgggaggatagtgtctatttaagtacccaaccccaaacggcgcatgtactctggacaatgtagaaagataaagccttggataccggcagcagctacagctgtaaattaaataagaatatcatggttcaaaggtttgcacttcccagccagacctgttttactccctcccatccctcctgacctcatacatggttgtcacctggattccccctttcctaccattttcctcgtcctcaaagctactcccatcgtagcggctagcactcgccagtgctgcaccacgattgttcgcctcccgcaacatcccatactcatcgctgtcccgccccgccttcgagacggtgccagattcaagctgggtgtgttttgatcgacccagcgcggacataccgaagctcgcccccttactcttcgaatagttcccaagccccgaagagggatctttcgaagaggagcgcagccacacggaagagctgaagagcggtttgatgcaaggggcgttgacggcgatgatggcgacgaactaagtctcggtcagcatggtcctctttcttcaatcaggaataaggtttgtcgggctgcaagagcgtactgtttcacgaatggcccacaccgcgctgctgttgatactgttgatgtctctgagggaaaggatgca

SEQ ID NO: 5708 - DNA, 8081 bp, Emericella nidulans
tatatcattgagacaatataagcctattgatatctcgccctccttcaggagcaggaagaagatgcagtgaactccttagcgaagacttcagcgatccaggacgctataaggatatacagaatgctgttcttactacttggttaatatccttcaaccaggttcagcaccagaaccaagcggcagcggactacctatctttcatggcctgtatcaatccgcggaacatccctcggtcccttcttccatcacaatcgacgaagaaacagacagttgacgccttggggcttttgaatgcatactcattcaccaacaatcaagacactgatataagtatgcaccgactggtgcatattgctacccggaactggttgaagaagaatgagttgcttagctactggatccagaaagtggctgatcgaattcaagaggcatttcctgatgataactatactaatcgagcgctctggcggaaatacccccctcatgttcaagcccttatgcaagaagatgagtttatcaagcagcagaagcagcataccaaccctattcaaaatactgcaaattgccttgctagcgatggaagatactttgaagccaaagctctatataagctgctgttggaaatgtatcaggaggaacatgggcctgagcattcctcaactctgacgagtatggctaacctggcatccacctattggaaccagggacgatgggatgaagttgaaaagctgggggtcctagtaatggagacctcgaagatagtgctaggagcagagcaccctgatacactgacgagcatggccaacctggcatccacctggaaatctcaaagcaggattacagatgccctaacactgattgacgtgtgttgcaagctgcgcaacaaagtcctagggccagatcatcctgatacaagacactctgctgatgtatttgatgcttggaagtacgaaattgatttgatctacagaaagcttccgtgcccatcatctcagatagaacaatctgaccattggcagaaggttcttcggacaaacctgcagctatcatagctcgtccatcccgtcaaggacatgacgattagcctcatattgaacggcgattagcgacacggctcgtcctcggagatcattcctcattatagcttttagagcgtcctcatataatccaggaggccaagactcgcaagacgtcgattaacacggctatggcgcatcatccctcatacctagtctcagtggctacatgtttcagaacatgatttttggatcttcaataaagatatagttacatagtactatttgtatagtgaccctccaaacaggccgcatactgagactacggattgtgacaatttctgaccacgttcatcgcaaagtcaacatcaggggaacgagggacagcaactgttcagtgtgcttagacaaacctccatcactctgtcaagcatgtctcttcgcagcacagcacggactgcctgggcagtgcgttggcgtggcaggaaatatggtaacgctaccttaagaagatttttttgctatgattctaccaaactagtgagtcccatcaatcgggcaggatggccgagcggttaaggcgttagattagaaatctaatcccttcggggtccagagttcgaatctctgtcctgtcgattttttaacgtgaaatccttttatcctcagatttatatctgaagactatcgccgtagctgggcacagaaatcctgaggtgaggtcgtacgcattttgggaatcgctttctagtcaaggtcgttgattatttgagctccagcatgttttccatcaaccatatctgaatagctgctctaataagccgcctttaaattgttgcagtgcaggtcgtcagtttcgccagaatagatagactgagattgaggaaatcttggttagacggagataatccgctgtaatccttaattgctactcccatcaggtcaggatgtagggttaagctcctggagcgacataggtagtatatagtctgcacctggattcttgtacctgcagaagtcccaataaagaattaagctgctcatattatatgctcagcggagctaggacgcccctattattccccccccctgaaactaagtcctagtaagctgttcgattgatcctttggtgaaaacttcatccatttcacgaattcagcttcatttttcacctttcctctccaccatcatattcacctcaggaagtatctcaatcttcttgatctctataattccccatttcatctgccttccagctttattatgttccagtgctctcatgcatacgctttctctcgttcgaaggctcccctcaatgcctcattagcttcacggcactcgctgcatcttatcagacctcgtacttgtcaccatgaatgaccaccctggacttggcaaatctgttttcgagcagattaagcatcacctagcccggaatgtcgtagacagctgtattggcccaggttaactgcaatggctgttggcaaaagccataggaggcagcagttagatgagaactaaagatgcctggcattgagacagtgtgaattctaactccccaagcgactccacttttatggactggtatagatttaacttgcagtgcgtgtgttctaactagcgtctctagattgcttccacgcccaccttattcaccttaggtatcgatactctttctgctacggcttagctatcatgacgcagaccttgatatcctcgtcacgcttcttgtgctgatgattccagcgcatcaaatgtctgtgaattgagttgaatccgatgcaatatctttctggatggtcgtcttcagtctcagtctggcgtgctcttcgtggacggtaagcacctactcccggcgttaagcctcctctgacataaacccgctttatctccatcctcatatataaaaacaccgtggatatcccaagacccaaatacactgaactgatacaccctacacgtatcagctgcgagatggcaacatatctcatcaccggcgcgtcgcgcggccttggcctagagcttgcggcccagctggccgcatcgcccccgtccgaagtcagccttgtattcgccaccgcgcgagatatcagcgccagcggtctaataggcctggcgaaaaagttctcagaaagaatcgttcccgttcagctggaccccagcgacccggagagtttacgcgccgcggttgcactagtcgacaaccatcttcgaagtagagggctggacgtgctcatcaacaattccggggtgcaacctatcactcctggaaaaattgagatggcgtatgtgtatttcccttgtgtccacgggcgggctgcttgttgacatgcatttaatgccagtgacgatctcaccgaggtgttccatacgaatgtcactttgacccatttcgtcactcgagccttcctccctttgttaagacaggggaatcgtaaggttatcacaaatatgtaaggccttggtgccatgggccggtacgcagctgactgtttcctcctatgtccagttcgagcaccctaggatcaatctccctcagctcccagttctcagggagtccagcccacgcatacaagatatccaaggccgcgatgaatatgatgacagtgcagtacgcccttcagtacgcagacgaggggttcaccgtgtttgcggtcagtcctggtgtaagccctcaccccttttccagacttcggcgagcctcagaaacactaacagcatcaactaagtggcttcgcacagatatgggtggccagtgcgccgacctccctgtcgaaacaggcgcagagcaagttctgaagtgcgtgaataatgttggaaaagaactcaacgggcgctttctgaatatccacgttcctggctgggagaatgcaccaggtccaaatcagtacccgggaggtgatgcgccttggtagtttggaggtagagatttagtgttggcttgtggtcagtatcaaatacaaattgaacattgtgggtttatagccttagcttggtcgaagctatgccttccctacaaagagtacctattcctacttcttctgacacttgttttcattatattaggctttgttgagtactatagtagacctccgccgtctggctccacagcgatttcaccctagccaactcccgcggctgctggataatggctcttgaagttaagcttgcataccctagaggcgcatcggttgcagtgacgcatttacgagtgcatcccttgacaggtaatggtatgtctacggatcaaaatcatagaggcatgctagacactccctagcccatcccatgtgggaacaacgtctactgattgggcacatgtggtgacatacttttgcctgttaacctatatcctgcctgggttagataaactggctataggcaatgaaggcgtgtcatcggtttctagattatctaccgagagagctactgaaagcttgcaagacatgctaccctttgccggagtcttttttcaagtgtaaggtgcgatccgtgcttgctgtcatcaagaccgacaccgtatatgcctgatgaaattaacaacaatgatcttatatcaaaccaacaccttttcttgacagcaggattcgctgaggtcatccttgcaccgctcagcttcggggacgggatatcggagcttttctctcgagttctctgtaagcaggatccgttatgccccgtgaatgggaaatactacaggagaatatctcgagtaagtgctcgtctgggccgtcttaaacgcctggtaagcattcggcggagtcagccgccgctagtcgtgggccaagcctcgtgtaagggccagagaggatacagagacgagacgccaagtacacgccaaaggaagggtcaccgtgctcttataggttggtttggccaagttcgtcgcaaggactgacgtatcgatttgcattgggctgccggtgcttggagctgacgggatgtacaatattcgcacatctaccagccttgtgaggactacgattggctctgtccggtgacagccgtctctcattgaagaggaaactgttttacctcactcaggccagatggtgatgccagattctgcgatgagctggagaagacataaggtgcatgtactcccggctgaccctggtagcataacttgtttcctttggcaccatactttttgatattgagatcaatccaaatgctcattccttacagcatgtcgacaacaaatgtaagcattattggtgctggtctctctggcctagcccttgccctcgcccttcagcaacaatctaacgtatgcacgctttatgaagcccgccctgcaaccctcgatattgggggcgcactcatgctcacccctcaagcgctgcgtatcctcgactctataggcatctacgcccgcctcaaggacaacggctatagcttcgacagctctacttcactcccacgaccgcaatccgtcgtcagctacgagttcggcggggaggcaaagtacggatacccagctctacgcatctaccgcagaattcttaccagggaactctcggccctcgttgaagagacagggatcccaatcgtgtacaacaagtaaattcacccgcgtgctcgaagaaacaccatatgatgtgatattcgagtttgaggacgagactaccgcaacagcgaccatccttgtcggtgcagatggtattcactccaatgtccgcaagtacttgtacccggacctctaacctattttcacgaaggcgattggcatcaacgctgccatcccgacctcccaactcaaattgcccgagcggtacgaccttcccgtgactatcaggaccatggggcattcatcatcaccccgcagcagccagacaggagcgaggtgttcatcgggcggcagaagcgcgcacctgaactggaccgggaaggctgggctgggatcatgctgtgccagatcctgctcgttatccgcacatcgtatcggggagaagattgccgttttcatggccctcggcgctgtgggcttccagctcctcacctagcttgttccgagcattatcgaggaagcggttgcagtagccatactgggtgtgttgcttggaccagtcttcccgtgttcaacagcggtgtttgtgaagctgttgccaagaaggatctagcttcagagtttgagctttgtcgcggccctggggagcagtgcaggagcggcctttccgtttatgacgggcattctggcgcagagagttgggacgatggtgctgcatcctatctgtctaggactgtatgcggccatgggcgtgagctggtggtcttagcctaggataccgaagcggtcggagtaggggatagcgcatatggatgataccaggcacccaaaagttgtcttgaacgtggtcagcggcagaatatctttcttgacgctggactacttcgccaacaggcatactgtatatcatggcggcttcccacttgaattcttcatagatgcaacacctgggcgaggtattttagcggcgaaacacaggtagaattcacacgataaaacgccagtagagagccgatgaagcgcaggataatgggtcaaagccagccctgaaaaactattaccactgtattgcacattctgacctgaagccacagataatccgacgcctccgcctggaatacgagccgtgggcccaagtagtggcccaattactgtcttgaaggacgctagttcgtgtaagaaaacaatggatacgataatactacctcaagagtaataggtaggcctaggcgatcttccaaaatgaaaatattatccttgtaaatatgaacaatgcagatcgaccgtgatgttctaggccatggtatgcagacagttcaagtgccctactttgctcttcgaagaggttgcaatctacccgtggacatctatctaaaccagacaacatcaaagatcataagtgccagaatcttttaaaaagcgaaaaagcctatagctcgtcgtcgtctactgccggtctagctcgttcgcgagaggcactgcattgttggagcaagccgacaacctaccgtcgggacccggtacgcaagccatctcgtggcgtgataaatatgtatatattacatataatatatacagacaaggcatttcagacgtggccaacccgtcaagcggggtaattctaaccaggctgggtttagacctgcgttcggatgccatcaatgagtcaatcttcgactctacgtctttgatagactctgctcataaactaacaactggctttcctcaccaagaacgttgccccagcatctaaccctgagcacatctaaatttcgacctcgtcgcccattgcccttcagcaacccatcaccatgtccacgccttcagcctcccaaaaccccgtcgacgccccaccacacgttctggaacttctcttcaagcttcacaaaaagtctctcgagcaggaagctgccattgcccagtccaaggaaggcaagatattctccgccagcgtcatcaaggacctgggagacaaccgccccaaggaagacacaattgccgagttcgacaagttgatgctggacaagtttatcgccctcgacgaagacaagtgccagttcacctaccagttgattaccgccatgggggccacaaacgtcgttgaggcgggcactagcttcggtgtcagcacgatctacctagcgcttgcggtcgcaaagaccaaggcggcgatgggcaagccaggcgtggtcattgcgaccgagaaggagaagcaaaaggctcaaattgcgagggattactggaggcagtgcggcgacgaagtcgagagccagatagatcttcgagagggggacctgctggagacattgaaggagaatctgcccgaggtggatttgctcttgttggacagtgagtgccctcagcctttttgatactgatcttttttggggtagtcctttttggaataaacctaaccatccgtcatagtctggtcgaagctcgctctgccaactctgaagacagtccagcctcgtctccggcatggcgccgtagtcctggctgacaacaccatctctggcgccgagggaaaagccgaccttcttgcctacctcaga

SEQ ID NO: 5709 - DNA, 9441 bp, Emericella nidulans
aacttaccgcacaagacgtgaggctggatggctgccatatcttattgcaagaagcgtttaaccgctaactagacccagaattctcgcgttaggtggaagattgacctcgttgttcttccgatatttcttgtgacgcaagctttgcagttcatggataagacggccctgaactatgcaaaccttttcggataccagcagaccctcggccttcatggtcagcagttcaattacctctctgcaagtgagtataccaaggtcattcccctcagagactacgagcaccgacgacgaacgttgaccaatcggtagtggtttatgctggctactttttcgggcaatatccttgcggttggctcgtgggccgattcccagcacaacgtgttctggggttgagttgtctcctatgggggttgaccgtcattatcatgactcaatgtcggaccttctcaagtgctcttgcagttcgcttcatcatgggcctgttcgaggccgctgtcacccccggactcacattgatgaccggtttctggtacacccgccaggagatccctctgcgccaatgcatctggtactctgctttgggatggggtggcatcatcggctcatatatctccttcgggatcagcaagctgcccatggacttttcgcccccgcggtgggagctgttgttctatatcctcggggctgcgacctgtctctgggctgcagtcatcttctttatcctgcccgactccccttccaccgcgttcttcctgaccaagtcggaacgcattattgcagtcaaacgagtggccgctaaccaacgggtattaagaacaaatcatttgacacacgccagggctggtcgccctgacggatcccaaagctatactgatctttatatcggtatttgccgccgctattccaaacggcgttgtgaattccttctcgacgatcatcatccaagacatgggattctccactacgaagaccactcaactgaagtctgtcggagatgcagtacttatcgtggcgttggtgatcggaggtactataacgttgactgtcccaaacagtagactgctcacatcaactgctgcaaatatcttgtgcactgtggcggctgcgtgcatggcctatctccctcgagagaaaacatgggctagactggcttgtttctggctggttaatacacagtcggtagggttcacgatctccctggtcacaatctcatccaatatggccggctatacccatagagctatggcgaatgcattggtgttgtaggtctacttatttttgttcatatcatgtttgatatctttagatccgctgctaatgattggtagtaccgccttattggctgggcgtagattttcgctggtgcctttatgtcgctgaaagccatccgaggcgcctgaatacaagggggccaccatcggtcttctcgccgggtatgcgatcaaagcaggctgccacctaggattgttcagtaagttgatcgacttgacggcgtcattcgcattaccttgctaatataacatgtgtagcctacatgtttttggtcaatcgccatcgcgattcccactacggcccagccgacagggctcgcagtgacgaagcggggatgcaggatcgcacggagtttgagaataaggatttccgctatgtgctatgaattctggaagacgtagaatacggatagtacaatttattctcattagcgacgagatccgtgctccagtattaggggatagagaatatagtagcaccagtcggtgaattcgagtcggtactttgggatgctacaggaagcaaactcttgccactgtatagtatttctttaaagctctaaagttatggagatcgaagttagtgcttaaatgcttgatatcatggagattccccgcataactttctagtattagcttctctccacatcacggggaccggttcgacatctttcaatgctcctcgtggagaatgatatcccatagacaatcaccatggcccgtcgtcaaaaagtggtctgctcatcttgtcgccatcgcaagacgaaatgcgatggggcctcccccagctgctcggcttgtgtagccagtgcctctccttgtcagtatgaaaaagcgccatcactagcatacgtccgttctttacaggcgcgtattcgcgaactggaagccaaagtgaaagactcagattcttctccttctgctgtcgtgctgagctcagtattcaatggacacgacggagactctatatctttccacgcagagggaaatttgagctaccacaaccaaacatctgctattcatgaaggtccaccgtatacatctcgtcagctgccgcaggctgcgccccaatcaccagcatccagagcaacccagcaatctactgatagtatcagacatagccttgttgccaatgctgtggctcagaaaaacctcgagctcctgaacgccagcgcaatatcgccgcaggctgacgtacccccggaagtgactgccatactgctccaattacattggtgctggcttcatccaagcttcctgtttgtgtaccgaccggcgtttacgagggatatgctccaatccgctcatcatgggcagaaacccaagtactggtctgcgactctcttcaaggtcctgtgcgctcacagctgtcgattcatccgggccccggaggcattttggagcccagaagactacacagagtcgttttcccagttcagtaaccgcctcatgtcagaggccaaggcgctactcgccctggagaccctcaatcccccttcagtccccaccatccaagcgttgttgcaacagtctgcgcgggatatagcctgcgggcgttcttcagcagcatggctctactctggcatggcgtttcgcatggccattgatctaggactgcacgtttcccccgacgatctacaacgccactcgacctcgctgtcggcggaagatgtcgagattcgaaaacgtttgttctggagcctatatgcctgggacaaacacatcagcctgtacctgggcagaatgcccaatttcaccatgggtgccgaaaacgtttcgcttgagttccttgatgactttaccgaagaggacctgtgggagccatattacgggcctgaaccggcgtctgccgaacgccgatcttatcccccaaccccagggcatatcgtttcttgcttcacgcaactatgcaaactgtgcatcctcatatcgcgggtgatgttggacctctacagtccgcaaccaaccagccacccaagctcatcattagacgcccgggcggcggcattcgtgacgatcaatcgggaccttcatgaatggtacaaagccctaccatcttttctacagataccctccgacaaaatcccggagatcagtcccccgccgcacatcacatctctcaatctaatgtatcatactacgctgattcttcttcatcgtccctatgtcgttagcggacatgcgcgcgactccgacgcggcacgaaagagttggaaagtttgtcgctcctcaacaactactatctaccatctgcttcaaatgtatacgaaaactttcggattccaacacatcacatatatgaacagttattgtacatacacggcggcgacaacggcagtgtatcagctggaaacttcagatggagaacctcgcgtttccgatcaagtcgtgtggacggagcttaaattcttgctggatattcttcaacgcacgtctactaccatgccgggtctaaatcggagcattgacatcattcggtcccgaataaagaaaattctggaccgacaagtgaccaagcaacttgattcactctttccaggcagcaatgcgccggcgggtggccaacgctacgcttcacccgggccgttcagaacacaaactgttgtaggtggcgaagacctgacgacggatcatgcgctagaccctacattcccacatccatcttccagcttctcaccgcgacgggaccttctgactgaagactggcggatcctggacgattggcttccagcatttcccggacaagatgtctcttttgggtctgaagtcgtactggatatgcccgagaacctgagtccaaggacgcgatctgcactcatgggctcgaatttgtatcctcacatgcagcttaatttctcgatgcccgatgatccaacttttgactacactcctttctcagggacatcatccggtccttggccttgtgatcatcacagcctttgaccttctctagagtatgcttgtatttgaatcatgtcatctgttaaatgtgctttgaatctagctaagcaatagaaatgaggatccagctgttgtttgacagtgttacctattcatatattgggcttgcgctggtcatctgacttttattctgttcttgccggccacttgatatacgattacgaataaatatcaagtgctaaaaaaaataaaaataaaaataaataatgttaaatgaaaatgagaagaggttaatttttatatagaaccggagttatcgtctgttgtatatactgttcaggtagcccataatgggttcccatcgccacctagagccctcactcgtcttgagttcaatctagcctagcatataccggagagagcagtgtattgataaataaagtcaccaagcagggcaagcttgcaaagcagtcaccaaagtctaagctaccatctttctatatactatcaagaaatatcgacacaaaaaggtcaacgcaaagctcaacgcaaatcaaacctcagtacctcagctcacacttcccgcatccacactatgcatgtgtccttcaagcaatggtgacagtcgagttcagaacctcaaagagcggttcattcgacgcctagtaaacagatcagcactcatccacttcctcttctcgacaaagcggttcctatattagatggagggggaacataccccaaccagagccgcgtgcgcaacggcaacgaccgcctttccctttggagtagacgcggggatcgtcaccgtgaagttctcgtacggcgagggatagtcctcgtggaactgcgggttaaaatcaccatggtagagttgagcagtaccgagcatctcgtcggcagggatgcagttgcccttggggcaggtctgcaggccgattgcgaccgcgagctcggtagatcccgtaagggagttctgcacacgggttaatatggtataatataccagagagccaggaattgacgtacaacccgagtgacttggacaataatgtcgctgccggctgtcagattggtacccccagggaggttcaagccggcattctgcgcaagggctgtggcagcaagagtgaggagggcgaagatcttcattttgtctttttactattgatacaccgagcaggagagttgttgattcgaattaattgtagattgagatgttgctgtgatgcactatacgacttgtcagagcggccagacccttttatatcctgtactctaggttgtacatattagacatcagggcacccgcttaccactgtgtagagaatacgagtgaaacaaatgatctcagcgccaaaaacaaggctgtctgattagccgctgaccatccccacaacaatgggtgctctgacaaccaagtctaaaggagaagtaggtgtgccgatcgcacatcatgctgtgctggggctgatggagtattcgccgggggatgcacggggtgagacatgtctatgacaggctgccagtcagtcacctcagcagccagatcaggcctcagtctcacccccaagactcgtcaacatgacaggaacaaggccaccgaaattcgccttccgagctgtcagtataaatagaaatagaagggaagagctgttgacccacctgtattttagtgccgggctgctcctttatatctgtcactcggcgctgcttgttctttcttagcttaatcggtctcacctcggcccttagctttcgggggtttatttggagagggaggcctgaatcaggacgagaatcacatgagcgcgctctccgagaataactcaggccccgagtgaaggagttggccttagagttgacctatcatggaattcgccctcaggtcggtgttgatatctccctttgacgacaccccgtttgccctaatctcgcactttatacctcttgttcaagtatctagaagcacagaatataatcagcctcacaaatcatagatactactaacgttaataccctggtcctaaaaataactatgccgccgtcaattggcctgcagttacagacaggcagccgcttaatgctactggtagcatacgtaggtggtgactgtgggttgctttctctgttcaaggctattctggagctctctataggccgattttcacctccacattttccggtgaggctgtaggctcctgtaagaaggcttattttagctacctagcttgtaagcacacccccagccccagcaggagatcagaaggcatgcgcccttgtctacagattggacgctacaaaagatcataaacgtagtaatattaataagaataagaaatataatagaattcaccattcattataagatggagacaacttagtaggataatttggaccagcactgagaatatttctcgcaactgtataccctacagtgctgaccctgagtcgacgctcgtttgggtgagatataaccatgaatcatgtaactggaacagcaaggctcgtcatgacacccttcagttctgccaggacccgcgcacctaagcactacgcgtgctgctgttgtagcactctcgcttatcgagcaacctttaattcccttgggggatctgtgaaacatcgcaaggacctgcatgagctgaatttgtcatataccgctggacgtggtacctggccagggctatgcctccagcagcacgcctgaaactagaactatacgtcagcagctgatagaatctatgactgcggtatcattcatccagccgaatggaatagttctcttacactctttttaggctcttttcaggctcttttgcttagactagcactcatcacattaggcgaacttctggttcgttttcaagcatatttccagtcacgcattatcaagtctcaatctctgtaactccgtatatgctagagctgccaagcgccgacttcggaagctgctgcttcttgtattgaccctgacctgggactggcaccacgcgctttctcagcatgtcaaggtaccatcgccaaactcttttagctattacacccttttcttaagcggtcccaactagcctgtgcaaagtacgctcagggccaggaacgataactcgaatagagtactcggcttgaagcagctcagtcgtcggacatacagtcctatgaaaattgccactaacctcgccctccctcgcgatcgtccccagagacaattcacttctccctcttacaaagaaccccaaagctcaaggcggagactgtctttgcgagcactgtccttgtatcttcgccttcctcccgtacagcctccctcccatccctcccgagataaactctaacatttgccggcaaataacgcccaggatgccatacattccatagcaccatgttgagcagcatgagtgttgcttcgaagacgtagaagaaccactcatagcgcaggacgggggtcaacgacttcagcacttccatatcgttaatatccactgttgtatgccccgtatgttcgattaggcggtagatacaccggatgaaaatgagcgacatgctcatgtagagcgtgtaaaggggcaatatggccttcctggtgggaatcacttctttggtgagccgccagtggaatattcccgcgaggacgacaaaggatagaatcaccgcaagctgcatcgcgagcgcagcaatggtcagatgactcccaatattctgttgactcgttgacgaagacgggttcgacgagagcgagacaccgagggcgttcagtagctctatcagggccatcaacgcgccgaaagtggacgtcactcggttggggggtaggggagttagatggggtacatagtggaatatccggccgagaacgtggtagttggcgagttcaagcagtggcctaggtaagtcagtgagtggattggtccgggtgatagtaacccaggagtaatctacgaacggacaaacatagatgaacacctggctcaaataaaagcaatcaaaactgtcgagttttcctcatcatatagatagtggtacgctccgtattcccgcaacgcgtagccgagtgcaaacagcacgccgcaaagggggtagagaccgagcagccgccaggaccggtatcgactgaagagtgtcactgcagtcaggagatggccaatgggctcgaaggtaaagtgtacgtactggcactgccaaatatgcgctgcggcagaggccacataggcgatggtgaagaagaccggcgctcctttgtttggggagtagacgtagagactccagagaactgcatacagcgtgagacagaaaccatgatagggagcgtgaagtacgtactaggctccccgttggccatctcgcacttcagccgggagtagagagagtacaagaggtatgggggtcgtggacatctcgagggaagggtagaggcgctgtggattatatagctatgccgcaagcgcttggacaatagcacgtccttttctttagagggcaatttcgttcagcctggatattctagacaatacccaggactcggtgagaaagcgaaatggagtccacagtaagcaagtggactttacttcgtatcaaaccaatcagaatatctcgactagagcgcccagcctcggaaccagccgaacacgcgtgttagctaagcgaggtccttaattaactgactgactgcctaaatgccaagtaggatggggcggagcagctgtaacgagggccgaagcatatcagttgacccctccacgtccaaatccctctacaacataatacgcgtgtttgagcaaaaggccagtcaacagagccagagccgcggtacgatgctgcggcgcagccacaagaagtcccgggatgggtgtgtggaatggttagctatctgcctgtctagttactattcgttgtttggaatctactaacgacgatccagcaagcgacggcacgtcaaggtaatttcctactataactcgagcagagttagactaaccagactgtcggtgccagtgcgacgaacagcggccaagatgcctactatgcaccatgtcaagccgggaatgcagctttgcatcggaagccctaacaccagcagagccgtcctccacggctctcagaagcccaagaccctctccttcttgggatcagaatgaagggcagggtaatgctcgcgcccagagcatagaagacccgataaacctccaacacaccgaactcctcatccatctgacctcttcccgagcgacagatgtattcagtctcggcgacggcttcgagccttatcagg

SEQ ID NO: 5710 - DNA, 9331 bp, Emericella nidulans
tatgttcagatcaaggaagaggcaagcggactgaccgagcggacatccagagctacatgaaagaccgcgtgcgaagcacaagcagatcactgggggcatccagcttgttgatgaggtgccgcgactcgccagcgggaaacttcatcgcagggtattgaaggaatgggcacaaagggatgcagcaggtgtacgctcaaaactatgaactacctctagatttagcaaagagaatgtgctagagtcaacccctaattagtactatggcagaaacgcgtcatacgaaagtagatgactggatgatattgctcaagtctgggtagacatgatattgtttcccagccaggatccaactattttttaccgaagaggacaagaagcgcttcagggaggatctcaactatcatctggccttccggaaagggattgaggcggagatcaacgaactgtttgggatgtaccttcaaggctcggacctgtctaacaacttccggcaaattatcaccgatgagatgatgcgacggatggggccctgccatgaggaattgaagtcttttattatccttaagttcgcccctggctgccgtcgcatctctccggtgacggctacctcgaggctctagtgcagcctaacgtgaacccggttttcggagagatcaagaaggcaaaccaagaagggactgatccctggtttgaggactatgagatcaagtactgttaccggaaccagtttgcctttctggggaacggaaccgtcaaggctgaagtgaagcagggtacgctgggactggctacgtatgtccgcaatattgaccatgagtgggccgttgcttagctatcatcactggatactatatgatgctgatttgtaaaagcgaaattgttggaaaactctgttagtttcagttctaggtaatatcgctaagtagatgtggcagtttgtggtcgggccaaagtaccgcttctgatgggcaagcttgtcgaaactgaagtacccgcgagttgacagcagccgattagccatcgaggacttcttgagagtagaattaacgggactgaggtaacggtagggtggactattcgaacacccttgcgtcagcgcccctactctatgtgctctgcttatcggcattgcgaccatcgtcgcgtttgtgctctatggtgagcaaccgctagtatattattcattgtctgctgataatccgcaatggagggatttgtgtgcaatgaacgatcgttcatacccccaaggccgttcaagaatattggctttgtcgcaatcgtagccgatgctgctgttggcgctatggtctattacgcattcaccgttctctggccacagcttatcgagtccatatacaccaccgactcgatccagattggactccagagctccgtagtcggcggtggcgtgctgctaggccagatactgggcggcatggcgctgggctttgttcctggcgtcaagtaccagtgcattattgattattgtttcctgccttgccatggcttttattaccccactgagtgctttgggctcggatatctggtcaatggctatagcgttgggcaccttgggctgcatgtaggtcgtcccttgctaccctagagctattcgtgtggttgttaaccacttgatctcaaccgggattcactgctgtcggctatgtcactttctcaggtgtcacacttgtagtggaaccgcaggacatcgggcttgccgctggtgtcctcgggtctctccgggctctgggtggagcagttgcgcaggcagtctacgtctccgtgttgaacaacgaggtagcgaagaacataccaaagtacgtaggtgcagcggccaccgcggctggtttgccagaatcgtcgctgtctagtctgctggaggctgtgtcgagcgggtcaagtctccaagggattgacggtgttacggaaagcgttgtcaccgcgttgttgactgcgcacaaggtagcgtattcggagagtttccgcattgtcttcctttgcactattccattcagtgttctcctggtcatttccagttgctttgtgccgagtatgaggaaccacgtccattaccaggtggcgaggcgcctacaaggggttggaaaagaagaatctgtatccgatgtcaaggctgacactgagatgattgagcatgtctagagaacatctacatggtgtgacaagcactttactgtaatctttcagcaatagcaaataaccttcaacttgagatatcctcgcgagaagctgtcgggaagagacgtagcagattggctgcagtgggtcaggaagtctatagggaaaaggatatcccgcgctgcttcctgtattgtctcggttccaatgacttgaaaatattatgtagttccccatctgcagtaagtgtaagacattcaaggcacatcacctccggtctatgagctgaatccaacaggatgacctacacagaagaaaccatgaaggcggcgcaatgggatcctaagctgcaaaaggtggtggtaaatcgagtacctatccgaaccccgggcccaaaccagatcctggtcaaactggcctcggcgtctctctgtcactcagatatcctggccatcaaccagcccaacatggccgagcctttcacgcttggccatgaaggtgccggctacgttgctgagctgggaacgaaatgcactgacaaggggtttcgagaaggggatccagtcggattcctgcatatcaacggctgctgcttcgaatgtgaagggtgcatggtgcacaacaataactgtacacaaggcacccccgtagtctctgggttcgggggcatcagggatttcgggttcttccaagagtacgctgccgttgattggcagaacatcatccaccttccgtaccagctggattcgaagcgcagctctgcgattttctgtgcagggataacaggtatgttggggacagccatgtctgacagatctgttgctgaccggacgccagcctttcatgccgtagacagctgcaacctgacggctggccagtggttcgccgcgatcggggctggaggcctgggccagctcgcagtccaatacgccaacgcgatgggctaccgggtcatcgcgaccgatatcaacgacggggctctcgagacatgcaagagacaaggtgccgatgttatcatcaattctctctctcgaccagactacgccaacgaggtcaagaaactcacccccggcggcgtccacccgacggcggtcttcagcggtgctccagctgcctataggggcgcaccgtctatcgtccggccagggggttgttgatggtgattggaatcagctccagcctgctcgagctgtcgacgtttgacctcgccattggcacctatgttgtcaagtcggagagcacaagcatccctcagcgtatggccaaggctgtggatttcacagccaagcatggcattacacctgagatcaaggtccggtctgggttggaagatgtcgacgagatggtctgtgatatgcaagcgggaaggtctagtaaacggatggcagtcgttttcgagtagtagcagaatttgatagcttccattatgtccaagcaagccagctatatccacgcccttgactatttattcacgacgccttttactgctagagaactccatcttctccgtcccgtccatcctgaccatgatataattctggaaacgtctatgcggtaaggcgcactgccaccggtaataaatatttgtcatgccagtagttttttatgctattggctataccgtaggaaacaccaggtataacatcgctacagccaactccacaaggttgaatttatgaagcaaggcatgattttgaattgctctgctgcctttccagggagctgtaattgtccagatagagaggctattccgagaatagccgaagcccgcctcaaaaggcggctttggccagtccgtcccgttccgattctgagccacgcccatatttgcataagaccagatttctgaaacacgattaccttgcccagtataaggtgccattctaaaattgattaggtacttactatctgcatcttgttgtacctaaccgatccttattccctgctactcatatagcacagaacagactctaagcccgaagactagtcagagtagatatttgcctggttaaacttctctctaaggtagtgtaatgcatactatctagcataagctgttgcattctgcagaatctataaatataatatataattattgatgtgtttttctgaagcaatagctaataataaggctaaaatgagggtagataggattcaagagcatttggttatgtcttgtgtctaggttcgtgagggatgcatgacgggtcaggtgtcactgagtgacagctggatcgcggggccagtctatgttatgggttcctcatacgaggtacctttctctagaactcggctatcagaggctcgtgtaggcgtatattcgcttaatacggtcctattacggtcctatttctcgctttaatgaaccctttttgtacatacggctggatatagcttgaactagcatatcgtccccttacagtccaagcctcatactatgcagcgctgacacttcgccagctccggcttcgtccaaattcaaacctccagctaagccttgcttgctataaatgtgttaatagcttgattccatatcctgcctatggtatctctctgtgagcttgctgggaatatattcatgggcctgcactccaacaacgcaggcattctgttttgcaatgtacgatatacaggaatgattcctaactattttatcggtattgggatatgcaggatcgagacctcttgttaggggtcagctgatcatgacttagagaattggtaattgaggccgactagcggtcaaaaattactggccctggcgacttctgacctacggcatggcctagaacctgggcttggcacgtctgggcaatgttggcaaccctgactacgctaagtcccctctgagacccttcctttcaatcatttacaatgcactttcttttccacatcctttccaggccacagagacatgactatagtggacgtaatgccagtctcaagtactttattggatgtggacgtccattaccgattctctagtttcaatgactactttacctggctgagtatggaggagccgtggcctttattgaaggtccatcgccgcactccaaatcggccatggctgcattattgtacatgatatgccacgagaatcctgcagatgcagtgcgggaggctggcagggtccgggcccttcagagtatgtgaaattgctcgacagtaattggccaacaaatgcttgtctcgtattgaccccatgatctctgtagcgtgtctttcagccttactgcgccccgtccaggcacttgaatatattataggcgcatggataacatatccagggttctaccgttgcagcagccttgttgtttaacccagttctacatctttatagtgagcatctatttctggagtgttgcgcgtacgcaagttatatatacagcatatatctactacctaccaagaagaggggacggactcgacctctctttctcccttttctcttgctcttgtatgtctaccttttcgtttagtggctgttacgctaattatatgtgaatagatctcaacctagcaccaccgtcgcaaagcaagcatgtccgcagtacaagtcgtccaaggcttcagtctcaccaaccggtggctcctctacgccagtatgttgcttgctcccgctcagttctccagtggagtggggaacaatatccccacaagcgctggcttcctcgcctacaactgctacactcaaatccaatggtaccacgctgttagggcaaaagagctccatgcgctctccctcctcccggtccacttcaacatcgtctatgcgatcagttacctaggcggcatttcgtcgggtaatatcttcctgagcatcctcctcgccatcggcacgatgggggtgctcattctcaatacaatcagtgcatggataagctggattacgaaccaaccagaaggatatggcgagtatcaattcttctttttcgggtggaggaccctgagccacggctggcacattttccttttgctctggcagatcgcagactcgattatggtgttcaacatgatttttgtggccgggtatttgatttacgttgggactgtagacgacgagcgtgcccgtagaatcccgtggtattgtcgcacgtaccctgctattccgttggggggaattttgatgctgatatttgcatggcctgtgatcgtctgggtggagctaattgtccagcgaaaccacatagtctctgagacggacatggttgctgtctggctttttgtggcacaggttggcacaatgttgataccgagctggtccaccgtgcgccgtctcgtacgtggctcacaggactcctcattgtgatcttgcttaagacagccgttttggtagttactggagttggacgctgccctaagtacgccggggaaggaaaagctgataactaagcattatttgatattgttattcggtaggttaatcgagtcaaattgtctgcgtcatctggaattgtctttcttatggtcctcaggtgacttggtatattttgtccaaggaggtatgagccaaagtaatggttggaggatttatgtaacgaacaatctggaaaatcagcgatcgcatgaaagttcgcctggtctgcccttataccacccagcttaacttacagcgatttgtcttcttgttcgtgggaccgttggggaggtcggaccggataccttgcactacactcgtagccatcttcaacgaacaggtattagcaccggtgttacttgctttcccacccgaaaatgctatttacacagagataaccagttaacggccgatgaacagttttcaaaggctcatggctcccctaccaaattctctgttgaccccccatcctcaccaacctgcacagtgatatccgtcttgacagtgactcctccaacgccatctcgagcatcgcgatctttccctctcaccatctcgtcggatccaaacgacgtaggcccagaacttcctttctttaatccaaaaacagtcataacaaccgacccatgattctgcctatgacggtgcccatccaagtcaaaatccaaaccacggccgcgtgtgtgcgagtattgattcgagtggctattactgggataatcccacctcgacgcgtggggtttgtcgaacacaacgcggacgaagagccggattatcggaccgcaggttgcgaggaggatgctgtaattctcaatcctggaaagccaatcacaattagcggcgaaaataacgcctagatcggctatagaggagggtttagactcactttacccatagcacaaacggtatgatgttgtctacagcctaattgtcagttatcagaacagaatggctggtcccactctgataaatggagaacgtacgtgtgaagtcatttctatcgccgagagacttcaataactgccgggaagaaaaatgttagtacatacaattctcggatcctgccagatgcaaaaagaataagaggcgtacataagtcttcacaatagaagcgcagcccgagagtgccagtggcccactaagaactatagtctgccagatccgcctattcctcgcctgtctcggcaagcgcttgaagcgcgcaaagaaggagttacttgatgatggggcacggtccacgctccggatactgaactgccatagttggatggcagagaggacggtgaggaagaagtcgaccgctgtgttgaagcctattatgatatctcaatatgaagacttggcgaatcggctcagggctggttacctccttggacgaatccgatcgttgtttgaacgttaggtgactggcatgtcactgagccgtcggtaggaacgccatcccacatatagtggaaatatgccgtcctatcggtctgtgcaagtcaatcgggcgtgttagaaggcattggatagaagctggcggaggacaataccaatcggtatggattcgggccgcactgaagcacaatctgcagaatagtgactgagtttgcgattatctggaccaccattccgatcataattgagattcggatatgcttgtcggcgctgctgaagcacatgtacaagaaccaagtcattccgcagcgagagagcatcgatgcggcgaccgctgaagtaggccacgtcaattattcgcccggctgattattgaaagcagtgggctgtctacctataggctgagagagaaagtcgtactttagggcgccgatgcgctggacatccgtgagggtccaaatatgttgaccgagaccgtaatcgagactgagaatattagcagagtattgtcaacagttccaggtaacctgcctaccttttttgaatcaaagccatatgggccatatcaaaggcgtagccgacagcaaacaataagtcttcagcgccccatacccgctccggggagctgactgtaggaaggacccagcgagcccatgtcttgacggtaaatctgaagatcagagctgccgagacaagggcggtcaagacctactgcaactattagaaaggaggaatgaaagtgagaatcacttggatttacccaacacgctgtgacatagtgtacccctagagaacaatctcgtcagctgtgcaaggttatgcaaaaagggacatataggatgtctctctaccatagtcagattccgtctctggagacgacattatctgttcttgatggacagttcgttcctgagggtgacaccgcagcgtgatggacgtgaagcaaggtgcgaccctctataagaagggatagtccggacaatgcctcgctcatgagatcgagaacagagtcgatccactagaccgagcctactgcagtgaccctggcagttttcctgagactctgatcgtatcatttcctctagtagcctgattttgcttttcctcgcctagctgggtaactgcaccgcactctcgaggaccaactgatgtaagggccaaacttgactggattcgtggcttgtcaagacgctggtgtgtattattaacaagcacctttgctatctattcatcgacaccattggctaagtcgatcaagagtggtaagaatcgtaatagatatcaactaaaatccagccaggtcttgaggcgactgcaggagagtagtatggtcagagttgtcgatattctttttttaaaaaaagaagaaaaagaaaccctaatatcctttctgaaataatgaaagatcattccgatcccaacggcctagaagcacgggcgggctcggtatagcat

SEQ ID NO: 5711 - DNA, 9311 bp, Emericella nidulans
aattagcacgactgtcgacaaaaatccatgccgaacaggatcagattgcgcattcggaattcgagcaacatgtttcacgccacccttgtccccaagacggacccaatctattgtgcagcgggagttgcataccggatctcaacatcgtactggccagtctcggcgttcttctcaatgttcacgttgatgggaaagtgagcgtagacgtagcgcatcttgtacttgaagcccttggtgacaccgatgatgaggttgttgatgagggtgcggacagtacggagggtagcgacacccttgcgagagccgtggtgcatctcaatggagatgacatccttcttggggcggccgaaggtgacggcaatgtgggagaggtccttggtgagcttgcctattgagaacattcgtcaactccgctccattcccataatcaaaactccttcaaaagtccgaaggaagatctggctttcaggcgtagatatgggtaagcgtacctcgaggaccctcaacggtcacgacccgcgagcgaatgtgaaccttcactgtaagggaaaaattaaagtcagttcgcgttcaaagaatgataaccacatgtatcccatattcctagtaattgaaatcctgctcttagaagctgtcgcgcgaatttcctcttcgcaatgccgtcgacaagcacctcttgatccagaacgttttgtatcttcgtccaactcaaatgttgataaggaaatcagggtcgcaagctcaccattctcggggatcgggagcgtttcctcggagtgaatgtaccgcatcttgactgctgcgtgggcttagaatgtccgaggggcaggttgtcgatgtcgtcgagcagtcgggtcgtcgaaagatcgaaggtcagtcgaaacgccgcacaatctttcccggtgttggtggagcgaaatcacgaatcacggggttgtgcgtcgcttagcgtcgaatcaggcttagcgcctctgttaggttctagggttcctctaggctctccgttcctcaagtttgcgaatttcctcagtattatgcatgccactgtccaatttttaaagagctcgaatattatacattacacaaccgtgatttaacccttaatatatacaaaagaaaaagaataaggataactcgccatactctcaagtaccatacctcctcatatgcgccaagaccggccattgaaggcggaattgatgaagtacggacagagaaaaggctaccgttgccgccttaattggcgccgtcggctccttttcgttcgacttcctggagccacttgccagccagactcttcaatcgcgatgccagctcgtcatgctcgtccagggcaacgatatcatctccgccgccaatacttctcccattgaccaaaacgttcggaacagtccgacggccggtattttctcctaaaagcgactgtagttgtggaccaagcggatgttggtcgagttctaccacgaaaggcgctggtacaattgagtatttctctagtagaaccgttttggccttcctgctgaagggacagtagctcttggagaaaatgacaactgtagagtctctgtcagaagtcgaacaaaacgccaaatgtggttgcaaacttactcggcgaccgtttcagcatatcgttcagctcggctttgaccttctgctcttcatgctctaatttctgttgcttttcctcttcctcttcctcttcatcgtcttcgtcctcgtcctcgtcctcctgcacggacacagccccagtctcagcatccgtcttaatttcatcaccccctttctccttagtaacagtcatcttggtccggcccgcaattggaatctcctctgtaactggttcggagtccttgagttgctgctgcggccccggcggcgcccgcggtatcgccggctgctcttcatcatcaccaacagtgtaggtatattcctcgcttgacttgaaagccggctgttccctatcggtatgagataggtaattgcttgtctttgtgtcccctgcggtggccttttccgcattcattgcggccacggtcgactggtagaacttctgcttctggatactccgggtttcgctctgcatggtcaactcgttagatatccagaggacgtattgagcagataagaagggaggaaagtaccgagtaatgcaaatataatacaaacgcgaccaacgctgtgacagcaagaacacgaatgcgccgttgggagagcatttcagtggactttggtaggaacaatttctagatagtcttgtttttaccaccccctctcaaggcgatgtaacgaagcttcttagacaatccggttatgccttgagtaagtgtatatgttaactgcattcaacacagctctttcacaagtcgatgatcatgcgctgatatcaggtcaggtcatagggacggctcaggcatgagttgagaccgtacattggcgagcgcgcaagaggttcgaggcgcaatatggggtgatgactgggaatatatgtggtacagggttgtgcgaggattgagaaggatgtggctgtttaagatgttgcgaagttacaagaaggcccctacgcgtggggaagggcgaaatgaactccgaggcggcccgtgcaggcgaccgtcgacttaaacgataacccgcaaataataggcggtgttttctattcgaagtactactgcagtcaacagacttcatcactacttcatgattgctatatagagcacgcttcgtcaaattcagtcgggttattcgactattgctgatcatatacaacggacactggtttttggtcgttgaattttcctctattatagactagatttaaaataatgtctaagctcttgggtatgagttataatcaatggtatcgtggtcaaaaacagaaaacagacagatagggaacgaattacaaaaacggccttgtaaggtatatatagatgcaaggaaatcaactccgtgcatgcggcttgagaacgaccgcagaacccgcagcggtggaactcggcaaaccgaacaactcgaagacagacgtagtcgcaatcaggtgaagtccgtgtagtcatatattcacgcttctgaggtatggctttttcttcgctcgggtctgatggtccagattggcgtatcggtagatccaaacttccgactagaccgcgatcatggatccagagcgagtgcctagtgtcgctttgcgcttgccttgaaccagagtcatccaatcttcccattctttggcgatctccatcaaaacattgcccataacagtagccgaagccatcaatccatgtccttcgccttcgagaactcggacctcgcagcgcctcatagtctgacctaaccaccggacattgtcaacaggaactcgagtatcccggcttccgtggtgaataacgacgttccgggtgatatcaacgtatcggaatccaatcggttggtgccgttctaagcaaactagcagatccacagcaggattagcgtgcgtagtggctagttcccaaatcttatgcgtcaatcgagtgtcgtagtctatttgccgctcgcgctctacagagtcaacggcaatttggctggtgggagcgtcggctttcccatcatttttcccgttgacattgcaagcctcgtgggcattttccattggcttgttatcagccttttctgcttgctgtttccctcccgagcgatcatcaagggtaataagacgggggccttctttcgtagtagcacggcgtttgcttctccgaggagacttgggcaaactagaagtaagactcgtactcgtggcactcatgaagctagaattggcgattttgaggaaggacgccggtaaggcccgaagaatccgatgcgagtaaggcaccgcattagtgggtacaggggccttatacgaccctatattagagagttgggagggagggatccaaggcgccaataggtgaatacggccgcgaatatgctgtggtattctcagagctgttgcaagggcatagatagcacctgccgaatgtgctaaaatggagaacttggtgacttttaaatgattacaaacaatcgccacatcatctaaaaccattagcgctttgttaatagccgatatatgagacttaccaggccagctgagaggggtcccggcatcagttgtgtaattggccgctttcaccgaccccaggtctatctaatgtcacaagccggaggccaagtgatcgtgccagctcgtcatagaatgccattagatatcttgtaaggcccattccaagacaacaaagtaccatgtggcctttgggatctccaacttccgaaaaggctatcacacggccactcgtagggtggcgtactctttgtgtcagctttggcgaggctacgtattccaatactgcaagatcaacggagtccgcgcttgagggacgatcctcggccacaaccgaagtccgattgagtgagattggtccagatggagaccggtgatgagatcgtggcgtcggctgggattccacggatcgcctataccgcagcttctccatggggtcaggccgttcaaaggactgtcttgctgtaaaagactgcgatgatacgatgcttggtcttgacgcgacctgagggctgttccgaggaaacgatcggctcctacctgtcaagacagcaggagacggagcactctcgtcgatgatcaattcatgttgtatagtattgccagtggtatcgctccacgcttgtggctgttgtacctgcaaaggctcttttgtcggctgctgtggcgtgttgtctgtctctagttcgttcttgatcttttgttgctggtctttcagctcctgtatccttttcgacacctgttcagtttcggcaccgccgacgcccgatatgccactatctgtctttacctctctgctagcggtagatgagtatctgctatgacggccagttttccgatgctttgggctggaagaatagccatgccgtaatgaagaatcccgggcaggtataattcgcccactcccaatccctccaggcgtactgggtgcgctctcttgattgctttgtaaagagggacgctctatccccgtcgaggtacggatagtgtgctcccgcgaagcatccatcgagcatttgctgggccttccttcctccactacgtcggccattgagtgtagggaacgcaggcttgccctactgcgagaaacgtgattcctcaagccgtcagtataactgctagtttttcgcagtctgtcgatatgtttgtctttttcactcggaaattcgcgcgactgtctctttagcaggctcttcagactcttcctggagcttgtcgaatggatgctcgccgccgttgaaacccgttgaggaccaggttccgcagtaatcgtgccaaatgcagggtcttcaaatggggccctgcttgaactaagcgacgcttgagaagtcggcctcccggcggacacaggtcgctcggaattcactttgaacttgggtgactttggggtttttggagttggcggagcccgtgccatgcgaataattggcgacgctgcggcatcgtctggatgcaaaaaaggactatgcggcgaatcctcaatcgggttatgcgaactataagtcacgccaaatccatgttcgcttggtggtcgttctggaaccgataggctttcgggggggaagtagactggtgatgagggatcagtttctgaatcaatgcgcgggacgttcaggtcaaaatgcgaccggacgggcacagagatggccgaaagggaagaaatcaacgaagtaatgacttcgggcgaggtcgggtcaccggcggcagaagggttgctggagtgtgagcgcgaacggtcggttttgcgacgtcttgcgaggagggaagactggacaggggcttccgcagtggccgcggaatgttgctgttccgctcgatccatggcgacgactattgactataagctcttgaggaatgttcctctccccctgggagccagtggacagtcaccgacgactatatgcgggagaaaatagcgcgtgcttgcatgatccagtaggaactgggaagaccaggaatcgagggggagtatgcgactagagtatgtgaactagcttgatagcgtgtatcatcgacgcaccacgcgctgtgtgcccgtcggttcaaagtagcgagacaagcccgaacttaatcaaggccagcagggaatgttcccttgcaccagggaacgcgccttgccgacggtcccaagggtcttcagaaacgggggaggtggaactgcagtgcagatctagacaaaagaaaagctcatgcaaatcgaagagagcgcaaaaaaaagggaaagaaagaaaagagatggaacggatcgaatgagagacaggaaaagcaatgctcggaatctagcagttcaatactccatatagggataaggagcgaatggaggatgggcaatagtatcctaaaaaggagtaaagttggatatgcagggagagaagcttagtgacagtagtgaggggctgaagagatgatatatatcagttataagagttgatcagaaacacggagagatcagaaaataaaacttgtgaagataaaaaaactctcagttagataaggtgcgagattagtattatgcgcgcccgtgaagtctgtggctactcaagagtactacagtcacggagtacgtctctgtgaccccttgaaagatatccatcttttcatccctgtcagtcagaggaccgaatgcgctcgaatcatgaatgactctgtgctcaagctgggtcctcagtgacccaccgatctttttccaaaagctgaacactcctccacacaatttgcacatccaaatttgaggtacgagacggcgagttatctcaacagccgtgcttgaaaccactgggaacactccaatcacgcggcagaagggacaaacgagtgtcgggatgatcaggtattagcgacgaacaaactggctagcgaatttccttctaaattggcgtgggaggattcttgtttctcagtgtttctcagcgtctctcagagaaagacgaatgatccatggtagattcacatatgctgggtgacgccggacgatacacaacacgagtctgaaacttcgtcgggtctctagcgtcgattcggttgtattctattcgcctcgtgcgcgaaataaagctttcactatctgcgggttttgagcctacgccattttacctttggtgaagtgagctgctacaaagtagcgaagtttactgggtcaagcacagtcaactccacagtgccccagattgttcacagcgtagtagtgttccagaatatactctgagtagatatggcgaaatctaggactgttagcgtgtttcactagacggacttgccacccaggacctagatatgtataagggggttcgatcgatatgctgttggatgagactttagatgggttaaatatatgttcaccggtgaagtcaactactgctggagggaccgtactgatcgcttatcatcttcgagtatcggataagcattgaatttagttaggcgattgttgagtggctgtaactactgtaactgctgtaactattgtaagtcctgttactacacaatatatactccagagtactgggactcttggttggggttccgattctcttccgcggcttggcaaaacaccttgcccaatgcaactagctcgagagtgacgactcggcaggccccgcgtttgtccacgagtattttcatgataaccagtaaacagagctcatataccattctcgctacactcggtctggtcttattgcttcgatgggcattgttatccgagatatgcggtgatcgccggctgtcaacagcacttcaggtccgcaatggacgactatccccgaccttatatcgccaataacctgccgttcatcctcctttgcggcctcgaagccgacggcgacagaacagagccagaagcggaagagacgaattatccgcttctggaagaaaatggaatcgcaatagaatctgatcttccacctctggagaggcccgtcgcggaggaatttcgggatgtcttcttcagtgaagctgggccgcgatcccaggacaacggcattgaaggaacctcgagggctggatataaagtcaagtctatcggacgggtacgtgtatactctatgccgtagcatattcttgacggcagcttctgcggtcgagcgatcagtcgtgtttcatagatcaagctgctaatactactgtagaattacatttttccgccgcgcaaggctaatcctcctcccgcatcgccgccagaaagtccgactgttagccgtgatcatggattgacgatgatcctgcattcgcctatttctccgatgacgccagcttccccgacgtttcctgatgggatcatgacacctctatgggcctcaaaacaccaagatttggtccccgccgcagtgatcaatttctttccgctctgtctcgactcgaccatgaactcgttgcgtgacaatcaactaaaaatcgagatcaatgggttgaaaaaacagtggtcttcttcggggtacaggacccgcttcattgtcgtgcttctatcagagaaggctatcggagatgatttgggagacctcgatgatcgagttttagggattcggagagcaacaaatctagaccaaaaatcgttattcattttgcctccggatgtgagttcggaggagatgagagatttcacaaggtcgcttcttgctcttttgcatccttctttgatggaatattacagagacttgtccaagcatgctcgaaggaaacggaataggagcagtataccacctccacagcaccccctactagtggaacgtctcagacgttatcgcttcagggttggaatactcgatacgaattcaaaatgggaatctttgcagaattccggcaagaaatcgacgcggcgctcaagaattatgaaagtgcctatgagaccctctttggacaagaagtttttgaaaacattgctggatgggaccctaaattcaatgaagctcgtctgtttagcgatgcgcttgcgatacgaataattcgctgcttgctatctactggacatacaagttctgcagtaaggtcctgggtctatcaccgcagacgtacacaagacatcgtgaatagaccaggaaagggtacgaggaactacggatgggaagcttgggaagctagatggtcgtcggtgatggctcacttcattcatcaagcccagaatcctcattctaacacctcttggaaaccttcaaaattcagtttcaacagccccatcctaatttttttttcccccccaaaaagaactttctttttggtcggccgaaagttttgccttgga

SEQ ID NO: 5712 - DNA, 8766 bp, Emericella nidulans
gagtcttcagccgaaggcctcgttcttgcctcgtacgttgaagtcctggaactcccgcttcttcttcaagccccgctggacggcctgggtccacctattcaagctcttctgcgtcgctggcaggcagtacagcagctgctgccggaaagaaagtcggaccggccgtagcacctcgtcgtggagcgaagaagttacagtacgtggaagcgctttacgattacgaagcgcgaagcgatatggaatggagcatggtcgagggagaccggttcgtcctcgttaatcgcgacagcggtgacggttgggccgatgttgaacgaggcggtgtcacaaagagcgttccggcgaactatattcaggaagtatagatttgctagattgaactatataaaatcatccccttttccatcagctgctcgcttctcctgccttgtcccttctcccttgccatatttatgtttctgatctcacctgcatcatggagtttggagactagcggtgctttcaatatattttccattgcagtattttgttctatctgcacattgcctgcggccaatctgaacagctaatctggcggcgtctcttcaagcaagtagagccaattccattcacctctgacgcaaccggaagtgcggctgattccgctgctgcctagtagagccaccagggcccagtcacaccgtggggtttagccacttgccaaggacatcctccatcgttgggttttccttcttttgcttaacccctcagacaccggccgccattattgccagactggcagactccaactgagtcagaaggaaatcccggtctcggctgctgatgacatgtcctatctttgaagcaccgcaatcacctcctgcactgcacgagcatgatcgtcacggcgccacaacagcagattggctctccgcgataagcttccttgctcagccacctccattcaacttatgtgcatcaccagccccatgctgccccgagcttttttgtgtttcgaccgtagccgactatcaatttgaggaagaatgattgcccgtcaatagggcagttaatgtcgtgccgaaagtcaaagtggctttttgatcccactggccgccatttcagctaaatatgacaatgggggaaaacgcgggatcatgcaggaggaatcctcggccgacaatcctagcttcctagccttttacctagcctgggccgcctcaggactctggccatttgtatgagggaattgttggccatttggccgcctggccgcccgcagctagcactgatggggattatgctgcttgaaaccgctgggagggcctcatttggtcggaaaataccgcattcagtgggagcctctcctggcactctgccggctctcggtcttccaagatgctcgcctcgcttcttcgatctctgcttctttgtaaacactggcctaagcaaattcgatacttggcgttcgagtgggagagaataacagttcaaagagcaaacatcctaaggggttggaagccaattgcatcccgaaattggaggcaaagaattgagcgtctcatcccggtggctgtgctctcgaccgaggcgacccaagctttggtcagtatctcatatgcagactggccacttttcccttccaagctctccccacaatctacatttataaatcatatcgcatcccaccatggctccgttggtctctctcacttacgcgcctccaagggatgctcatagacggtgaaaagtgggcttgtgaagcttgcgttcgcggtcaccgtgttagcagctgtcaccacaatggtaagttggtccactgcctcgaaatccgaccgttgtaactaactcgctgctgtcagaccgcccgttgacccatatcaacaaaaaaggccgtccagtctcccaatgtcctcactgtcgcggcctacgcaagtcacggacaacccacacaaagtgcgagtgtggtgacaaaaagaagaacagccacaaaaatgatatagatccccatgctcctgagaagcgggatctgaagcgtgaccatgatagtgacggcatcctggttccttgtgtctgatgtgaatatacgagagaactctcgtccaaaatgtggctgcattcatggacagcgctgtacctgtgcgctgaagaaggaaccccatctggataccgtaccggagactggtgttccgccggccgctcctccgtcggaacaacctaggaaacctcagttgacgtcgaccaagtcggagagcacgctcaccgtattccgcgatggtcaccataagcctgcccataaacacaatgacatggctcacaaatgcggcttgccctacacgatcccgcgttctcacactatccattcggcgtccgatactgctcgccggtcggtagatcatttgcccttgtctcaatcttcgttcatgggcgaatcgactgcgaactcgtctaaagaacaaccgcgcactagtatttatagttttcatcgtcgggtcaagtctgaacatgggtctccagaaaacgtccccgcggttccctccggagatgtcccaacaaacagtcccccactcgacctctcgtcgttattctctcattctcaacccatggaggatcccactctcgccacagttcccgcgccggttcccatgagcatgccgtaatctctagacccgatcgagacaaatgggctttcatcattctcgctgccgttttctgcatacccagcgacgaatccttctcctgtcagcggcatgcaattccaagatacatgccaagagccattctttacctccccggagaatgatttagctttctgctctgctgctttcaacgctccgtcggttgattggtcaagcgtcccattgtcatcagccatgccaaccaccagcacccagcctccttcgtatgccagttttgactacggctctatggcaccaagcatgccagcaccttcgtcctcaggtgatgtctcagaactggaagaatttccaccgcttcctcatttgggggcctctggcaacgacctgcatgatctgaacagtgtgagtgagggttcggatattgatcattaccgaatcagctctgcctcctcgtttattggtcttccccaggcgcaaatgctgtcgtctaacaacctggaatccattactattgacgagttcctccaatctgccaacgaatcgacagctatgctggagcaacagttgcaggttagcatgggcatggaacccaaagggctttcacaaggtgtatatgccatgccagatacgcaaaactttgacaaatctataattaatgcggacaccaccttgccaatgaccactgccacaacggagtcgctctggccgacgacgatgttcgaccccaactccacgcctttagatgagagcaacttcttcccaccgccatgggtgcaatgaggacagcaagggccttagaatcttgtttagaaactgcggtttatttgtgcactttaccaccacctccacacagtctgtgacaacactacaagtcttcacgaccctgatgagagatgatgatagatgcctgatttctaccttttgttctttagcccattgcgagtgacattatactaccgtataagaatcaatttactaagtgacaatttctacatttcttgaatatttttgcctacgccgttctatgtatttctctcctatccttacccgacaacggtgtctgggaatgctgcatcgtatagaaatttagataattctagcatttagagtattctgcacttacgatccctgatgactgaagttgcgtttattacccacagaataacacgttgcatccatgtctagcggtgtgactgcaaaaaatacagcggtgtgcatattctatgtacctacggactctccgaggtccataacttagagtccctaagtcaagattataagatgaggtatggcctgcatagcaaagtattcttctctgaggatgacccaaggccctactacactgcagcctgcaccggcgacatcacaaccatggatgaatcaatgaatgcgataaaagttacaggctggtaatccgaatatattgcgaaatatgatgaatcaatccacccccttacgtagatctcttaagtagtacgccgatccaggcaaaggatgaaagacaagcttcggccaactcgaggcttgtttcgacttggcaccccccattcctttctctctccggcaagccccaaatattggataatttcttgagctgattggcatattgtgggaggggtagctagtgtgctccaatacgtcgccttggtgtaataatcacaaagtactgtgatgcaaattttgatgccggttttccgggttgactttgacccgacctgggtgcatccatgacacaggttaactgtatcggctccataatgatagctgtacgacatcctcctttcgaaataccacctgatctgcttgaaaattccagaagctctgggtccacggttctcattgctctttgctcctgagaacgggtttcgactgtcactcctaataaattaggcccgtaccggtagatcatttgtggcgaatactgcgccagcttttggtcctgagaagctacgatgtgcgctgcaaagtatgacgctagagtctagaactggaccaccttgctcaacatgatgatcaaccctaccaacgtcattcgagtaggacaaagtggcggcataacccgttggacccagtcgggcctccatggtgtggttaggagctatgatatttgccgagactcgtcggttagctggattgtctggagcggtagtgacaatgaggactttattttgtagattcaagagaatgatctgagattttgtgtcctggggtatatacacggagaagagatgctgtatatccagacggtgatatccagacggtgcgtcggtactccaaccgcttgagctatccaattgctgctctatagtaatcacatgagaaaataatggcgccattccttcgcctctctatttgtatttggccatgaactcggaatggaacttcacgatacgctccacccagtccgtgcctggtgcgaggaaagtagtgcggaagtggagcgtgttctccttctgaccgaagccggagccagggacgacgcaaacaccagtggcgtcaaggagacggaggcagtagaattcgtctgcggcgcggttctcagcggcagcggcttcaatagccttgggaggcagtgagatagtagggaaaaggtacatggcacccttgttaagtcagtagtgtgtctgattatctatagaaataaaaacgtacctgaggctcttggcactcgacaccctccatccgttgaaaagcttcatagagggcaaaggcgcgctggcgcagtccttcccggatgccgttgtactccttctgatacaactcatggctgggctcgccctcctttggagggttcaccatcagttcaaccaaacattgcccgatgacaggagggcagagcatgatgctgatgaacttgtagacctgggcagcaaccaagggatcaaatccaaccagttcgaagtaacctccgcgatggccacattcaccaaccatacccttggaagtactgtgaagggaaacaagctcgacattgtcgtatttaccaggtacttcttgctgcagctcccggagcctctttttgaacgatgtgaattctccgataaacacatttgtctggtatacctcgtccgcaattacgacgagcttctcttccgcggcgatgtcaaggacgctcttgatatcagctggactcaaagaagcgcccgtcgggttgccagggttgataacaacaatggcgcgaacgtcagtgcctgcagccttggcctgttccaatgacttcttgattgtaccgatgtcggtaccccaagccttctgctcttctaagtggtaaggaacacactgagcattcaagagggataaagtggctgtgtacagaggatactggggaatcggaactaggacaccagcatttggcccattacaaatgacgttcagaatggtgtttacaccggaagaggcaccaccagtaaggtaaagcgactgagggtcggcggggaagccatcacgttcttcaatgaacttggccacactctcgcgaatcaggggagcaccttggctgtgactgtatgcaccaacactctggacttcggccagaagcttctcggcccgctcgataacatcatcctgatagccgaaagacgtacgaagggcatctttgttgcttaacagtagagggttttccataagactgaggacttgacggaagaaagtgatgggcttttggtcgagctgctgaggattgccgatgttggcgaaaataacgctgtcaaacggcagtgtcttgtctccctgagccagcctcacacggtattcctccgccttaacggcgagttctccacgaacagcatacttggcagccttgacgttcgaattgatgttgtctagggtcaggcaacgaacagccgcagtggatagagcgcgttgcgaggcattaggaactgtcgttcgggtcgtcatcgtgcgttctaggtcaatggaggaggtgtcagtgtacggagtatgggaagcttgtgcggtataaatctcaggtcaggccatgtagtcgggcaaatggtcccattggtagaccggagagatggtgactcaaagcggctgaaccaaatagcttttgattttataaatcactcatcagggatgtcacgaggtgtggactctgcccaggccggctggcaccgatctggcaataatgcagatggagatcggagccatcaggaaggcggacttggagactcgcaggctctctcgggggttcccgaggccacttacccgacaacacactcgatcttcccgcggctaacgctgctcgagagaacgaacgagactgataaatctggctctgtcgcgcgagccgagcattattcggctggaaagtcactgcccgccgcagcggtgtccgcacatgggttgcgatcccttgccaggtcattctgtcgacttttgacggccaatcgtgctctcgggccttctccgccgtgggggcaaacgcggggattcaaaggcagtcggctgggcgaacagatcttccgagaattgagcgctgtcttgctggcgatccaggtcaagaatgggcagcaaattacaacctgagtagtggaaattgcacgcgaattttggaggcaaaactgtgagggtcccgatgatcggtgctgactcagccgtccctgacccaaggtacagcatacaagtacatgagtatgcccaggtgcatatctacatgataatacaatagagaacaaatgcggtcggactggacatggtgcatacgtcaaattctgaagtgatctacagatattgctggccaagccaagtccttgttgcttcatggtctgccccctccggtgtaccggggcacccccacgtgaggcccggctcctcccgaatatcggcctgtcgcccgtccactatacgaagtcgaagatcatttgtgaaaaagtgtggtaataaggcagatatcttgtacattatcatctcgcaatctgccatgcatgttgatagccagagcctcactctgagtgtcaatgagtgatccctaaacattcaaagcactgtgctgaggaacgactcaacttccgagtacatgttgaggcatttcatatgaaacagcccagcccgcgtccctggaccgccatcagcccacattttcaccttggcgccctgacagtacgtaactctacttagttcagaagatccgctgatgttctgcaattgccaatggcaaggatttatatgacagtattatacagcaggctgggcgctccattgctttactcaggttagatgattatattgatgaaacagaccttccggctcaatggctcggtcccaaagcaggcgacgccgtgatgcaacaaggagggtacactccttcatcattcatcgttccttaatctatctatctagctgcgctcgcttcccctcaggcgcactgcttgaccgtatttctggagtttcgtgattaacgcatccccgtgtttgaccacatccgcgtactgcttgttcttgtcatccggcctgttcgtctcgataattccattgacgcgatcgatcgtgcatgcgattcggttgttcgaaatgaacctggcaagatccctgtagggagtcagtctatttgttctgaacatatacatacttttgacataccgatccaaatagtcaaccgtaacgccgaaatcattggccatgctgttcaaccccacaacccggtaactctggaggagttgctggtaggctctgagcctcatttcacgcacgaaccaggcccgatgctcatacaagtatctgtcttgggtcaagaaatggtcctccacggcagcgagagctaggaagaaagtccggtagttgccgttgtataagctgctaaccaggttggaaagaggtgtgaagtcgatagggttctcagcctccgcctgaatgccggtgttgccgccaaaggcagtaaggttgacggcggtggtagcgcctgacgaagaagcatctttcatctcttcatcttgagctccaggcccagaggagatctcgccggtcagcgcggcgagacggtcctcgcccgatccgaggatcgccttgatctcgggagcatccaccaccttggccttgaagtcgacccgcttcagggacagggagcctgcaagcactgcgtagatgacaagagcggagtagctgcatagttcatagctggtgaatgtagacaggctgtcaagaagtaaag

SEQ ID NO: 5713 - DNA, 6029 bp, Emericella nidulans
agacacacgatccacacacaccaaagggtcaaacgacgatattttgagcgcgaagatagctggaagagttgctcgccccgtttatcactgcacaagcgcacggctccatgacctagcctacgacccatggcccattaccaccatcgatacccacggtctcagttcactgaaggctccatcaacgcacacccggatcttgattattggcgcaggattcggcggcctcctctttgcggtgcgcctcctccaagccggattctcccgtgacgatctcctcctcgtggattcggcgggtgggtttggcgggacgtggtactggaatcgctatcccggcctaatgtgcgatatagagagttacatctacatgcccctacttgaagagacgggccacatgcccagccggaagtatgtacccggtgaagagttgcgtacccacgcggaggggatagcggcaaaatgggagctggagcagcgggcgctattccgtacaactatcagaactctcgagtgggatgaaggtgggaatcaatggattgctcacgctgagcagttaggtgtatttacagacgcaaaacaggggggaaatggtggtggtggacctttaacatttaccgcaacttttgccatcattgcgagtgggacactcagcaagcccaaggtccccaatttacatggtgtcgatgacttccaaggacatatcttccatactgcccgatgggattacgactataccggcggttcgccggctaaccctgccatgcaccggttacaagggaaacgggtaggagtaattgggactggctcaacggctgttcaggtgattccacagcttgctcgctggtccaaggaattaatcgtatttcaacggacaccggctgccgtgggcttgcagaaaaatcaggttactgatcccgtgtggtggaagggcaacattctgaaggctgggtcgggtcggcatagatcacgctcggacaatttcagcgcgttcatttccatctcgaacccaccctgcatggagaatctagtaaatgatggttggacgagttcgccatcattctctgccgcaatcggtggagcactgaacatgcagccggatttcctggacctagtcaaagctattgatcgacctaggctggaagctgcccaggaccatatcagatcaactgttcgggatgataccaccgcagaggcccttatcaatttaaaccacggatggtgcaagagaccctgcttccaccagggatattttgagacatacaatctgccgcatgtgaggctgatcaaaaccgacgccgccggcgttacagggctaagtccaaagggaatattggttggggacaccctctacgaagttgatttggttgttttagctacaggctacgatctgggcagcttgtgtccggccgatcgggcgcaaatccaggttctaggctcagagggagtggccatgaaggagaaatgggctggcggtcctacaacgctgcatggggtaatgactcgtggatttccaaatctttttttccccggtacctcgcaggctggtgttaccgcgaaccaatcttatatgttcgatcgtgccgcagaacatgtggcctatatcattcagaactccacactggaggcaggaggctatattgacaagatccgtatcgagcccacggcggaaggagaaaagcactggacgacgcagtcagtcgcacggataagtgcattcgcagccacaacagcgtgtggcactggggattatacaatttcgaaccgttacagaagcagcgatgttgacacgatggcaaggcatatgccgtggggagaaggtatggcaagttatgtgaaaattctagaggcctggagagaaagtgggactatggaaggtttggatatcaggtaccactcatctgagggttccaggtaggagttatcagcacgggcgaggagaagggggctattgctctaaaaatattctctgtatgcccgagttccatgtttagcagactcattaagtcgacaagtaatctagcgcattcattgtgtacatctctccagcatttcactcttctggggggtagtctaacactttcaatgaatagtagattcaccttggttagcacaggaattggatagactcggtcgtattagcatagtggtgaggttactaagaacaactttcaatgctttcatataattgatactttctagtaaaggttttgtattgaacgaggcaggaccacaaagcaagtaagggattgatttcacctcattctcatatattggcaatgatgagtgagaggaacaggaaatagacctacgtagagcgtaatcttatagtaataacgtttgaggagtgttcacttttattaggattactatttccgaacaacagcgcgcctttttgtttgcacacctgactacttcaatctgtatcaagcacagtgtgagaacatgtaaatcgcctctgtttcctttgcgcccacagcagtgagctacctgtaatgacaggtagctaatcgcccttcgcctccttcccatccctaccactttcagtacgacggaaatggaaaaacacggtagggtatatcgcgtcgagagttagggtaatcccaatataaaaccagcataacgggctatcgagccaagggtcgccgccatgctccaataatgatcgtcagttttatgaacctactggccattgctatagtgcggaaaaagcagtttcttgggtgagtaggaaggaggcatgaagggaatccagaggacaaaaagcgcgagtctacttaccaggtattcagtgacgcccctggagtactgccgcgagagaccaactgacagagagatccaagacttgccatagtctggcacaacgcgccgctccaatggaagcccagatctgggccaattccatgggccaatgctagatgacctgccatgtacccaactgttaccgctacataggccaagccagcatgtcgcttcatcaacggaacgtgggcccaatcagccggtgcgtgtcttgcaatgatgaataacatgacacaatgcatcacgaaccaagcacaaatgccaccagcccaatgcgagctggatattgggtagatgaaagcatagacagattcccatccgacatcgcagcagatagacatgaacgagctgctgagtaattggtcattcagtgtcgtcctcatggtgctaacgcagctcagcgaccagcaaatgaattgtattagccgcagtacaatttcataggctctggggtccgcgagtatagagtattctggaagtctccattacggagaacatggtgagcaaatgaatatagaataagtgcaaaaggtagactatttggaacaaagccttgcacagcttcgctttcgtagttgatgcgtcgaaagttaaattcttatttcacaagttgactaattttgaaacagtacaatcagaagctctcagatgctactgcgctagaatgtcccaaggggctaggcgtgttcggactaggagacgagacatatctgagtccagtgataggacacgttaagaccggtgtgctgtgtaggtaggctcaggggcagattcacttcccttgctttgcaagcctcgctggttatttctagacgtggccgtagcttgcgctgagggttctggttccttgcggcgcaacactattatggcttcgatattccaaccgtccacgtctatgcattaagctccaaaatgaaccgcacgattaatagataatctgacaatatatgttgggagacggcccggtctattatggcaactatcagggctctctgagcagtgtactggaagaaggaagagcgcgttatctgcgtttcaggttggactctcgatgcgatgagacgaggccctaaaagagctgcagtttctgattcctccgcatcgtcctatctagggagttcggactgggttattagtcattcacatgcagctcagattgccttttacgagataaggggagatgtccgatagtgatagcgagctcctgcaagctctctataggattctcaatcctacgatcgagcaaagtgctgcaggactttccaatgcgctatgatagacattaagcaatcatatatgaaatggcacagccaatatgcaaaccaagagacctgctgctattcatcctacactttcgaactgcaatcgcgtgtttgtagcttatgcaacagattatgctcgtggctgttaccgcatggtatggcttctcgctctaattgcagccaaacgatcttcacatatagttagctcacaattcgcggaggcttttcacaactggcaggctggtcagcaccctgtcaggttcacgagagagcgggcaaggaggtttcggaatgaccaatctgccttattgtgctacgctcaaggctcctgaagtcaccagttgctaatgccggacatctattggtacttcgctcatagatgttagaaccgtcggtcatagcgcatgatcaccatgtacagcattcggggtagagcatggatcaggagcaacttttcgccatcagcagggaaagattcgcctccaccacgcattcatcaccaaccgacattcatagaaaggggtgactgcaacaacgaaggagttagatcgcgatgccgagtctggccaaggatgtcgcaggcaaggagctcggagataccagtcatgcaaggaggacacgggtgcaaccttaaggctcgttccgggcccggcaccgaattgtgtgcataatctggggcctcactgatgtgatatgttccaatatgggtcagaagctcgcatcttctcactcgttggcaagggctgcaagggagaaggagaaccacgcatccatcattttctccttacgatgaagcggcaggagtctaactgggaagcttagcccgctgatcgcagaatgtatgcatcgaataagacgtatccgtcttctagggcgctcccttgcctcgttgagaaggtcgaggcacaacacgttgacggggcgattagagtaaggatcacaacgctggagcagagtacgcgtcgtaaaccatcccgagcagattatctatacttttgtgaagcctttgagcttttgaacaccttgaggtcgttctcagtacggatttgccagtatgactattacacccaacattctagaagactggcgtcaagccaaagccgccgctgttgaagccaaatacgaagcggaacgcgagatccaacttcgagctcacggaaacgtgaaagacattgaaatcacccgcgagtcagcctttgaacactttgcaacagatccctgggcccagcatgtgggggtagacatagaagctcagcgcgagcggttgctagcggaacctggaagccgcaagatcctaatcatcggggccgggtttggaggtctactgtttgccgtgcgtttgatccagactgggcgatttaccgctgaggatattaccatgatcgacagtgccgcgggcttcggtggcacctggtattggaatcgataccccggactgatgtgcgatactgagagctatatctacatgccccttttggaggaaactgggtacatgccccggaacaagtatgcgtcgggcaacgagattagggagcacgcggagcggattgcacaaacgtacgggctggcaactcgagccatgttcaggaccgtagtcgaaaagctggattggaacgaggcggaaaaagtctggacagtagctggttctatgctgggcattgcaaataacgggcaaagggataatatgatgtcttttcagatggtttcacaatttacgatcatggcctcgggttcattcgccagtccgagagtcccggattatcctaacatattcgactacaaaggcaaattgttccacacagctcgatgggactacaactacacgggaggctccgtggaaaacccgaagatgctggggttagccgacaagacggttgccatcattggaacaggggccagtgcagtccagattgtgccgcagctggcaaaatatagctttagctggcggccgttactattactagaggatcc

SEQ ID NO: 5714 - DNA, 9087 bp, Emericella nidulans
atatcactccctggctgcagttggtgctggtgatccattctggaagtcaactctgcagctgaatacgacccattgcaagctcttttggcctagatactgtagatacaacgtgaagactgtagtataacagtacttacttggttcttgatgtctcggcaattttgacactaagcaacctctctcttgtatagggagcggaagtcatcgagcggcttcgctgtcttgcattttgggcagagttttgttttctgggtcattgttgcaagcctggtggttgtgaaaaaggctagtatgctttagaagagtaaatcagaggatacgaagaatgaatttgcggacaataaaagaaaagataaaagcccgggcatgagtaaccggcaataagtggtaatgaaggattgtctagtgctttcattggacaaatgcagagcatcctaaatttgagaaagatgatgctgcgagttggtgaggccggttgttatcatctggcgtcaggatgtgatctgcagtgcgaggaaactgaagattgcttttgcaggcaggaacggcaaatacgaattggcgtagattcactctcttctcaaagaaggaacaatgactgtccgctgcctgactctaacacgctgtgaatttgactgcgggtatacacagcaggacccttcgaccatctattaagacatgcacgctcgccttggattgaactcgaatgtagtcgagtagacagtacagggaaggaaagcgtagattacaccactactcgctgctgtcagcgagactgttcctttctccgagccaacatagtagaaaaccatgcggctgaaccactacctattattgggattgcaagcacttcagcataccttatagaactatcagcgtggccaaccatcttatgtattactagtttcatgcagctgcgagctagtcaccagcatcactaaggttccttacacattagtatagtagttcatgcagccaaaaagggtgcagcggctgtcgattcttgtgcgagggggggtatcttgaatttcatagattcagttaatctggagtcagcttcctgcacaccggcaaagcaggaacaagatagtttgttgtgtttgctgtggttcagctttccgtcgtttctttttttggtcgatatcaacatatgggattcaaaagcaggcctataggcacattgtcagaaaagactttgaaatatcagatagtaaccaaaaacctgactattcctaagctactcctactacatttactctggatctaaccgcggcccaagagaacacggatgcccgtctatggcctcaagcgacactagaaactgtgcactaaccgcgcctgatccagtgcaaatactacttggtcacgtggtggaaccgaaacgggcctgctcccctcaccccacacgttctcagctccatcaaacatggttactggattcgagaccacaaatgaacgtcatacctcctgtctaactggcaaccactggtttcggagactggcgtctcgaatgagtacctgttttagctggcttcctacccgccccggttcctggtgattctcgccggctttctatggtcgaccgggctcctgtccgagcaaactctccgcggggtctggactactgagtagacgcctaaagccagcttctcgtaacccccgccgatcttaatgcagtgtcattcgacccatttgtggcctccgccccggctagcatttcacgcgagttattattaccgagctagcgtcgtcgccaacagggagcttaagccaaccgtcagcgtcggctgttgtcagcttcaaccttacctctctgacgttcagttttatcccgatctgccattcctccggcacggattcttgacccggtcgaagagggtgggtcgtctttgagaaacaggctctggcctggcattcctcacgggagccaagggctgttatggccccgaaagaggatgcgctgccccctggctgggatgatcttgacaggtacgactgcagtcttggcattttttattctataatctgtgttattgtcgtatctttgaatcatgtatctgatctgtatttttctcccgctaacatgactgtcatatcttgtcgacaggcagatggggcagcttttcatgatgggcttcgatggaacgacggtcagccctcagattcgttctctcatccagaagtatcacataggttcagtcttgttaaccgctaagaatttgaaatgtattaccccctgtcatgtattcaccactttataactaacctgaatagctgcagaggacgcaacccggctaattctggagctgcaaacaattgctcgcgatgccggccatcctgtgccgttacttatagctctggaccaagagaatggtggagttaacagcttatatgacgagatttatattcgacagtttccaagtgcaatgggtattgcggctacggggtcaaaagacttggcccatgacattgcttttgctacggctcaagagctcaaagccgtcgggttcaattggatcctagggcctgtgctggacgtattgacgaatgtacggaatcaattgatgggcgtccgcacctgcggtgatgacccgcaggaggtgtcccagtacggggtagagtttatgaaaggttaccagcaggccggcctatcaacttgtggcaagcattttccttcgtatgggaacctggagtttttagggtctcagaccgacgtgcccatcatcacggagtctttagaacagctcagtttgaccgcattggttccatttcggaacgctatcatgaatggtcttgacgcgatgatggtggaaggcgtttccatgtcctccgccggagtcaatgtcatgcatgcttgtctaagcgagcaggttgttgacgacctcttacggaaggatatgaaatttgatggagtcgtggtttcggaatgtctggagatggaggcgctcacccataacattggcgtaggaggcgggacagtgatggccaaaaacgccggctgcgatataatactattgtgcaggtcttttcaggtgcaacaagaagccatcaacggaatgaagcttggtgtggagaacggcattatcaaccggacacgaatagaggaatcgctacggagagtgttggccatgaaggggagatgcacttcctgggaacaggctcttaaccctggggggctgccttcgctcactcaaatgcagccatcgcatacgagtctctcaacaagagcttacagcaattccatctcagtcgtgcgcgataacagaaacctgttaccgctgaccaatgtcttatcttccaacgaggagctgcttcttctgacaccgttagtaaatcctttgcctgcctccgccgtatctcgctcagtgactgagcatctggagctgtcggcggatgcggtagcctgggataggacggcttccgtactcagtggcgagagcgtctttaaggaattggggagatcgctttcgcgtcaccgaaacggtcgtgttctgcatacgtcctacacctcgaatggcgtccgtccgatccacgagagtttaattgaccgtgccagtgccgtgattgtcatcaccgcagatgctgtcaggaacatttaccagcaaggttttacaaaacatgtgtctatgatttgtaagtcgcagttgactccatcaggcgaaccactcgataagccattagttgttgttgccgttagttcaccttatgatttcgccatggatgcaagcattgggacttacctttgcacatacgatttcacggacacggccctggaaaccttggtcaaggttctttatggagagctgacgcctacggggtcattgccgggttctttcaatcgcagtcagaagctccaccaggcaagacaacattggcttgtggaaaactggaacgaggagagagattccgatgcattggacgcgcttctgaagacgatgggtccggaactctctggtgtgacgcccagtagctttcttctgcggagagacgacattgacgaggctcactttgttgtccgaaacagcaccactcgggccctctacggcttctgttcaacctactacttccgggccactggcacgggggtcatcggatcattgattgtcgacccatcgcggcgcaggctctcgattgggaattccctccacaaccgcgctatccgaacgcttatgcaacgaaaagggatgaagcggtttcaactggggtcccgtcttccagggatttacctgggcatacccgccgctaaccctgtcgaaagaaagaaacggcggcagtggttcgcaaatctgggctggaacaccgccctctcccgccctgtctgcaatgtcgctctccgcaacttgcaaacttggtctccgcctgagggcctagtcaacagcctacagagcgcagacgcggtttacgatcttgtccacggatgggactatgctgactcgatcattgaccatgtcaagaccaactccagacaaggagtaattgacatatacaaaattgccttgggcggagcaccgcattgcggcattatcagggcaagaagaccacacgacggggctattctcggcagcgtggttatctataacatgcaggcgacgctggcggagcacatgcccgctacgaaggccatgcatgtgcccacagggggaatttcgtcccccgtaatatggccttcggtcggagaatacgcaacacttttgcaggggttgatcctattaggaatcaagcagatacggagacagggcgctgatgcagttgttatagattgtgtaagctccattttcaatttatctgtgcatgctaacctaccgcaggtggatgtcgacagcaactttgactggcttacagagataggattcaccactttgcatagctatgaagaagtcaactgtgacgcggcgacgtggacaatggtgcctgggccttgattgagggaatgctagatgagcgacgatttttttctataccctattttggttattttgttatatacaatgtatctagcaagaagccttgttgcacatataaagatagccagtatgtattttgccaaagtatatgattatatatctatgcatatatctaggttgattcaggcttagctggtacaagagactactcttttatcttatgcctaaaatttataatgctatctaccaataaatatcgaaggacttgttgatatgagcaccatgcaatgagtcaacttcaacccataggaatcatgactcgccaaaggacgagacccggctgatgtctcggaacgaggacgatcaggatcaggtctcggatgatcagcactgatcgattgtgggaacgagtcaccaacctggcatccttcactatcagtcgtatcaccgccagttggacgacgctacgtgcgcatgttggcgccgccttaaacgcagtcaccactcttagccaaaccgtcgaacactacgcagcgaggaaccgcatgattgcgagtgttcacttcacggacaattaatggacaccaggtagcctgctgtgaccatcgagagattgcgagctgtgagggaccaggaacaggcgccctatcggatcatctcctggcgtgcttccatcagctgtgagacggatgagttttccctcgggttcctctgggctgttgcgctgaaatcctgattcgtctacagtccgtctggtcaagagtcgcgataagtccgtcattgggtgatgctttgagctggtcgaccgtttgcagagcaataaaatttggaaaggacggtagagtgagtgaagggtgggccggccggccgtggcgctgcatcgccaccgacaattaatatccatttcagccattttcggcttcttacggcggcagagattaaatctcgcagcactcgttggctgacgatgaagaagatgaagaatgctggaatgctgcgattccttggccagggcctgaccccgcttggcgcctctgaagctgaagtggtcgacgagcttatcaggatcaagtgcagccttttcacgatcggagagcgccgctggaccttcaggcagagataaacccctgcgcatccgacgcttccattgtcttctagcatccttctgcggcatgtcgaaaattcttgggctgattgagagagccgtcttctgcatggacagagtacagagtaccgagtacaagtacacagcaagccgctcgggaattaagatgcaagaaaggttccacatgatgtcaacgacgagtatagactggcaaaaatacctgatgacaataatactctgtaatatggcgattaatataatgatacagctgttaggcgtggcaggaatcacatgcgaaacggtaattctagaaacgttctggaaagaagacgagggattcaactgcattgagaactccaagcgcggattgggctgttattttccttctgccgtgtttcctcttctcaagagtcctttttttgccccttttcatcatttagccgcagttgttcgacttcggaccagaaccacgccatgagttagaccgcaaggtaagaatacggtcacgcctgcccaatgatcaatgcctgctgcccgtaactcgcggggcggcgatgctgtacgatgctgtacgacaccacgagcgcaatgtgataaagccccgtggcgatctgacttttgtcagattacttcacaaaagccacatgagctcaccatgacggcccaggtcgcggaaagtcgctgaagaggccagacgatggaaagaagccggggggggcgcgggaggctggagcagatccaaatccagcgggagagtttgcggcgtgcgctcagggactttcagggcaaaggatcgagatgcatgtcagccagtctgccagaacagaccaagaacagaccaccgccgatcactttgactttgcgccaatggaagtgtccgatcctacagtcagctggagcgtgaagatgtctgcagggcagaaggatgttctgcgttcatcagtctgtcatcttcttgatccatgggttgagtttcctgggagtgctagagtgctatccagggcgggtgcctctttgcttgtttccccggagtagggaagagggtatttattagtaagattgcatcgattctgacgtggagcgtgattagcctcgcttaaccgagcactatcctagcgtggaataccagcattattatttttcacgcacatagcccctgctagtttggtggcgtctatggtaaataataatacactgcagatatcatcaggaccatcttaagcatcgcaaccagagaagcccgaattgcaggagcactacaattccccagccctttaaaagtggggcactgctcataaacttaactactattagctagtgttatcgcggcggggacctacctgatccggaaggtccataactcgtaccgaggctcgatccatacaagcgaagggatcaatgtattgaccattgcgataccagggctctcggaccgtacagtctgtatccgacagctagatgtgggcagtgctgttttggcctaccgagacgaaagcagcgagccgtctccggtctcagaacgcgagagcctgagacctagtagtctggggccgaaagactactgtggaattggaaaggcactagcccgatccagctgacgaaccagaaaacggcgcgcgacttagacttttcccccctcctccagactgaaagcccacgtcgtccagtctctcgctttccctccactaggtcaatggagaatagtccaatgaccacgctcccttctcctggttctggatggtgagcctggtctagctcctagaggaagactactctagccaccccagtcgccggctccgtcttcttccctcttatctctgcctttatcgtcctagcgctacgctctctccggatcgtgctcctgcctgggggtcctttcgtttcttctttagctcctcccgctagctgcgatccccactactactactaacgtgctctacagtcctgactgcttgctgacttcgggggtggccgatccactcggcgccattcaagacccaagccttggacgacatcgtttccctctccaccaacgtttctgtatagttttcgacctgctcctccctctttttcctcgcctttctaaattccatcctactgctcgttcgattcctccatggtctcgtacctttgacgctgttctcacctggtccgccagctttcaccgtcactagcctccactctctcacgagagaccgtttcttttcggaatctgacgcttcatcgctttgtcttattcatcttcattctagcttgcactgtccatagtgccggcgtcattgtccccgttcgctacagccgaacccttgccatggagggcttcgacaccatggcgttgccctatctggcttccccgctgtcgttagggaatatgcagggcacagattatctcaatgctttgcaaggcatggaccttcctgatcaacgatcaaactttgactccgagacattcgttaggtgcgtggtccttttgttcttttgcaaagctttctctctgacgggtcttttcttctagcggagacgatttgacctttgcccatctatctccacagacactgaagcgattctcttccggttacgaggactcgttcccagagatggtcacttcctttgaccccccgcctccagctgagccgcctgccgactcctccattgaccataataacaagctattgagcttctcgatgccagtatatccgtggactctgcttgattattcttttcgacgcgcctcaatatcaatttcagctcagctgcacggcatgtttttccttgccgagtcaccgtggaccacgtctccgacagaaaatgctccgcctcagcaaggagcagaactgacctgctaccggcgaaatcttttccagatcactggttctgtaacccttcctcgggccctgcgctatatcatcaccgacaccggtgaccggatacctatcgtcgcgcacgaactgacagtgtcggctaccgagtctgttgagggcaattcggtcaagattatttttgtgcccctggaagactcccgctgcaaatgacgctggcaaggatacaagaaacagtagttatactgccgccaagtcg

SEQ ID NO: 5715 - DNA, 6374 bp, Emericella nidulans
aatgtcaaggaaagacaagatgacctgcaggatgagctagagttgctggctcgaagcaattaatccagactatcggggacggctctgatggtgccagaagccgacattgagactgtcaagtatggagcaggtccccggttacttgggactccagcgagaagggaacggaaatggcaatggcgatggtaatggaattatcattgaattatggatacccatcagctgaatgggtgataatctggtagactgggtctcgtcagaccgagttaaacgacaaatgtcatggaaatcctcgcatcttgtcactgctgagtggtgactgagggctcaggttcaggctccaggcccactgccctgagacgacgcccagtccagaacagcccagaagggaaaatgacaagcttgccagaaaaaagcaacaagatgcaatgaaaaacttcacagagctagatcggcattataaaagcaaacacgagatgaaccacagttgcaaacccggcacacgagaaatatctgtttcacatcgcttcttgtagcagtccagtttctgagcactcaggtcattcttcctgctgtccccagtggttctcatcatgatcgcccatgaccacgccactcttgacataactcgcatccgttcgtaattcgtaaacatcctgccgaccttggcgttctcggtgcatgtgtctccgactgccaacttgcgcggcgtcgacgatgaatgaaacaacgtgcatgatcagcatcacctccaatcacccggcccgtgtggagtacatcccaagcgagccgagttcgaaacggatttcagattcattaatcaaggttcgacggtctctggcgtgggtcttcgatggcgcggttgcgagaatcggaacgatatgacatctttgcgcaaacgccaatctgcgggtcaagtcaggagccacaaactcttttggacaaatgaaggcatcgcttgcatgtggctccgagccagctagcaacgtcgaagattcctgctctggactgacgtcggtccgttgtgtgaacacaaaatgtacactaaacctgcgcttctgcctcaggcatccagtcggttagatgttgtcccaagggttctcggtccctcgacgtggactgtgcagaagaaaaaaagagaaaggaaatagtaataatgatagacacagctgccctctcaatctcaagttgatgtgcaataaggagagactttggcggataattccaaacccaggtaacccaggtacactggcgtagtgtaaagcctcgggggcacatatcccttccatctaattagtcaatcctgattctcgggatcaggactaggcaggcggggtgatttctctttctttcttttttttttttttttctcttcttattattttttcctggctctatatggttcctgctactcaacgccaaatacattatacaatgtggcttctatggctggccttgtcacccagccgtcggtatcagaatttgcttagaattcagtttcgcactgtatacatataccggcaacactctgggtccgaaaccgtcacttgatctcgcgatctaacccagtatcggaaaacaggcagaagcgatcacgataaggcaggattaaaccttacccctgagtgagacccagagccgaaataatgggtggcgctggtgctagtgcacgttgaccaaaaccagatcgagatgcagcctgcagtggtaagcaggtgaaactcttgatcgtctggagttggctgtcatgctagcagtactgggttcgtcaccctctggggatatggtacttttgatggcgttttggttgattaggtgcgagccgttgaccgtccatagttgtacgtccatagctgtcttgacgctgccagtgagcaatgaacagttccttgtggcttgctgctagttgacgctgctagcctgtacgcctccagtatccgcttgcttgttcacctactcatagttcgcccgtgcatttatctatcatttatagtcccactatttatttgcatgcatgctgggcgtgacaggatcattaaggaccgaggcaagcgaacgcgtgagaccgtcaaacgagatatcgtatactctgagtagacctcaatggtactggttgtatgttaagagcccgtccaagtctcccgtatagatcaattattaatttgcatgcgaataatgtacatagtggtggtaaatttagtctgtaacgtcgttcgtcacgaatacttggaaaaccggcaatgctgcctagacgaatagaattgcaagactgtacaagaatctgcaaaagatcgtaactttgccgaattgcaaaatacaaatgaaacacactactccatgatttcacgcttagccgagctcaccacaggaccgtcagtagccgtcagtgtctgtcaagccaagttcaaagaatgacagtttaattaatcaggcccactctctcctgtccagagttgtctaagttcgagtctcccagtctctgagtgatcgacgcagcgtctagtcatctgttcttactcgaaacatgccgttagaaatgcctgcaggaacacttggacacttctcccgccgaccccagctactttttgaattttttgcattgtttcaataacttcagcgtccgtgcacaaacttggagcatcagactcagaccgcatgattcacaccgatcaatgggccgagcagcgtcgctaatgaaacgcggcctgccgctaagcccgcggccaacccgactagccggcactaacgtcgacatctgccttcgctgtacgctcccactgggccgctcctctccatccgttatcagggcccagctttctgacccgttcccgccctccggcgctcccgtcggacctccgtcgcagtgctggatcccagtgggtgtcttatctggaggtgaggcagcgcgcccgtaggttactgaggggggaggggtactggagacgttgaccgttggcgagctggaggggacaagtatatcaattcaattgtcaatcatgcaatcaatgcagtccaatctttatccttactccgtctgagcctcggtatcgatttcccaaggaacagcgtaggtcgtatctcccgttgacgatggcgcaccaagactccaagctcttccagcctctcgccatcaacaatggcaatatcactcttaaacaccgcgtcgtccatgcgccactgactcgcaatcgcggtgtcccggagagtcccgtcagcactcccgagaagccgaaccgggtctggtaccctggcgacctggttgtcgaatactaccggcagcgagcgacggatggcgggttgatcatttcagagggcatcccgccctctctagaggcacgttccagtactgggctcgcgatgctccacggactatgctgacagtggctgatgcagagtaacggcatgcctggcgtccccggcctgttcaccccgtctcagatcgccggctggaagcgcgtcgtcgatgccgtccacgagaaaggcggctacatctacgcccaactctggcacgctggtcgtgccacgatcccgcaaatgaccgggtcgccggccgtttctgcgtctgcgaccgtttgggacgacccgacagagtgctactcgcacccgcccgtcggcgcgaccgagcgcgtgccgtactccgcacaccctcccattgagctgacggtcgaccacataaagcgtaccatcgccgactactgcgcggcagccaaggcagccatggaagcgggctttgacggggttgaggtgcacggtgggaatgggtacctgcccgagcagttcctcagctcgaatatcaacaagcgaacagacgagtatggcgggtcacccgagaagcgctgccggtttgtcctcgagctcatggatgagctggccaagaccattggcgaggagaacctggcgatccggctttcgccttttggtcttttcaatcaggcgcgcggagagcagcggatggagacctggacgcatctgtgcaaggagctgaagcgcacccacccgactctctcctatgtcagcttcattgaaccggtactctccgctttccattctaaggctcccttggaagattgccatgactaacctcgcacagcgctacgaacagatcttcagcaccgccgagaaagacgccttcctatcgtcctggggcctttcaaacgtcgacctcaccagtttccgtgagatctttggcgacacacccttcttctctgccggcggctgggaccagaccaactcgtggggcgtgctggagtccggccggtacgacgccctgctgtacgggcggtacttcaccagcaacccagatctggtggagaggttgaggacgggcacgccttttgccccgtacgatcgtagtagattttatgggccgtttgaggataaccggatttgttatacggactacccgccggctacggggcacacagatattcggatcgagattcaacagtgaggattgcagagcgcttctgtcgatcattaggatatatatctttattcatcttggtccatggtggcctgccagggtactaggattgagctaaagtatatcgtgagttgcgggagaggtaaactagaaaagaactgtttgcctgcggcaacatcacctgctaagaatacctggcaaactctttgggctatgtacacagaatacaataaatacgccagcctattccctcaatgggtacctacgtatagttggactagtcacaagtggagtattatacatacaaaggaaggaaagagaggtttgtactaacattatctagccatattgcctagatgtatctttcaacactatatttttgaggatatcatataatagcataactataaggaacctctcatagattataaggaaagcttaccggtatgaacaatatcaagagaacaatcggggcgttcggtgctcaagctacatgccttgatccatagctctagctcaaccatgatcgaattcaaagaagctggtgtatactaaccgaaccggttgctttcccgtattaggtagtcaggatacgattgtacctctcatccacgagagcgtcctcaaagcatcggtcttccagttctcgctgagactacaacaccactatcgctactacaacgcctcggacgcaccgatacattcaatcatatctccatcttaagtggattcctagcagcgcggttctcactggatatgttcatccagacagcacagagctgaccgttgcagaagacttcgagtcttgagacccggctaattctgtgtgcacgatgataaatccaaagaaggagatatacagtcgtcagggtcagaaagaagcatagggttgaggagcctgttcgatgtaataagtctccataacttgcggcaggaccccgattgcgagtgcattcatggtattgccagcgtcatcactcgccgagccaatatcccacgtctgttgacattgcgtaaattgtctgcattattgtggtttactaaagtcccgggttaagtatctgcttgaatatagccttgtatacttaacggctgcgaggcagtgttaagtggtgctgtgcagatctggtgataggattcatgtttctgcctgaggcacaaacgcatttgccgctaacgctgaataggtatagcgtgttgctgctgagacgcatggaaatgggtatgaacacttaactaacatctgtggactggggtaattgatgtccagcccacttcaacctaccggcccaggcaaatttcaccagcaagttacggccactgcctgatgacagggagggctccgtcttcgacgaccgccggcgcccgctcctttcgcgttcgcgcggtatggattcattccactacgctgctctcctgaactgaccatcgcagtgtgataattgccgagtccgcaaggtatctattgcagctaacaatgacagtcactttgctgacgatggagcacccagataaaatgcgataaaacgattccatgttccagctgcaatgtgctaggcatcgtatgcagcgcgggaggagcgcccgctcacgtgcctgctattgctaccaccacggccccaacaccgtcgcgggtccagagtgacgagtagtaagtgcggcaatgacacttcgctgcgatctgctgataggagaacagtgagcagaggtttcagacaatccaggagcaactcaattcaatccagcagacgctcgcacagatcgcaaggccgtctccagtgccaggtgtatcttcagctccaacttcaaatttggctccgaccctgacaccagctccagctccagctgcagctccggcattgacggtgtccagtactcctgtgtcgtctcgtcagacggttcctccatttgaagggcagtctcgttcaccacgagaccttgtcgctaggga

SEQ ID NO: 5716 - DNA, 1991 bp, Emericella nidulans
ttaaagttgatgcgacaggtgctccaggcacccgatctcatctctctgcactacgcagtcatgtcgtccttgcatagagaagaaaagaaaatgcgacagacgcttacccgtatgctctagatgtcaacggtgagtcatgtctagcgttatttcacttgagtttgacatgctcaattaactatgtgggtggcgcttagatcgaagcaccactgcctgtatgggaacggtccattcgggttctacgcacatagcttgcccacagcaggtgacgaggcatgcgagataaggtatggtactgtgcaggccttatccacagcttaatttcagtcgtcttactggagcacgctatagttaccttcccgcctcgggtagaccagcgcccgaacacctccccttggtgaagccatcaaaggcatgctataattgcaagcacgcgaagaagcactgcgacagaactcagcccagttgcgcaagatgcacacggtactgatcatgcccacctttacgaactccttgtccaggaatatggccagaagattgatggggctgacgacccggcaggcgcggcagtccttgtatatacgaccacttcatcaaactggaacacctacgaacgcatcattttttctcatctagccttaccatcagaacggtcaactacaccgtagactatccaatccgtccgcatgtccaaatgccgatgctggttcgattttgtacgtccattgtcgcaaaaccatcgcgatgactatcttactaatcaaacccagtccaggataaacagggcctatctccataccaggtggaagtaggtagtctagcaaactacatgcgctcgacatggattacccaagccctcgccgacccgtgcttgctgcatgccaccttgttctcagctgccgtccaattggacgcgctagccggcgctgagcaaccaagctacgcgactttatatcatcaattcaatgcccgtaggcttataaggtctaggctggccatggccggtctggatcgcccagatgattccacaatagcgtccgtcctcctattggcaatacacagcgttatggattcctggacccctcatgccaaatctcaacctaatccagtactgcacgcgattgtggcactccagtttgtacaagacttggtagaggtgcaccgccagggcctatttagctgattgcttccccgggtgggctgggtacacttggtttcgacgggttcctggcccgtatcatccaagggtaggtgatttgctgctcatctcttgagcagtttgagctaatttggaatttattatacgcgcacaggagcctctccttccttatcattgcctacgatcagcccgagccatttcccatccccgaacaggaagcaccgctcggtcctcataccttcatttggttggttctaaatgattccaacaagtctcccaacgagcaaatcaggcacctcttgctgaatctgtttcaggatgttcaacagttagttcgagaggtttgcactgaaagagagttgtggccgcatgccccgagcaattcatgcataaatgccttgttagaaggattaagttccaggccagatcctgcttcgttggagcaagtatctgagctatcaaagagagagctcgcccttttgagagcctgctccatctccggcaggatcctaacatacgtgctagatgaccgattgccctggtcagagcagcagctagaccgactcctcgaagagctagaggtggcaatcgacaccactgaccgaggaacctggctgaaacacagtccgggggcgaatgtatgggttgcagtcatgggagccgcaatgtgcagagatactaacgggcgagcatcctttatgttgaaggagaattgcgtcgtctcctctataaagggcaccgaatcatcgcactatgtagcgtctcggttctgctaccgctggctaaaggaaagacggctggcgcggtctagaattattgaaatctgaatccg

SEQ ID NO: 5717 - DNA, 5150 bp, Emericella nidulans
aagtttggcaaacgcttgttccacatccttcgccttttgcatggtagcctcctctcgctttcgtgctgctcgggataagttgttcagttccacctccctccgcataaggcggatgacgggagtgttgatgagcgtacgcgtgtcgggacgatggtccggattgacacgcaggcagctcgcaatgacattctttaactctgatgagtagaaatcgggcaggggggcaaattttccttcgcggatcttctgaacaagttggatgtgtgtccgcgcgttgaaaggcggttcccgctggcagagttcgtacatgatacagccaactgcccagatatcggaccgtagagtgtatttctcggctgcacagatttctggagacatgtagaatggtgttccgacataggtggacgcaaagtcgtgggagtgcatcagcttggacaagccgaagtcgcccaacttgacagtattgtctgacccgagaaagatgttttcgggtttcaagtcacgatgtagaatggtcatctgggcctgtttgcccttgaggcccgaaggctttggagcaggccctaacaggtttgatcccacctctgccggatccgtaccatagtgacaccgatatagggccgttaccaattgcgacagtatacgccagacgaaatcctcctcagcgtatttattcgtccgtttcagattcttgatgaccatactaaggtctccaccaccacagtattccatgtaaaggtagaggtcctgactggctttgaggtgttcgcggtggtaataggcgacgatattcgggtgtcggagagagctcaggatgttgaattcggcagtcagctgctctctctcttttgtggacatcttgatatagttgatttcctttcgacatagtatctagacagtcccttgtgagtaggttacaccacaggctcgccggtctgccttacaaaaccatcggattttcgcttcactttgcgaatgatgccaaatgagccgcagcctgatgtggccatcgttggttaacgacactataatgacataggaaatcaacttggagctcataccgattttctccagcacctcatacttgtctgcctccgccagtgcgattgccattgtggccgtctagcagggatcgagcgtcgcttcagcaggtaaaggttatcgaaggagagaatggtggatgggaaagatgatggtcctggcgcattgacaattcgacccggttcaaatattttctgcaggttagtagtcgaagaagtcggatgggaacatggagaaggttgaagctttcgagaagccggtattgtaactggccttggggggtgaatgtttggtggaccttgttgctgagcaacggcaagcgccgcaacaaagccttacctgcataaaggaagcggtgagatccgatgcgggagcgtaaggaacatcattattgagtaacccctggaggtgctgagagagcacacatccctttctgcaaacccattatacacacctcaagtaaacagcgcagtgatatcagcttggtgcagcattttgcaggcgataaagatgtactgctgcaaggatgtgatcaaggccggaatcaaccttggaagcccagcccctttcctatatatcacgtgagctcactcccttatcgataagctgttggtgtcccgcatcctccgagccctccgccaccttcgagcaacattcaacttcttcaacatggaagagaggactgtgctgcgcaaagaccaattggagatcagcttgcacaacgagaagaagctgattcaagaaggaacgatagtcgatgacaaccctctcgacctgagcgagccgtttcgggaactttgcgaagcttgtcgcaagggggatcttaaagtttgtcaagagaagattactgagggagtcaatatcaatgcacgggatccttatgactatactcccttgattttggtgggtgataccctgtctgcttttctaataataaaatctcgccggggtagctggaggcgtaactgacgattcaggcgagtctgtgcgggcactacgaagtcgcccagctgcttctggagtctggggctctatgtgaaagagatacatttcagggagaaaggtatgtttgcttttacctgtgcctgaatcgccgccaagtaatcactttcaaagatgtctgtataatgctttgaacgaccgtatacgaaatctgctcctcgaatatgactattcgaaatcgaccgaccctctccagcctcttgctgcccatatagcttcacttcttgtgcgagatcaacccaaaacgtctgatatagaggtggatgcgggcgatgagactttgtatctgcataaatttgtgctcgctgctcgatcaccttactttcgtcaaaaactgaaggctgctcctgagactacagcatggaagcttcccagtagcataccaccacaggcttttggaaccgcgatcaagtacctgtatctcggagagcctccgagagatttgaagagcggtccagggacagggtttactgagtctgaggttttcgccggaatcaacaagatcgccaaatatctagaaattggcactcttgtggagagtatcatcgacagcggtgacaggaggctggcccgacagagaaggacgacggaaattgcgcgaggacgagaccagctcgaggaatggtttcgagacaatgttttgcgaaataagatacagaccaatacagccaatgtcaacgatgtaaagtgggatcataataatcctatctttgcggatgtcatactccaagctgatgagcttcctgaggacgaccttgacggagaagatattggctctactggccttccaatcggtcccatagtatcttcggaaccagccaagcctccacagaagtctgtccttttcccctgtcatcgagcaatgttgctgcggtctgagtttttccagaccatgttcaattctcccttccgcgaagctcacatgaaggaacatcttcacatcattcctgtgaactgctcgccggatgtcttggagattatcctgacgttcctgtataccgaaagggcagagtttccgctatacgtcgctgttgacgtgctgtttgcggcagatatgctcttcattgaaaaactcaagacaaaggctgcggtggttatcagcactctcggcagcggtagcatgtcacaggcggaagccgcgaaaactacgcaagaaagcgcagaggatgatatcgatatctacgccatcattcgtgcagcgtggatgacacgagtccagcggcttgaggaattcgctgctcggtaccttgcctatcgtcttgaggcttatatagactcgcccgagtttgcagagttgatacaggagtcagcgtctcgtattcaaaaacgacaagaaaccgattctatcgagttactagatgacatcaggttctacctcaacgaacgattcagactacgttttgacgacgcaggcatcgaagagatgatggaggagacggcccagcagcagctcgcagaccagatcgctgctgacgaaggcattgaaaaggtcaccggcggtattgaacaaattgatctcactccgaatgcccctgcccatatcaaagacgaccgatcgcatgagcctcccgctgtgaacggagcgggtcacggccccgtcatcagaacactggatggagagattgcagacgacgaactcagcagggacgcaattaactaccagatcttgatggataagctcgaccgaatcttagaaagcttgaacttggacgcataaagcgttccaagtgcccagctgctctcctacagaagatgagttgacgactgacaacgtaacgccgggtacatacatattcagatggtcccatacgaagatataaacaatagaaagcggtagaattcggtgccgaatactttgctatataaaaatacattattcgatctttttttggcgcacagctacggtaaaatatatgtttcctttcgttttatgaacgtcattttaccacgcataaacacagatatctcaacgctcgctatgctttctgaagaagacgctcacacatacaaagtccgaagacaccctctggttagggcagcgaataccaccgaagccatgggatccagtctgatcaagagactagcacatacgtgagtgcattgcgctgctgattaattgaaaataagtctcctactccagaacctgtgctcttgatagtaacaaccgtcatgcgcaccggccggcagaatcagagcgaacctttgcgcgctcgtgcatacttcctttctttcaattcgagcagcgcctaggcgaggcaaagtcaaatgatatcaaggttcacgaaacgggcattaaagccggaaagccgtaaacctctcattgaaacgtccaccatttcaatcctgacaccgaaattgtcgcagcaaggtatgattctacatcactaggcaagaatatgaggtagggcttgcgttatcatgctggcagcgcagagagcgtgcttcgcagtctcatgatattctagtatgggtcgactgaatcatgcgagattcgctacactggaaactcaaatgagacccagatagagaaattacagactacttgcagacaaggcggattacagagaacctccacccacgaatttgactttcttattccgatcgtatgcattggattgcaatgaatggtacggtgtgctcaccgcgtgggatgatagacgctgattgcccgcacagcccaccaatatccaaaactgcgagatcatgcatctaggaccacttcagaaggttctgtagtctgttttccgtacagttgctacttaacctgaggcgatgaggcacgtcagcctaccaggaggccgagcgcttataggaaatgtggacaagggaacctaatcctgcaggcttgaaaatcaaagcgcaaaaactgcggtgatcacctcaaggctgattggtgatctagtcattctggcccccttctttttcttctggtgcatcctggcggcacagcaatcgggcattacccggggcggatcgccctcgaaacgcatgggcaatctgggtcggaatttttactttccaatcagcagcttgggaacgtagacaatggtcgatgttgggcgtcaatacgggggcaacgcttttcgggggatggctttaatgcaatc

SEQ ID NO: 5718 - DNA, 10019 bp, Emericella nidulans
  unsure (1)..(10019): unsure at all n locations
tattgtacatggcgcttggtagctatctaaatacattgagtgaggacggtgtctgtaagcatgatgccaagaccaaggcacctctactctaaatctggtcgtccatagtgaataccactacactacaacctccccagcttccatcttgctatccgttcctgaatctcatcccacgcgaagggacgcaacttgaatccttccagctcaccctcctgaagcacaacagtaggcttaccagtaccctgtcctttgttatggacctggccaccgaagaccttgcgcgcgaccgtcgcagatcctcaacggtaagagactcaatgtgcttgcacatctccgtgacgccgatcttccggccgtgaacttgcacctggcggcctagatcctcgagctcaaccatgcgcgactcaaggttcattaaaagtgacgagcgcagctggttcttcgcgcggttgacctcctgcggctggagagacgtgtacccggtgtcgagggtgaggttttgaagttcgcggcacatcacttcgaccatttggttgatgcgggtgggactgcatgaagcggagataccgaagataccgctgtctgtgtagccgtgattgaacgcaatgcaactttcgacccagccgtgttgattaagcacgtttgtatacagacgagagtacattcccttccccgggccgccggcggagaaggatccgccacctccaaggagtgtttggagggttgcaagagcgtagatgtcagggtcggaaatgggaagcgcctcgaaggcgaggtggatatagctcaatcgagggagcataggattcgctggcggaggaataggggggagagttagaaatccaccggtgtagtgggaagcttgggtcagatctactggtgcagactctgaggatgagggattattggacccgaattttttgagaaaggggagtttcgaaagaatgcttgagtcggttgtggcaggggcagacgcgaccgttgaggtcggtgtaaactgaggagcggccgcaaattgtccttcagactttgaatctgacaaggtggtgtcaacaccggtccccgacaggctaggtccattgttcgtgctaggtccttgcatatcaccgaacaacgactctgtgagccttactgcttcgtgatgcggcacaccagcaaaggcaacaaccatgcgttcgggacggaagaaagttgctctatacttttccacaacagccttgttgatctcagtcaatctctcgcgcggacagagcagaggatgccctaacgtattatctttgtaggcggccgtgtgcaccaactcngggcaggataagctccggtttcgcccaaatctcgttgatctcgtattcagcggtagcaagttgctgtagaacctcttcctctgtaataaggggatcgcgtatggtctccgccaacaacccgagcgttgtcgggacggccgagttgaagctggcggactggtacattaacgactcacgggaagaggcgcactgaatgttcccacccagtgactctagcgtctcgtgcatttgatccgcagtgcgtgtcttggttgacttaaaggccaaacgatccatgatatggctcacacctcgcaagctcgcatcctcgtagcgagacccggcgtcaacgtaaactccgacacctgcgaaggggccgggaagagattcggtggcgacgcggatgccattcggcagcgtagtgatttggtctaactcggcgggatcctatacaatccaggaatcgagctcaaagtcagccgaatcttgattcacgggtagagcgcatcgcctgttccttaccttggtgccagtttcgttgacggtgctgtaacctcgcgaaactgagcgtgacacccgagcaaggggtttggtggactcgacagcccgtaataatgagcggcgcatattgaatttgtttgtgagtttaaagtggtaggatgtccaaaggccttttctccgaatggcgtgaaggagatttggcaggattctgagcggaagaaaaccggcttatctaagcgtttccggcctttccaacgtcatgaacttctaccgcataccgggctcattaagttcacggacatgctttttctattacaatagactagtaatacttttcttaaactatatcgtggattatgggtgttgagcagcccatgtgcgataccaatcaaggcacgaggcattcgcaacgctggcgccgattttgatattaagcccacagagaatctgcttgacggcgttctcgactttcttgccatttgacgtcaccggaatctcaggacaaacgtccacgattcctggaacatggcgaggactgagttctctgcggattgtagcctggatgcgcgatgcaagatccgggggcaacgagtcgctcggggatgccagcttcacaaacagaactaccgtctcatcagtatcgatcccttcccttctacgtccaacacaaagagaatcctcgatctcatccgcaaagtgtttcaacaggatgttatagatctcagcgctgccgaatcgtacgccggctggtttcagcacaccgtcgcttcgtcctagcatgacaactccgccagtttcggggtttaagcgtacaaagtctccatggtgccagattgaaggaccaaagacgtcaaaataacttttgcggtatttctcaactccaatgggtccaggtggccagaacataactggctgcgctgggaatggccgggtacagaccaggtctcccggctcgccagacgagctgatgtcgttaccagcgtaatcatacacagagaccgccattgctaagcttcggcactggatttcgcccttatacacagggaggatcggacagccggagcaaaacagggaaagaatatcggtaccaccagtgattgaacccaacatgatatccggatggattgacgagtagacatactcaaacgtggatggcgccagaggagagcctgtgctgaagatcgccttcagcgtctgtagactcacagggcggtggggatactctcttggattgagggcagcttgctccagcattgagagatatttagcggacgtcccaaaatgggttatctggagttcatcgatgaggcggggcatggccatctctccagcccctccttcaggatctaaaggccggaaaggcgacccatcataaagaacaatagtggccccgcttgccagaccagacactaaccaatgccacatcatccaggtggttgtagtaaagtagaaaagccgatctcccggatagatatcacagtgaagtacatgctctttcttatgttgcagcagtgtccccaaagacccgtgcacaatgggcttcggggctccagttgtgcctgaactgtacaggatgtaaacagggtgctcaggtggtaagcttgcaaactccagcggtgctgccgggttgctggccgttagcaggaagtcagcgtatgtatatgccttcccttgtcgaagtgaaacctcttccagcttgatttcgaccgacccaattgttgggaatataacgagcgcctccagcttagggagttcgcagacaatttggctggttttggcagctgcactatgcaccttgccattgtaaagcgaggcattatcggcaaataggatcttgggttcaatctgcgtcaggcgctcaaggacagcatggacccccgtatccggggatacgcctgtccaaaaagccccaatggacgttgttgcgagcattgcaacaactgtgttagcatgattccccagaaatccagccacgcggtcacccttttgcaatccggctcctttcagcgcattggcacaccggcgaacacggtctctgagctctttccaagagatatattcacgatctgcctctgtagccgcaatgatagcgacagcattctcgtcaggcgaacaagcagggtacagcagattttcagcaaaattcagacttgcaccttcaaagaactgaggtcgaggaaagagaagcgtctctgagcccattacctgcgttgagtcagaaggtcgagagctcataactagctgcggatagaatacgcacttggtcgtaaggtctgtgggcaattatagatgtatacagccaaatctcctcccagaatttggcaggctccgatatactccagttccagaggtcgttatagcttcttagcggaattccatgcttctcggcgattgtcttcgtgaaatggtagattcgtgtggattcgggagcggagtgcccccagagctcctggggacttgcgggggatccatggccggacattatgccggtagaacaatcaatcagccttggatcttgcgaggtaaaagtgagaaatcttcgataaagactcagaagtggttggcaaggaggggagagtagctcggagaatatggagggaccacagctcattctcatagttaccgggtgttagtgatcccgcctttccctttccgtctaggggctgatccctgagcatcccagagtccatcaagatgcttagaatctgtcgatgcagcagctcgggccttcccaaatcccggcaattcttcatgtatattaaatctctgatgtcttatgcacgagcggcttttgctcaagctactattctatcgttcgtccttattttgttctttgatgctctacaagctggattacccatataccgaggcaatctacttactatatttgcgggccgcagtggcccgcttccgacgtaatatgaagcgtggctaggctgcgactctatgcactacctcgataacaataaagagaaataacatttgcacattggaattttagggagatatgaaggggactggaaaaccaatacttcagtaagcaagcaaatattaaatcagaacaaaaacgaaaaaaccaagtccacgcttgggctagccttaagagcaagctgagagaacgcagcattcactgggtcaggtagtaagctggtggatgaggccttaccgtctcgtattgcatccccgcctcatcgcagactcaatgaaagttatcccgttcagaatcttgacctattacatagccttgcatggatccgtaaatcccggcggttccttgtctgggagaaggactatggtgtggtttcgatctcgggagatctagtaacgcggatactaggtagcgagttcgagctgggctgttttctcgtcagttggggatctgcactggcgctctccgtccgtcaaggaagcggctactgtagcatcgacatgttcgtcaaggcctacagactcggtactgggaaaatctcgttgcagccgctgaagctgagggtctgacaggtaacaggcggtctagctcgtaaactttgtaggttgtagcgagcacaaggtggttgagccctcggtgccaaaagactctcggcatggccctgcccgtaatgttggccatcgggcgattgcctagtttggctgacaagtgaatgactgctctgtcatttgagaggacattgagggcactattcagtccagatgcagaaagacaacaggatatgtgataaacatagcggacggtgagtatcagcaagtctgatccacacagagcgctagaagcaatgcagcctgcggtgggaatactgactttgcgaggctaggagaaaattcgagacctcactggggccgcgatattgctttgcttctctataagaccgtccagattgattgtgcggaaaccaggcgtttgggctactgggttcagaaagaacagctttgaaaaggttgaatttcacgctatatgcaccgctccgtaagatctgttttcgctgccctgaatcaaactgtgtcaccagatctgtggacttctcaagtcatgaattgacaatgtacagcctgttgtctcgataatctgccgatgtcgatcgtcggctaggtccagagatgagtgttgagatcttcgatcctgtacaacatggtttggcttggaatgcgtcaggtgcatgaacatgcgtgatttctgcgaaggaaatcggggttcttgcatgtttccccaattaattcctgtggcataagccaggtgagaagaatctatagagggcacaagactttaagagaacatcggttgttgtccttgtctagatgttgagctgttggcttgcagatgcaacgtcgttgaccttgctgtcagatcttgcagaataaacaggcgtcgcaactattacagacagtttcagatatcttttcagggatcgagtatcgatctcacatgtttgtaggacaaggaggttcagcagtcatctcaaggtggcggcgcttggacatcagcttcaatgagttcaggcaagataccctcaatgcatgcagtttgaagacagaatcgacgatctcaccagtgggtataaaaccagtgcatcggagtaggggtcagttatgccggtcttgagggactactcgtgcttcaagacctccagtggtcgtcatggagcttgcgggaatcccaggggcgaatagtccaacatcttccttcaagaggccatttcaggtatgtagtgagcgcatatgtccagtcagttatattaacttgtgtattcgcattttccttactctactaccttagtcgagtctttcacgactggtcgtacgataaagtgcgcctaaatcctgtaaatcatacagccggccatgaccagtgctttgcaagactcataatgctccaagcctacgttctgacaggtacaagggctgacatatcaatgaaggtctcgctgagtggaagacagcgtgcgcatacacagtgggtgtcgcttgctgggaagcctcggcgcatatttatcttccaacacttatagtaccgtgatccttggatgaatcctccatcgagttgaccacggagtttgacagttttcagctatgataagatgtaagtgcgaatagaagccatgccatgactgatgaatgatgcgattgtgttttttttgtccttaacttctccaaaaattgccacgcagttgtgccacgcattgtgcatacgcccataaaaacgcgcataaaccctgattccagggggtgtaatttacctggtgtgacggtaacaatgctcgattcacattcggccggcggatcataccgtaccacggttccgcgacctgaaaagtcgatcaggagagattgcatggtcctttgcaggcgatgctagctcttccattttccgctgatctctcgattccgcttcaatccttttctccgtcatcttccgtcctctgatagcctgcatttatcagtcatctagcgacatctcagttcatctaggaggtcgtttggaggcttccggagcttccagcctcgacgcacgtgccaaggtacgctaccgagcgaagattacaatccaccgggctggccggagccggtcgctggctcacttcaatccctcgattgcttcagttctcacccactttcgtcgtccataacattttccagctgacattttccttttctttctcatattcaggtcgatatcgtctgatatttagccattttgtcgcgtgattcggaatagaggactcgagactgcgaaaagcctacgcttgtagtgctaccactccgtgcttacttccaggaaagcgcgatagagtactcttaccgtgcaccttagtggtgctgtgacctcgctcgccttgagtcagacgttttcttgcgatgccgcgtcgattttcaaacactcctcccgtcaacgacccctccaatccctcgtcttcgccctcaacccctggaaagagcggcattgcagtcaaggcaccttccaagaccaaccgcttgacccagttcttctcgacctcgcctagagccaaggccgagtctcaaactgcgcgagttgctctccagaacgccagcggtgccaatccgccgatcagctccgcctcactgtccttaccgactatctcgctttcgactgcgacggcggacaacccagaatatgaatgaaccgccaaccacgctctttcaaccaccgtcaccggaagaggctcgtcgtctggctaagcaacatgcccagttcggtccgatcggtcatccgagccaccggtactccagccggcatcccggtggcccctttccggagcctgtaatggatgagcctccttattactatctcattaccacttatatcagttatctgattctaattgctttcggtcatgttcgtgatttctttggtaaacgttttcgcgaggagaattatcgtcacctgaagccccggaatggctatgcggctcttaacagtgactttgacaacttttacgttcgccgcctgaagctacgtatcaatgactgtttcgaacggcccgttactggtgttcccggaagatacatcaccttgattgaccgagcgacggatgaccacaacaaaaacttctaccttaccggaactacgaccgacacgctgaatttgagctcgtacaactatcttggttttgcccagtcagaaggcccttgtgccgatatcaccgaggaaacgattcgcaagtacggcattacccctgtgagtactcgcgcagaagtcggtacacaggacctgcatgtcgagctcgaggagttggtcgccagctttgttggcaaagaagcgtctatggtcttctcgatgggcttcggtaccaatgcaaacatcttccctgcgttggttggcaagggtgatttaatcatttctgacgaactcaaccatgcctccatccggttcggtgcgcgtctttctggagcatctatcgccatgttcaagcacaacgatatgcatgacttggaagctaaactacgagaggctatcagccaaggtcaaccacgtactcaccgaccatggaagaaaattcttgttgttgttgagggtctttactccatggagggctcgatgtgtaaccttcccggtcttattgccctgaagaagcgctacaagttctatctcttcgttgatgaagcacactcagttggagccatcggtcctcgtggtcggggtgtctgtgattatttcggcattgataccaaggaagtggatattctcatgggtactttgaccaaatcgtttggtgccaacggagggtacattgccgccgacaaggtgatgattgacaagcttcgggcaaccaactccggcatgttctacggagagtcaacttctccggcagttatcgcgcagattatctcagcactacgacttatcaagggtgaacttattcctggccagggcgaggagcgactacagcgtttggccttcaattcccgatatcttcgtctgggcttgaagcgtcttggctttatagtgtacggtcacgacgattcgccgattatacctgttctcctcttcaaccctgccaaaatgccggctttttcccatgagatgctgaagcgcaagatttccgtggttattgtcggttatccggcaacgcctttggtttcctcgcgtgctcgattttgcgtttcggcggcgcatacaaaagaagaccttgaccgaatcctgacggcttgcgacgagattggcaacatcctgcagcttaaattctcgaccggtgtcgcaggcggtgcactccccatgaatgacgacatggcgccgcccccagagaaggaagtccagtggcagcagaagcgaaacccgcgaattgtccctccgcggtggcgcatagaggacgtcattaggcgtggtgtccaagatgttaagtcaccactatattaggatgcttgcctctgatgcctgacggttggctttataatgatgacccatctagctatgtccattcatgccctcatggtaaacttggcgctatggtgcatagggggttcttcgctgacgtttctggcgcgctcggtcgaatgctggtcatgccgcgtcgtgtcgaatggcagttttggtgtatcatgcagacaacgacttcacaacaatctcgcttacttggttacccatccttacttttcgaggtgggatcctggcttgagcatcttcgctaagacgcataccatcccgcttacgcctcgtacgaaaaacctgcattaatataacttctttctcgctcccgggattgcccggttcattcactaata

SEQ ID NO: 5719 - DNA, 8204 bp, Emericella nidulans
ggatagcttgccatcgggaccttccctggtggttcgaaacgaatacgacgtatagtatatctagccgaggtcaggaacagggcattacggcccttgggcgcgcacccggaggtcgtattcgacaagctactatatctaaatgacatcgtttttgaccccatagatgcagtccagctattgttttccacgcatgttgatgataacggaatcgcccaataccgcgctgcctgtgctgtcgacttcatcaacccgttcaaattctatgatacctacgccacgcgcgacctccaggggtatggaatgggtctgcccttctttccctggttctctactgcgggcaatgggctgagtcgcaaggatgttttgtccggaacggattctgttcgggtccgcagttgttggggagggatggttgcattcgatgctcagtattttcaatttcagacagcagggcccgcacggaacgagactctacggtttcgcgcgtccgatgatgcacactgggaaggttctgaatgctgtctcattcatgcagaccttcaagatgttccgattgatcctgaggagattacggatacggggatctacatgaacccatttgtgcgagtggcatacgacagcagtacactctcgtggctaaggctgacccgtcgacccgaaaggttgtacagctttattcacaaattcttaaaccccctggttggcttaccccgtttcaatccccggaggactgaagtccttggtcagcgtgtcacagagaccgtttggatcccggatgggaacaacgatggaggcggttcattccaggaagcaaaaaggattgcgtccaatgatggcttctgcggacggccggggcttcaggtaattgtcgagaaccgtaaggagggtcaagcaggctgggagtctatcccgatcccaaattaatgcgtagttgagtgaggacagactctatgtataccactgtacatttgtatttaaaatatttgatcatgaaaggctgtatcatgaccttgtagtggaggcattcttggaagacgaacataccgagtcttgagctatcaaaaccctgaacccttaggtgggttatgcacaaactaatgaatgcgttcgtccagtttgtctgggctgccctttgtgttacttttcttcatattcagagtcttctcactctacagatgatggacaaatctgagtgagaataagtccacaccctttgcccgcttcatcaaaggacagattacattagatgtctcacgttgacccatgagtcctttttaaggtaagagtcagtagcgagcttctaccgtactctcttattcctggaagttcactcctcttttctaccattctcccggtttattttgacctttacatgcgcttgtctcttccagatggctctaggtaggcggttgaccgaacttactaggttgaatgtcaccgacgtcatctccagtgtcgtggaagccttcgcgaatagatctgcacacggccttgagcgcttccaggaaggaaacttatgacagtctttacagcagttttctcaggttcgtttccccttccccttctcagtggtgactcttgctcatgacacccttttcctttaagctcaatctttgacagaatcaagactgaccacaattattcgcaacacaacaggccgccagtgacgagaacaacctcactcatcattcttccccttcttctttcattacacctctctgcacagcctctcagaggttgaaacaatcatggtcacccggattgttgatgttgatgacacagctgccttcatggcggctgctcgttccctcaaacttgaaaaggaatacggcagaactcctgctccttctgaggatgtgccatcaaaaaaaccaaaaaaaaaaacgaggctttccagttcgagcaggaggctggtgatgctcaaggatgcttcgaggctcacggagatgctagggtaaacgaggtcgttgcagatcagaccgttacgcttgaccaaacctccgtcatcggcggcaacagtgtcttgactcccatgtgcggagatcaaccaaaggtagagctggatcgtgggacttaaccaccttcaactcatggggtactccggaagctcgcgttaggcccgctacgtctcctattcctccttcatgtgcactcagcgctacgctcttgattgctttacaatagccgctcaggtcagacgtgttattagcaaagaccttccttcttcgtggcgtacactgacaaggtcttgcccttggtgcatggcggacagatcgagagtgtctctgtcacaccgagcggcaacgctcatgtggtgttttgcgatgctgccgcctgcaaatccttttatgacaagcacccaaacggtatcgaccttggtaaggagaaaaatctcgcaattttcgtcgacctggggcgggaagtggacgtggtcagcttccaactttccctggcgttatcggctggatcgactcgtgttgtccgtgctgtcggcgtgaatattaatgtgacattggctaaactggtcaagcttactactggggcgaatcgcagacttgggaaaattattgatacctatgttcccggatgtgtgagtcaaccgggcatgttctcaacggttactaacctgcgagaaaggctcgctctgttagcttccgcttctgtcaatcggagacgctgttcgctttagagctgccttggtacgcgtcgagaaatacgagcaatacaatgttcattatgcggctgattcgtgagtttctatgctatcctggctagccttacggttttcagattgactcgggcctatagttgtgaggtttctattggcatcacgtcgattggtcgtcccaaaggtaagagtaccaaacactatcttcggagaatactttggggtttgttgaggttggaacgcgtatgtcagttatacaaggcaatattgaggatcatattctgtatctaagtttgtatctatggtgctagtaaaatgaggtcccctccagtgcagcccaaaacattttgtaagagacgacgcaacaagctagtcatccctctaactagttaagcattactttggtcttcacaccatcttcgtaagaacctgcatacaacgcagaggatactgcaaccctttgcttcaaatgatgcaacggctcatccaatagagaattcgcagtcaaatccttccgtttcttacctttttttcaggcctccagtcaacctggaaccctgttccttgcctcttttaggctgttgatgattcagttttgcatattgttttcttatcgacttcgagctctgcaggcaaaggttgcgagggttcacaggctgtcaggcgaatagtgaaggttccattatgggataacatttcacctcgcttgtgagggggaatttctgctgctgcagagaaccttcaagggtcatgtaatttctctactctttattgcggtaaaatatgatttgacagtcactgcaaaggtacagtcactgcaaaggttagtttcagtgaaggatatgacctgtccttaaaatatgttttcgctcatcagcggagaacacatgcaaaatatcttgaggctatcagaacaaaacgattccgcgcgatgccgcttcagagcccatgatatattcattgctagtccttttattagtccaagacgagggagggtatgaagcgacgatattaaccataaggttacatgtggtatggtattgtacgttaccgaacatggtatgacagggcttggctgtattcatatcctttcaacgtcttccccaggaatttacagtctctaggctcctcttacgaaagacatcgatactagcttcgcgcttcctgtcaagcaaggcaaggagacctatcagggtatcctgtcagctaggcccatgctccttgtgccctgaagttgggccttctggtttgggtgggtcgtcgcctttgtggaaattcactcctgggctagcctgagcccctgtctcctcgtgcttgtaagcagcagcagtcggaacaaagagccggcactaagttatgaggtccaacttaaggagacgccttaggcacgctaaatgcaggctcttgcaccgtcagtctttccccttgtgatgatctaaccggtactaacgattggcacacctaagcatgctacctgatacaccggacaagacgggcgtcgataggcgtggacctgaagcggccgttttggcaacaatggacagctgccagcaatagtctgacaaccatggccacttttaagtggggagcggggaggctcgaaccaagcggagatccccgatgaagaacaaaggatcgcagcgtcacagtgccacttccgcagctcacaagatgtggttcttcaacccaaccccttcattcagatttacttctggcccccaggctcttcattaggtattgtcttattaattggtgtttcgagaaggtgagccgatcgaattccatgggtgcgagacatggttctcggaatacctcggattgatggattttcggtatgaatattgattgctgaaaactctggacctttcttgcctccgctaggtcgcccctcattaccctatcacagcgtaaaacggagatgaatcgctgggggtataattcctcgtgaggtagcgtcagcgccgtcgcttcgcctgcagccagaatacagaggaccaaagtcaggacccgacagtctgggtggtgtgatagctgggcattagtacaccgtaagttgaatttggggcacccctgactgcgtgagggatgttttcttctcctgttcccggaactacggcttccacttgcttcgctggacttggagtaacgaggccgtatctttggagctttcaggcagcctcgaaagttcaagctcatgaagatggaggccatccacatttcttcacacttcgcgatccgcaacgcggcatcacatatagtctccgtcgggcctggctaacgctattacagtactagtcaatcttcagatcctccggttacgtaactaaacttcatcaggcaggagctacttgtcaatgttcggttttgactgctgccttggcacaccagctgcgagtaggattgctgcaaggctgaagctagatccccacgagacacgcctcaaggaaggttgaaactctccagctgaggacaaagtgatgtgacgagacggcacttgtttctgacggcgatcagaggctaattatctcaaaagcaggttaatccctgttgtttcgtgacagagattaatctgcgtgctctcatttcattgccccgtgctcagtgcccacatatttccggagaagagccaatggaaataccggatcttgacagattcgattctcagcgattcttctccgagacagataatatgcctcactgggtcaccttgagacgattccggaatacgggtctgtttgaatgccaacggcgatctccatggaggtctaggtctactgctgcgcatatctatgatacaattaggtggaaggtccaacctgtatctggtccccattccgttgccttgtcatgaaccagcctcatgatcaagatgattcggttaatagtcacctcctcgacgaatacaaggaaaaaaccatctcccgtgatgtcacaaagtcaatgtaaacccgcttgtaactgccaatgccgatcaacggctctctttgttagagggccgttgagtacaagctgtgcagcccgtgtgcacagcccgactagttgtgccactctggacgcccaagacactaagggaagtgctacatcacgctcagacaccatgcaggaaacggatacaaacccataatagccttatcgacctgagtactccgtgatccgtagggggactaattatacacttcagacgacaagtgtgttaacgaattccgatctccaatcacaacacgggaggaaccaacggcgcttaagatattaaggtcttggtcctttaggtacgggatatgctggagtacataaatttcgtttccacctgacacggctatcggtatatctctccgtatgtatgatgcctgtgccgtgcaaggcaaacgcaccatatactcaggcaggccaacgaagcaggttaacggaagtgttgcacggcaacctcctcacattccgcgtctggccgactgatgcaatcatgaccgaagagtgcaatatccctgtacagttgtcggaagggtcatttgccctgggggctgacgatgatcgacgaggacgctgagctgtggactgggaacgaggcacaaacgctgaacggacttctgccgctaagctggacaagctaccgatcctataagccttgagccttttttagactttggctagttgtcatttattcgcttgggttgattgcagaaccagggaacagagagagcacagggcaagaacggaattgacgctccgtctgtcaacttgatcggtatatatgctgactaaccgcgcttcaagaattcgaaaatcaatcttgttccgcagtttggcggctgtactccggggaaacttgcggacttgacgaggataaagtttgactattccgggaaacgtttcttctgagccgggtgatcggccaataattcgtcattcggtttcataatatccattcgataaacgaagcatcaaatagaattatgaatttacagaccaatggttccattagccccggccgaaaccttagcagctacgccaagtcatcacctgccgcattcagaattcacatagaagctgctgaagcctgaggattcggcggggcccagtccacttggaaatgacatgatatggcgtgaagtgtgaagtttgaagcctgaaatgagcatccaatccatggctggggattgttgtgggcgattgcccgttgactcgagcacattgtgcacattgtctggcaggtcccttcaactaattgtcgcacctccagcctggccgtatcttgtctcgcgctctgtaggcggggggcttgcgtggaatgtcttactgccatcgggacactgacgttggatcctaatcagcaagaaaattttatacatttccgagacccttggtctcggagttacgccagggatgcgcctcatgtactccaccatcgaaatggtggtttcctgcgctcgcataaccactgccaatgtaccacgagctgactagcatacttgaaatgcgagtggctgacaggaacgatattcaatggctcgattgtcacgttgtcgcctcgccacgccacgagaaggatttgcatggctggcgctcgccgtgacgaacgtgcggaacggcccccaaagccgtattgacggatcctgggtctgccatggcccatggccgcacatcggtaaactagcgataccacaggattaatattgaagcagacacctccaatagtccccgcaaaaaaaagttagtttgattaatggatagagatttctacgtcctgcctactggtcttgtccacagactcgttcgaggcgttgaaactgtggcctaatgcataacaggacataggtccagtatatgggtcttgttttgggatactgtgttacctgcctggctaggatgaacaggttttgtttaggactgtggtcagttggaggctgcaaactgcagtgcataccataatccttggcttctttgctcgtgcggaatcgtgggggccgcagaatgggttaaaaatgatggtggaaatgataaccgagtagctggagtcgctattagaccaatggctgcgacggagaagtggcttactcaaagaatctcagaaagttcagaaatgtggaatatgatggatactatggagtaactgctagagcctgaaccttgggcgaggcttgccctgtggaacttttcgtgagtattcaaaagacctgctggaatagcctaggttattcaacactgacgaaagtactttacagcgagaaagatcaccgcctgagtttgaagcgatatgtagtctggataactgcatacatgttgaagcgagggtggatgtctcatgcgacgaacatatacagcattgatggagccgctaagaacgcaagggctttaagttcttcacaagaaggaaaaagcaaggcgcagtgcagtcatggcacgaacccttggctcaccgacagcaggcgtcaagggtcagacagtattcttagttcaggcaccgcgcaatatccttgattgggaatccaagtgaagcccgcttactcggaccccttgctgaatagttacgatatggagg

SEQ ID NO: 5720 - DNA, 4735 bp, Emericella nidulans
caataccggttgcaaagaacgtttgccgcccttgtttctgggtgtagcagatccagatacctacgtccatgcatttttgtccaatagaccagggaagtctaggatagatcctcgcagaggcgatctcgcaggggcatcaaggaatatgcgaatctcggtgctgcatcttgtttttggttatttgtctatttgagccagaccaccagtatgttgacttgcctctcagtggcgtatttgaagagtttatggccttatgttcacaccgtctggtccagttgagagctgaaagcagcggatgaagagtttatgcctgaggacgaaatcgatagcaatggtacgggtaatctggctgtcatgtttcatcttctgagccgcccgtgatctaatttttgcctcacaaagaaggcattaaaagctgtagatcatgagtgtttggagaactcaattggttactcctctacaaatattgttcattgaatgttgtccactgactagagagcaacatattatcctcggcctcttgatgtgatccactcaagctcaacaaattacgggcagaaggacgggatttacgccgtaccagccatcacggatcttcatcccgccgatatcgatatggtaaaagaacatcagctccttctcttataacctccttcttgctctacatgtgaacagtctactcttcgcgccaattaactccatctctactgcaccatgtccgccacggatcctactcccgctcgaacccctcggcttgaacaggccatcaccaatccggggaccgtcaagatcaatgttaagggagctttcattgtggacgatgaccctcggtccaagagtcctgtaagggaagagggcgttcactacgagggtcaggacattcgcctaccccatcatactggtgtggtaagccatgttgctgtcgatgtgagtttcctgaatttttccttttctccgtggttccccgcacctcttgctccccgcaattgcgcttcgccgacactatcaaggaagcacgctgtgtgaccgactattgaccatgatcctccgcagatcggcggttctctagcgaagctggtatacttcacacgtgagctggactcaccagacaatggcgggcggttgaactttatcaacttcgagactgatcggataaacctttgtctggaattcatcaaacggctgaaggaagagcagccgaacacgccaaagaaaatatacggagctcgatatgacggaggccgagaggacaagaagaccgatctatatcaaagagttagtttctttacaaatattgtggtctagggacagacataccatccagctatcgctccgtcccccgcgattcacaagccatcgtgtaatctggccggccgcctgaataaccagcaagctgcagaacccttctgcgagctgaaacactggagtagaccatctcaaaattttatcccaatttccgagggctacagactccagtaacccatcacggccaaagagccagtcctgaatggacgagtcttgtgcacgtttcccgctaaaggtccgttccacccatgaggtactattatcagtgtcgacggagaaccggttgagtgaccagataagaaggattggaataatgacccattgtaaggagctgatcagaacaatgagagacgatcgaaaccaagattgcttaggtgttgcaagcttcaggacagagaaaaggaagtagaatgtcgcaagcgagagcgaaaaggccagaccgcatgtcttccctcccacgtcgaaggctagtgggatggaggaaacagtgacggtcagaaagagagccgatgacagtatccgaaagagccacattaggccgagtaacaagggcgcgcacgaaaagacacaagcccggagcagtgagaagggaagcaggtggtgggcccaaacgacgcgatgttggtctgactgcctccaggcacgcacgggtcgaacctggaggaggcggaaggtgcagagttgaccggatcttagcaggggaacatcgagatgttcgaggcgagaggaaaaaaggatgagaaatcgattctgatagttgtgaacgaccctttttcttcctggacgttgctgtcgtggaagttttgatcttatcgtgcgggtcggaacaaatggcgcctttcacgtggctcgtgcactactgacctctgagatactgtccaaaaccgacttcaaagcaatagtaggtgtttctatttaagaggggtaatggcgaagaatatgttggatgcaataatgaaaaataaaagttagacgaccgatcaccggcccctggcaaaactttggttagaccagactaggatgcaaccacacggtagaatcgcctaggttttggacaagcggtcaactaacggatcagctagaatatggaaaattctccgttgactagtttactgagtctatattacttagcctgagtcacgtcgtctccatagacggcgaaaaacctggattggatatgcatacaacagtggccattggttttactaccaaggtatagatacgcataagactgaagttcaactctgtggattggaaaaagatacatggctaaacccacctaggtcaaacgaacagtcaccgccgcctgtaattcgagctaactccagcctggactcgtaacctgtcaacagccttgtgcttttcacttcaacccgcccgtgtcatgcctcgtcaagtcgcattacggtgccaggccgaaggtcagacgcagagctaataagctttattccgtaatcagttcatgatacgagccttaaaggtattggttggccctgaaacaaaagatatcccagacagacaatacctagaggctggagtcctccacgggcatcagggaaaactgcacaagactaaatggctctggtatgcgggcttctaataatgtatgctgagcttaggcactctactgatgcttcagtttggcagtgaaagtgcgagagatttgtttgtgcatgttaccagcacaaaacatgactcttgtctgctcaccgcatccttgtggctctgacgattgatacctgactcccattctgcacttgaacgcatacagagcaccatgtgggatggacctctggcgagtctcttgataaagaagcttatgagcattccaacggttggttcatgaaacataccattgctgaggccacctggtttgctgctttgttcgaaaatatagaagtcacaggacactggaaaagggcaccgaaagcggaggatgaattaaagattcttgagctttgcttcccggtagacactcaatgtctgatgctgagggagctgatatcttcgatactaccagtaccgtcaccagaaacctgaccacttttggcgtcaggatggagatccgatggctcctcgcgctctccaaacgcacgctgaatgagttttgcttttatgatggcacccttcagacgttcgtccacatctgtgacagcctcctccgtattctgcatggggagtgatgccggatcgaccagttcaagaagtgtgtcgagattttttgcgagccgagagctatgtgggaatttcgccattcccttgcagacggagggcctcagagtgctctcttcttctgacagctcagtgattgattcgggattcggaagtgtctcatgtgcgttctgtttcatatcctcaagcctctgagcccaaaccagcgctttgccatagagttttcctaactcgatgaacttttcgaatcccttttccaccgcaaatacacttccttctgtgtatccggcctctgcgccatccgctgctcctaggccgaagccttctttgtaaaaatcttcctctagatcaagaaggctctcgaggagattattgtccatgtcggctagtagtgttgagaaccacagcagccaacaaagaaatatatatatagacgccggaagattgcaggctatgtgcgaaagacaaagtcctttaaaaagagtagtcaacgaggcagaaggaggacattatcagagttgtggggttattcgctgctcaagtcgaaagcgtctgccgaaggccgatgattcatccaacactgaaaaaaagctccccgtactagcccatcttttgcccctccgcaaccccgccatcccaattatcgtcatggctacagaacagaaaatcctgcccaagaaaggcgagcgtaacatccttgttacgagcgctttaccctatgtcaataacgtacctcacttgggaaatattgttggttctgtgctaagagccgatgtttttgccaggtgagtcatcctctctcatttaggattatggcgagcaacttcaagctaattcaagatctttaggtatcacaaggcctgtggacatcctacgctgtatatctgcggaaccgacgagtatggcaccgccacggagacgaaggctttggaggagaaagtgacgccggaggagctgtgcgcgaagtacaacaaaatccatcaagaagtgtacgaatggtttgaaatcgggttcgaccacttcggacgcactccgacgcaaaaacacactgagatctctcaggccatttttaagcggctctatgacaatgggtaccttgcggaaaaaaccgctgaacagccgtactgcgagacccatgggtctttcttggccgatcgctacgtcgagggagaatgtccacgatgccattacgatgatgctcggggagaccaatgcgataagtgtggccacctcctcgatccgttcgacctcatcaacc

SEQ ID NO: 5721 - DNA, 9999 bp, Emericella nidulans
ctgtggccatggtgacggcagagacggattagggttggagttggtgaggaatgtggtggccctgacatcataaactcggcatgcaaactacgtcatggcggcgatcagacacgcgatttgcaagcctgccaggcaactcgggtctggatcgggcgaaaaggaaatatcctcgacctcgacctccctgcggcgccgctcagcttctgcactccgctcgtttccaactacggacacagtggtgaccgcttctaatttcgactgacatggcaacgcaaggacatggaacaatttgtggccaacagttagcagacacccttcccgttggcgtcgctgttgtcaatccctccgacgagatcgtcttcaagaatcggcgcttccaggaactcacagcaggccacttgacggtcgggctcgactgcttggcgcagggggtaaacgcggacgactatgaacaattagccgatgcataccgcgcctcgctacgattgcgcgcagagattcgaagggaataccgggtgaagaatcatactgaagaatggcgggcgatgtcacttacgccgctgaaagacaaagatttggaccagtttggcttgggggataaaggaggctcgatatgcatgatcagcgatatcacgccggagaaaactgcggagctcctgcagaggaagattgcagacgatgcagaagaacggaaacagcagcaagagcggtttatcgatatgatcagccatgaggttcgcaatccgctttcggcgatcctgcactgtgcagaggatattatggacgttgtggccgaggatgtgccagaagatgcaaaggcgcagatggcgagaatagccgaagccgcgcagacgatcaacctttgcgttgcgcaccagaagaagatcattgacgacgtgctgatattctccaaattggacgcctccatgctgaccttgtcaccgcgacaagttcagcccaagtcccatgtggcgacattgctcaccatgttcaagcccgaactccgaaagcaacgaatcgattttcggtatcagctcgacaggtcttatgctgatcaagggcttgactgggttctggcggaccttgacaaaatgggccaagttttgatcaacctggtctccaatgcgatcaaattcactgcccaagccgaaggcgagagaacgattcgagtctcgatgggtgcttccaaatgccgtccaccgtcatacccgccaaacgttgtcttcttcgagccgaatgaagaggcattaaaactcgactcgacccaggacccggaatggggccatggcgagacggcatatataatgctcgccgtcaaagatactggaatcggcatcagcgatcagcagcaaaagatgttattcgagcgcttcaagcaagcgaccccccgaacggaacggatatacggcggctacggtcttggactgaacatcagtcgaagactttgccatatgcatggtggtgatattggggtcagcgctaaagaaggcgaagggagcacgtttggcttcttcttttccgtccgactatcctctgaagagcaccctcaatcttcagtagtatccaacagagaggcgtctccagtcgatgaactatgttatcaaatcaatgagcttaatagcaagattccggacgtgaggaatgacacgtcgatggcagacttcgatgaaaaaccaacagtacaacaagtcaacgaggtcaccaacactcccagcgacgaacgcaagcaacattcactaaagctggcaaaggaagtcgatgagaaccccggctcatctactgatgcgcaaaagtggggtagtaatgtcgatgaattcgcgtcaaatcaggagcccggtgcgatagccaccatgtcgaagctcgtcaagggccctcgcgtcctcttcgtcgaagataacgtcataaaccagaaggttgtctgccgcaaactaagggtatctggatttgaggtgacgacggccaacaacggtcaagaagcgctcggcctgtgggatagtgacaagttcgactgtattttaatggaccaggaaatgccggtgatggatgggaatacggcgacgcgggagattcgagccatggaaaaggaaaagggctcgcatattcctatcctaggagttactgcaaatgtccgacaggatcaacaagccgatatgctcaatgctggaatggatggaatcatccacaagccttacaagatgcatgagctgtgcgagaagatccacgatatgctgcctgaggcatgacatatgttgattacgtcattatctgatgccttaggctgtaattgtctgacctcagtttacctctcttggctgcatctgctgtgcatctaccagcagctataggcagcgccatcaatgagcacccaagctgcacatatcgaggcgaacatcttccaggagggaacagagggtcattagcgccaccgcttatcatcctgaaaactgcgatctcggggacgccaatgactattcgggcgcgaacccctgcagcgatacccggtcagcaccgctcgtcaatgggagagacttgataatctaccgctgaacagccgatctgaaatctgtcttggcctagatacataatctattttatcatttggccatgtcgatcggcgcggaggctcggcgcgcctgcaacatcgtacatgcactcatgccagggacctaataactgcctcctgatagtctgtgaattgctatgagggctgcagactctcagtatgcttacttaatcttacctatgtatctggatgaaaaatggcgatttgcggccaccggaggatccgtattcggtcatcgcctgtcgctgttcagattgtcatcagaagtttgcgcatccatattctagtggtcagttagacttgagggtattcaagatattaattagtacctacaaatattcttgagctattgctatattagaccattatcaagcgatatgtctttggcaatcatcgtggaggcgcctgaaccttcggttcaaagccatgtcaagggtcactccaaaaccaagcaccaagttatgcgcgagtcataagcacgcctcgaattgatacacattggagtctgtgctttctatgtcgatagagcaggggcaatgttgacacaaagatcgcttgcatacgccatagatatattttgaaggaggactctattcgataccctctggctgagatcctgaatcgccagccactctctatggcgaagaatatttggacatctcaataagtgtccgggggctcgtctctttgagatgggtaatgttggagcttggcccattggttgactagtattggcagcagggatatgttaaaccggagccgttcgcatctctggagaatcttcaaaagctcctgactattgctttgcactaatagttgcggtagaggcattttattgctttcttgccttgctgttcgcactgtcctcggccaaaggctcttgcagtctgactctatatctaatatctggtcgaattgcttcacagcttgtctagcatgtctaacgctttaatttcatggatttcttatcattctgaggctatctcatactaacccagaccaattccagaaccgctagcgttcgagccttcgcaggacagaacatggcacctaagagacgtggtcttggaaagacacatcaggcagcctgtgtcgcagccgctacattgttttgctcctccaaccagctctttgctgccgaaatctccgcagcatccgtctcatcatcccaagcactcggcagtggggagtcatagaccgcagggccgggcccgttctccccaggcaaggtctccaacgttcgtattccgtgtgcattcctcatccgtgtgcgcgataatatggatgtggttgtgcgcccagtgtagtggcctgggaagattgttttgatctgcgcgacgccgtcttggtctgcctgttggacggcgcgcaggaaggtgttgttgatgttgctatggtcagtgaagtcgccgttgccttcgttgatgacgccgctgtagacgcctgtggcattggcattccacatgtcccaccacattcctggggcgggcttacatgtaatgaagtcgataacctgggcttcaacgatgattgggaccccctcctggtcttcgcgtgcatcggaccggatcaactcgcctggcacgtagtaggggcctgtatcaccgtagggcgtgaggacgtggtgctcgttggcgaaggcggagcccgggcgttcgggccaatgcagtcgcctccgtagagatgcgaggtgttaaggacctcgaccatggagcgcttctgcgcaagggcacgacggtgatagctcactactgcagcgcggtggcggcgggcgcgcgcattggtaccgtgggagttgaggtttccagcgtatgacttgaggcttcggctgcctatgtggaagaagttgcgcttgagaagctgcgtctcgtggctttcgtgttcaaaggtgccgtgcgctagggcgagggccggcgcggccagcgccagcagggcagatgctcggaagcgcatgttactggggagggcagtgagtaaagaagatgctctagctcacaggtatgaagcccttggacgaaccggaatttataccaagctcctgcccgtgctatttaatctgggtgcgctacagactcggtatccgggcaatcagacagacgtctttgtaatagataagctgatgcatcaagctgcgtaattgaagacatgcaaatgtcggcctgtataaccccaaacggaagatctcggggcgatctaagtctgtcagggctgatcatatagtgacccttgccgtcttcctaactcggtacgggtttgcgagctgcacaacctccaatagattagctccactggttgtcttgtagtaaaagaggagatagcactgtttttagttacaagtatgccttcggtcgtaaactagggggctgccgagtactcaattatgctgacgacgcggcgggtgctgggggccacctctgcacgcctggagggcagacatagtctagctatgctcggggtttgccttttgctctcaacggttgaagtcgtccgggtgatccctgatagatgtgctgaatgatgtagatccccaagcacctaagcatctatcctaaaatacagatatacttgaagtatcaattggagccaacctagtatagtctctacttactagtctgcggctcacatatagtaacaactctcttaccatgctgcttcacatcagaactactactgcacgcaaacggtatcaatgaaaggtgaacctttgataggccaccgcaatcccagacggctgtccattgattagccggatgagtgtcgccctccaagtatctcgctcgacatgacgatctctgtccgccctgaacaccattgcgtactggcccccagctgcatattttggccatgttggtgtcaccgcacttagattggccgcctgctgtctccaggcgttcgggtcaagggtagcaatgaagctaacccaggtgctgctaatatcgtgggcgagagagaccatgtcttagtcggtgttggttccgagttcctctgtattcgcgaagacaaaagggagttcgttaccctgttgcgcagtattttgatcatgaaggggaacgttgaaacggtaacagtatgtgctagtattcgcgcgagaccacgttgaacatgcttggcgacggttggcatcgatggctgcgtcgcctggcaggcgagggctttttcgtctttcgagaattagaaataaaggtcgtaacgttagtgataaaggtctgaggcttacagggagaggacgagatgttagcataggcctccgtgagctggcggaccaggatcttaggtaaggcaatgccaggggtaacaccataagactgagggtctaaagcctggtcagcgggggtttattgcaaatttgatatttgtcaaaaatatcatacttgcaacaaggtcaacaaactcctcctccttggtgacattctgctccggcatgtacttcgagccttcgtccgtactggcccccaggatgattgggactttgacgtacttcttccctgtatacagcgaccgactcggctgttcagggacgatatcaccgtcaataacggggaaccaggcgcgcgcactggtggcattgatggcgtcgttcatctgctcaaagtccatattacgcagacatgccatgcgatcaacgtcccagcaagtatcattggcggccatatcattcgccagcgcatagcttgtgatgggaacgactcgctgcgcaatagcatcatacagcggctggaagtactgcgttccattcagccccttctctggcactgggttcccgctctgcatgatcgccgcgcgaaagaggctatcattgcgccctgcatacgcggtaatatggaatccgacacgctggtgccagtgcctcggcctcagatggtaactttgtcaggatcgccccccaacccggagatgttctcctagatccaagcgagcgcagctcgctggtcacggagcccgatgttagtcgcgcccgtatcgcgcagctggttgctgagaggaagccccaggcgctgaggcggtagttgaagctcaccgcgacgatgggttggccgagcttgactgatctgtccacgatgtaggacaggttataccggggctcgctggcgctgccactggaaaagtttgtcaccgtggatgaaaactgctgcggagagattggagacagccgtggctgatttggggcagacaacgttcaggtagagacagtcctcgtccatctccttgtggtcgatggcgattgtggcgtcgtaatcgacgcaggagggggcgtaggaggtggcatcgcgcgttccgttttaggagctggtcaagctgtcggcggggtgaagcgtctatctcctacaggggcctgaagatagtgaatcccagaaaaaagtcttggtcgaactgggtagagtgcacgccggcgtaagtaccattcaacgtctgggcagttggggggttttcagccactgcgctggacagtaggaacagggctgaggttaggattagactcggggttgacgaaaacatcttgcaaaaaccatgatgcataatacatctgtcctgtgggatagaatagtgcactttcttcctttaagcttttcgtgctcagggcaccgtgctgacgcggttgatccagaccacccgctccttagtatagggctaccactattaaaggttaaagtccccgagatatagtcttgggggactcctgagagaaggatcacattagtggctcccaagatgcaccccgcaatcacagtctcaactacgtacaccacaacacgccagagtgggctgcagttagggtttgtggctgcggtggaagtattcatctctactctccacgtcccgcatcattactgctgtgcataagataaactccacggattgggttaatggggcatcctccgcacatggagccacttttatgggatttagggcatgaaatagagcgtatatccgaaatcgccggcgatgagtacatgccgcagacagaacacacttcgctcacagtatacaatgtccttcagtgtagaacattatacatcgtcatcgagaatatgttaaaatctgtggagatgcaggatgatcttcttgatcgaatctccgggatatcttttctggggtcatggtactttagaaattggcaggaagatatcaaccactgccgcgtcgagagaaaattgccatcactcaatcctctccagaagtagattagtctattctatactactccaggacaggggatagatatcctgacctgccggttctgtccgtgttgcgcaatccagcgctcactagtatgtaaaacccagccggtcacgtcccgggttccggtttttgatattaaatgaatgaagcgatgcctcggaagcattggggccccgagtgcactgtgccgctgcgtcgacagtagttagtcctgcctgcaggattgggtgtgtgttggctttggctgcagctaaaagcatataatagaaaacgagaacagaaaactaacttgcacatatatttaccctcgctaatccctggattggtccaagtcagctctttacgtcatgatgagggttctctatctagcatgctccctggctggtttcgctttaatggggaagacccaggcctctttgcgaaattaccccgtagcagagaccaccaacggatcctacaaggatgtatatctacctcactacgatcaggatctgttcttagacataccctctgctcagccgccgatagagattcggcgtttccggaaccctgagcctctcaccacagactggacaggggaacgcccctccaccaaatacgcctttgtaatatgcttcccccctttgcgggcagtttctgaataatcccgggctaattggagcaggaatgtattggctatggcggggaccagaaaggctatctccagagcgaggattgtctttacctgaacgtcgtccgtccccgtgggcttgggaatgcctctcttcctgtgcttgtctggattcacggttagtacgatctatcagtctccctaaagatgttgttcttccacgcagctgctcatatacataggtggtgagtttaagcaaggagggacgatgataaacggtataacttgaccttcatcgtgcagaactcggtcaagttcaacaagccgatgaatgcagtaagcatcgcataccgtctcggtccgtatggcttcttcaacggcaacgaggtagcggctgagaaggcattgaatctgggtctcaaggatcagcggcttgccctgcactggattcaggagaacattgccggctttgggggtacagagttccttgtgtctgttctgtatctatgctgatgccactgtaggtgacccacgaaaactcactatctacggtcaaagcgctggcctgaaggtgtggggtatcatcttcgtgcgttcaacggccgcgatgatggcctgttccgggctgctatcatgcagtcagggccagtcattccccaagggcctctcagtctgaccgcgagctaccaatacaggtacgagggggtggttgctgaggaaggctgctctcatgctgatcataagctcgactgtttgcgtgccttgcccttcgcggttctaaacaatgtgctcaactcttctgcttacaatacaggttgggggcctacagtcgatggtgactttgtcgcccgctataccagcgagcaagtagatgatggctccttcgcccgtgtgcccatcatcgccgggactaccaccgacgaagggagcacacaatctcccaagcctgtgaataccactgaagaattgagaggctggatgaatagtatggttccctactccctatctctatctacccatgctatctacacccgctgacccgacccagcaacatcgagctaccagcttgccctcccaaaatcctctattaacgctctccttaccctctatccaaacactaccaccttcggcatacccagctccgcagagctgggtggcaacgttactctgccacagccctacggcgcagctttccggcgatcagcagcctactttggcgaccaagtcttcaccgcgtctcgacgcaagacatgccaggcctgggctgctcacgccttgtctgcctactgctaccgattcaacaccaagcccacaactaccagctgggtggagggcgtagcgcatttctccgatgtggcgtttgtgttcaacaacctcaacggacagggatacgatgtcaacccatttgccatggggaatctgactcataaatatattgagctaagctatttgatggccggttcatgggcgagttttgtgtccgatctagaccctattcgtggagaggcacggggagaaatgccattagggctgtgggcggagagtctggctggccggtatagacggttgattggccgcgcaatatggttttcgatgcgaacgtgacgagctacgtagaggtggatgactggcgggagaaagacgt

SEQ ID NO: 5722 - DNA, 7131 bp, Emericella nidulans
tagcgagggtctatatcaaagtgcttggtccatataagtagcagactctaatatcaatctctggatgaagagactggtgaagcttatattgagcttcagccagtaagactgtctctgtaccacggtctgttcgtacaaagcgaggctgctgttgagcaatattaacagtatcaagaaactggcgaaggacactaacagccgtacgggagctgataccaacgtaaatccaaataatatatcgagaatatgcatcaattgctgcatatatttcaatgccgtacggagctagcttaagatagccatctattgaccagataaaattaggtcctggagtgatataagctcctcgatggcgttgaagatcttgccagcgtcgatgtacagcagctggagaaagctctttatatatagagaacaagcggtcccttgtacgaagtcagccagtttgcttaaaataagaaatattcctgtatagcatacctgccaatctgaaatccttggttcttaaagtgccgatgagcattcctatactatttccttcaatttgaccgggagcaaggtccgtacgaatgttggtttaggaccctttcaacttcggcttgatcagcaattggatttactgtacgcagcaagagccctttctgatgccgaacatatttcaatgttctaggctgaatattccagccttcaagctgaagaacatgtagaatctcgttctctgagaggccaacttgatatagaagaactttgattcgggcatgaagaactgtgtcttttgaggctgtacgatttgtcttatgaatcccccatatactaaggcgggtcttgatcgtacgctcactaacctgaatgtcatatcgattccctagtagcatagcaatagtaggaggagatttgcctgatttatataaggtagaaatttcatccttgtatggttcaagatttattgacggccgaggcattctgaaagctttgtacaaaggtaagaagttaaatgaaataagaaatacaaggagaaatctccagccctttttaaagcaagcggttggaaaagcggtgtacaagctcgttacgtgctaaatacggttttgcccttttgttcgaacagtatgccgtaccggaagcacaatattgtttatccggcagcgcgtgtacgcaagaccccacaagaaagctgtactcagagtatctcaataagacagagctcggagttcagtcgacccacgtattaatcttatgatccacttgtctacctcattcgcaactaggcttgattgaccttcgcaggaccatggaatatataagtccagttccggtccgcagaaggaagcgttcagttagctggaatccgcgacttccttagcctcacgggcgagtattcctatgggccaaaagagctggatactccaagtcagccttggacacgtcatgcagtatataccgcttcagtacaatcgatgaacataaaaatggattgggaattacataggcaagcggtcggttgagtatgctagcctgcaggccgcctagctaattacctcacctcgtttgctaacctgttgattctcattcgatcggttctcttgcaggttttcctatatctttggggtcatgatcgcgggccatctatttttgcggtcttgctgtgtccatgatggcttcccccggactcgatgactacacgatcgcgtgggtttgtgccttgcctttagaggcagcagcggcccgggccatgctcgacaggatccacacaccaccccagcagatatccgatgcgaatgcctacgacttcggcgagctaaacggccatcatatagttattggatatctaccaagcggggtgtatggaacagtgtcttctgcgaccgtggtatcccgcatgcgtttgacctttcctcggctccagttcggactcatggtcggtattggagggggagtcccgagcgaaagcaatgacattcgattagacgttgttgtcagcaaaccgggtggaaaacatggcggggtgatacaatacgattagggcaaggcagcccagggcggatagttcgagcctacagacgttttgaatcaaccgctgcaggtccttctaacgcatttgagccaactggaagcaaaacaaatgacgggcgaggatgctatctcaaatatcgtgggcgcggcactaaaccggaacgctagcatgagaaaaattctcccccttagatcagcacatggattaccttttccgttcctcctatcaccatgcggacaaaaattctgattgtgaatagtgtgataaaaaccaacaggttgaacgacagccgcgtgaaaagagggcaccgtgtattcattacggcctgattgcgtctgggaatcgggtgatgaaggactcggaaacgcgggaccgactagcacaacagcatgggatactttgatttgagatggaggccgcaggcttatgaatgagcttccaacacttgtgatccgaggaatatgtgactattgtgattctcataagcagaaaaagtgtcaaggatctgcagcgttgacagctgctgcctacacaaaactgctgctgtcagccatgcctgttcttcaaacaacgccgggctcgctgaaaggaaacagagaacggcactgggtaatctcactaccaaggaatcctaaatttgttggcggtcaagatgaaatcacgaagctagaagaactgctcgctatgcaagatgggccccgaaggattgcaattactggattaggaggggtcgggaagactcagatcgccttagaggtaacttaccgcatacgagaccaagattcaggatgttcgatattttgggttccatgcactagctatgcaatgattgagcagtcgttccttgagattgcacaaatacttggactgtttaatgtgaagcctgcagaggttaaggaacagattcaggcatatctcagctccaagaacgcagggaagtggcttctgattttcgataatgcggatgatacggatttgtggttaacggcttatgataaagctccagctcttgaggactttctcccccaaagtgagcaaggccgcatcgtattcactacccgcaactgggagcttgctgtggagctcacatactcaaatatcgttcctgttccagatgttgataaagagattgcgcggagtatccttgagagcctactaatacaaaaaagcttactaaagcatgatagtattatagttgcactcttgaaacatctggaatatctcccactggcaatcgcgcaggcagctgcatacatcaacaagaagcgtttggatctggctgcttacctgacactcttacaagacgaggagccggatgctgtggatcttctaagtgagaaattcagggacccgggacgatacaaggactattgagaatgccgtgatcaccacctggctaatatccttcaagcagattcaacagcaggatccattagcagcagactatttatcttttatggcctgtatcagtccgcgaaatattccgcagtctcttcttccagcccagatatcagggaaaaagagagttgatgctttagggctcctgtgtgcatacaacttcatcaacagccaagagggagacataaatatgcacaggctggtacatattgcgacccgatattggttgagaaagaatagagtgtttagtcactgggtccaaagggtagctgatcaaatggagaaagttttcccaaacgaccactacacaaatcgaggactctggcgacaatacctccctcatgctctggcgttgatgcatgagagcgattttaccaatcaaatggacccacatatcaacctagttgaaaatatcgcgaattgtctattgagcgatggccgatatctggaagcggaggttctgtacgtgaagttactggaattccagaagagaaatggccccgaggatcccgccactctgaggagcatggcaaacctggcatcaacatactggagtcagggaagattgaatgaagctgagaagctggaggtgcaagtcatggagacgtccaagatagtgctgggtgctgagcatcccgacacactgaccagcatggcaaacctagcatcaacttaccggaatcaaggacgatggaatgaagctgagaagctggaggtacaagtcatggagtcatccaagacagtgctgggtgctgagcatcctgacactttgagcagcatgtcgaacatagcgtcaacactttggaatcagggacgatttcatgaagctgagaagctgtttatacatgtgatggagacaaggaagattgtgctgggtgttgagcatccagccactctgaccagcatggcgaacctagcatcaacctaccaaaatcagggaagatggaatgaagcggagaaactggaaatacaagttatggagacatccaaaataactctgggggttaagcatccaagcacgcttagcagcatggcgaacctggcatcaacctaccggagtcagggtcgatggaatgaagctgagaagctgtttctgcaagtcatggagatacggaatatagtgcttggtgctaagcacccaagcacgcttagcagcatggcgaacctggcatcaacctaccggaaccaaggacggtggaatgaagctgagaagctagaggtgcaggtcatagatacggccaagacagtgctgggtgctgagcatccaagcactctgagtagcatggcaaacctggcatcaacctaccgaaaccagggccgatggaatgaagctgagaggctagaggtgcaggtcataaacacggccaagacggtgttgggcgctgagcatcctaacactctaagcagcatggcgaacctagcatcaacctcctggagtcagggacgatggaatgaagccgagaagctagaggtgcaggttatagaggcatttaagacagtgctgggtagtaagcatcctaacacgctaagaagcattgcgcacctggcatcaacctaccagaaacaaggacgatggaataaggccgagaagctctttatgcatgtgacagagacaaggaagatcatgctaggtgttgagcatcctgatactctgagcagcatggcgaacctcgcatcaacctaccggaaccagggacgatgggacaaggcggaaaagttatctatgcaagtcatggagacaagaaagagagtactgggccctgagcatcctgatactctaaccagcatggcgaaccttgcctatacctggaaagctcggggaaagcttcaagactcattggccctaatgcgaagatgttctgaagtatgcagcaaaataatagggccaaaccatccacttaccagatcctcttctcgtgccgtgagtgactggaaagatgagcacagtacagcagcaaatcgcacatctccaccagcaaccactcagactggaatcttagaagatacacaggaaggatttaaaaaataagccatactagttagtacctgtgacagatactagcaagaaaagtaaattgttgcatcatgatatgctttctcacgtaacttcccacgttacaagccactaaccctaaccggattagtatgcctttcaggttagggttgaggagacacatcagtttcagagataggacatatcgagtgggtctgtatttgacagtaggctcggcgagagcagcgattgttcttttcctttgagtcatagcgatttatccatggcgggaaacgaggcaagaccttcatcactgaatgactattgtagctacatcccggtctggaacttggttccgggtatgagggttacttaccattaaaaatactttctgagactgaaagactaccctattcgccgtggagaaacaacgaatggtatctgcaagtgtctatccgctgctagtacataacagtaaacgggatagcatagaccgcgtacatcgggcagatctggagacgaagcattccttaagccaatgccggggtgccgactgttcatcggcagccgtattgctgcctagtggacgatggctctgacctagtctctgtcatatcggtcctatatagcggccatatatctaaacgtcagcgtcttcaatgctcgggaaatgagattctctcctgtggcgattatatatatcttcacgtttttctttcccaatgaggcctatacctgtagaggtacccatatcccctggggtattgtggaatagaggtctttgtagacgcattcctcctcatttcagtacagagttggtcgagctcatctcgtatctcttcgtaccaaactatgttgcctgcacgaccactcaggacaaccatgcggccattaatatgtatcttccagaacaagtagacttcgagacgcgcaataaaagagtatctggctcgttgctatcgaggttcacagtactctaagagcgttctgacgctattctgtcatttgctggacggagagctttgcggtacattgaaacgatctaggacagtgatgcgggttcattcttattgacagtcaatccgaagttgctaagaatctcgatatccctttgctgagttctgtggttagtcttgcgcgatagcaggggtaggtagacatcacccttacacgatgattgaaggacctcttcctcaaaggttgtatgtatcaagcaattcgatagcaaggcgctcctcgatagtctaagtcaaagacttcacaaaaattcgctatagtaagattgctgatccgcgtttttcgggttcggaatatccttatttaagtttctccagaccgagttttactgcattcttcctaaagtgttactcgatccgtttaaggttcctgccttaatgaccttcccacttcctatccgcattcattcatgaagaacccattatttctatcgatagtagaatcatctaccagaaaagcgttctcttcaagtattggaaactctctcctttgccctctacactaatttcaatacgatgagcaagagcctggtccttatctcatattgcaaccgccccaggctgcgaagacaaagaataattaagcttatctaagacaaaatcgattatgcgcttgtctcggttcattgcattgtccgaagcacagcaagaagccctgtataggacatggtcgtgcacagtcaagtaagtgttttggctatcagctcttt

SEQ ID NO: 5723 - DNA, 9323 bp, Emericella nidulans
agtacgctggtcttatggcttccgtcacacacatcccaccgatctaccttgccgtgataccgccgcataactgctttgaagtgcgccgccattgcagcacggaatgccgtagggttggtgatattgactaagtagtcggggttgcagcagctcgagatgagcccatggcctttaactaccatatcgtgtgcttcggcgaactcaaccagacggtcgattgtctcccagttgtagtgccctttggtcgggttgatgaatgaccacttcatctcattctcgggagagaggctctcgaactgctcagcaaggacagtcgcaaactgaggatcattgagataggtcggactaatagccccagacccaatgagaatgccttttcctgctgcctcctttctcagcgggctagtcctggtatcggtgatggcgtttactccatctgtagcggcgaggaacacagtgatgaacgttgcggctctgaacactttcatggttctgcttatgatatgctctctgattctcccgatacttagcgtttaagaaacatgcatatgcagtctctttgttaaggtatttataggtcctggtgagcgtacgcatgacaagttctcccagcgccgtgggtacgtcgtggttcatccacccctacgtggtgttgcagcctgtagggaacaaaaaggacgctaggaatcaatacgaaaacgagtggaactatcttaccagaaggcctcaagtttgttcgtatacgtacaccacattagtcctcataaggttccaccatgctgatgttccttgcttctattagttaacatataggtatcgacattcgaaatcatttgtctatcaaactgtttactgtagattctaccctctttgtttggttcctaaacggctctttgaggcgagaaacatggtattttgctctgataaacctgctgtgtcgtatttggagtaagcacggaatatgttacagttcctttgaaagcaaccacgctaaattctttccccctggtgtagctgtattgagaaacgactcttccctaaaatttaagctagctactgagaattacagttgttagggaagatcgctgttgtcgagtacaaaggttaacgctttcgtgaccaagcccattgtaacaagcaaaaaacacaaaaatatattggtcaaatccaccatttgggaaatataaagacgcaactggatgtaccggtgagcacataaaggactcgacactggacgtcaagtatcagggattcgagtgtgtcctgcatctggaagagtcctatgctactaccgtggtcctacgcagtcgtgtaatacgagtcgtttgagcattcttcgggcttctgtgaaatggtgttccaaaaagacaatcctgtcctatgtagaaaaggaaaaaagatagaggcctggccgcgctagctccccctagccaacattggtagagcaagtgggttttaaggatcagcacatctcggacccgcacattttcgtattcacattgatggtgatgaacggagagggtccatctccaattgcagcaagatgaaaagtcacgtcgatcctgtggagtgtgaattggtagcaacggtaaagcgtagatggaccgaagttacaacccctcttgcttttttggaatgtctccccccttcttcactgttttgacgtgagcaacccgcatcgaattggatagtgcaccctcgcttaagtgtgcttaacttaataattcgagggagcaccagatctttgattgagtgataaagaaagcaaaggatagtaagtggcatatgtagcgatatccaagcccagatagcttctgaacaatggtagcaatgttgctagacaatgctttggaaaagcggcggatattaaacggtccttctctctacatggcctgaacgtaccagggttaatagagttagagtatacctctgctatttatcccatatgttcgaggattgtgctgccacttcataggacgcacacccgtatgcaagcttccacataatgggactgactctagaacgaatttaagaatgtcctctggatggcaagatgttggcagagattgtgcaagttctgcagaatccaataattatttgagttcttcccgtgaatgacaatggactgcctagcgcctgatcttattttccaggttggacgcccgtggacgttgggtatagcttgtacgtatgacacaggtacagtataatctgcctactgtgccagaactgaataggcatgaaatgtaagcattctcaactacatagctcagctcggactatatgtgaaggtaattgtatcttggtaagaggctatttacaccttggcggcaaggaggaaaggaaaggcacgaaagatggacaaacgtaaaaggaaagcacgaaaaagccaacagacctacaagtgcaaggtagtgcaaagcgtcaacttgaatcctttgatcagttcgttaagccgatgaacaaaatgggacaggccacccggacgccactgacccttcgtatggcttggtagcatgtgcatctggcacgcgagtcaattcataatcagagggacgtctcagaagccgcccgacctcctgaggatgcacaatattaaagacgaccatcgtgataaacattagtagagcatcaaagacatacaagaagatctcatgatgcaagaggtatccgttgtttccttgaaggtattcagccagtcggaatatggagcgaaccatgatcaggaaactcgccaaatatagaacatgcagatgtttgctccaggggatgtccggagtacaggaacgtgggattgggtatttcttgatcttccagtgaaagtggcttgctgtgatgatgaagaacccgaagaaaaagatttgaacaaagaggccgacgactatgatgtgctcgccggtcttcatgttttctagatttccactgctctgaatgccaccacctagatcaaattaacatgctgacacatgatttgagctcgtgatatgtgattcttaccggctccttgcagtaggaatgaaagcacatcgcccgtaacaaaaattttcgtcaaccacttcctcctcagtaaggcatgtgattccgcttgtaatatcaggataatgcgaccaaggaacatgtataccgatgccgctaagagggctggagccaacaaaagaaagagtgtctgtacgatatatggtccaagagtccagtggggagtctgtttgctggacatggctcgtccgatatatccaataatttcgacttagcagattagcattgtttccggccaaaggacgtcgaaagtgcacaaacatatgcccccaatgacaaagggaacgaaaaaccacgtgcgagacttgaacatctgaaaaatatgatacccagttgtgccgatgaaaaggagtgtgaaaagcacggcggccgccatgttgggatcatagcgatagaaggcaaaaacggcctcttcaacaccatttgaagctgacatccttttaggcgtataatgagcctcactattagcaaattgttgaaaaccacaataacgagggacaaaaagggtaactttgaagcaaaaggagcggaaggttcctggaagaaccaacaaagaaatatgctcgccactgtactgagaacttcgaatccccctttggctatttatatgacagcaagcttctgatgatgaactgcaggaatcggtgaagtctgtacatgtgaagcacagaggccaccgagaaacaagatatatggagtagtggtttcagactagccgtacgagattgataccaagacccattttcagtctattccatcaggaacgctaccagtacataagactatagtcatctgtattcgtctgctctttcactcagaggattcatgtaaatattaataacgtcacccgctatggacacaccctcggaggcctaggaaagatcttcaagatgaacgtccgaacaggtcgccgcagggctggttaagtctgagtagtccagctgatgtatattctgctgctaaattcaaagatggaacctttgataccgcagggcactgccccaggacagccgcagcaaaccatccttacacaaactccgtcccattggtctcctatcaaggggcgccgcttccgcgccataaaatcgatttaagcaccaccatcttactgtcttttcttaactttgtacatgatgtacaggaacaatgcaactgtggctgttaccacagcttcgaagtcgcaaggacgccatatagagaggaaatcttggaacttacggcttcgataattaacgtcgtatcagagtactgaggggtccagagtcgtcatcattcaagtacagggcattttctttaccaagaatatcttcaaaaacccgaccttgagtcaatcaagaattgtccctcgaattaatgggcgagttcggtttcgtatagacgtccaagatctccactcgtgttcgtatagccgcacctgatccacttgaccctaagaactatagaaaattagaaaccatggcgtatttgcctccaccaataagtttattaaacacgctccgtcgagtgggagggaattttccagcttaccgacctcgcaagatctgatcttgtgtgtgtgtgtgcaacctcctgccattgactgacccgaggaaaaccaagaaggccaaagaatctccaggcattacccttgactcctgaaccccttttccattacgcgctactacaagtaccaagccatcatgaccggtgacgattggaccgccagcagaagctgtgttgctaccggcagtcgctggcaaaggcagcatcaatatagagagtacggttcatgttagccctcatgtattcattaggaaccatgtactgaccggaggcaaattcccatgacgtgagcattaacagggaccctaactctatgcgaggattctccaggctgtatactggtccgtatccaccacgacctgtcataccaccgcaagagtccaccgagttacccgcgcaaattaccggcgatacaagagaaggcctgaagcctcgtcgttccgccggggtcttcccttcaggcgtctagagcgtgatttatgtccaggcccacagtatggtcattgtccaagaaaggtaccaagactagggtttcggaattgccgttcaagtattgactgcagacaagctaatcgacaagaagagtctcactatgtacgtgaagcaagctggatacccctgtgttttactccgtttttctgaatcgcgcgtccacttttaggtatgcgagggccacaattatgattgagaaccgccagtgggattctatcacagggggagcgtctgccgtgctgcaaccgagttttccgcttctatcttagggacgttttacaagcctgcccaagagctttatgattactatgaaggtcgcaagagctgcctcctaaccgtacggctatccagagcccacccacagagattcacaagtgacctaattgttgaggatccgtcagcgaacgagcggccccatagtaatagtacccctggccctaactgctccgcaaagactgcaactacgaagacggcccagatacatcacagcagaacagcgcttctgagtcggatggcaggtgatccgctaagagtccgggcagccgtgttcctacggctcttaaagggatggtggtcaaaaccccgcttgctttggcagaaagactgcgcaacgtcccttgatactactgtgaagaccccgaagatcacggttcagttaccgatatcaagagcggttttaccgttgctggaaagggttcacctgggcataccatcaatactatccttcccggacggggagggggccgccgtcctcttcactgtcttgttcctctttacagatttcgcccatttatagcaaatgactcgtcgtcggacctggttttttattccgtttgtggttgggggcttctgtgagtgttaacgatcccagctgcgaacatgacggattgttgcaaattctaacacagagtacagttgtgtggattgagtatataggtcgtatcctgtccagtttagaaagcccgaattggtcgatgggcccgtacttccaacaaacctttttgctcttattggcccagcactattcgcagcctcaatctacatgatgctgggacgcattgtgatattagtagatgccgaacacctttgcatcattagaagaaagtggcttacaaagtcctttgggtgtggtgatgtgttgtctttcacagttcaggctgctggtgagcaaaacgcctctagtggtgaaagatgagagatacctgacatcagacagataggtggcggtgtgacaaccagcggtactttcgcagcaatccacaacagtgagaaaattgtgattgctggtcttgtcatacagatccttttcttcgggttatttattgtcacctgtacagtcttctacaggcgtctgactaagaatcccacagagcaagcaatgtctaaagatgcatgccttagcatctgtcattgagacttactgcacgatttctattattttcattgtttgtatttgttggttgtttgtgcctaactgccttccattgatgcgttcataaatggggagtattggagtagattatattccaaccagcagcatagagaatctttctcgtccaaatttacaagcggaatatattcctttagcccagaataatctgcgttctaatgtccagtagacacccaaatctcgtaagatcttgtgtcctcctaacatttcggacagaactccgtatctaaaacctagctgatccgcttcagatgagcatgtaactgcttggacgatgtgggccccgaggtcgatacgggtaaattcaagggttgatgttcagtcaaatcatagaagcgcttggctctgggagagtggctttgaaatctgtgataacagacgacggtagaggccccccgccgaagggctgatccttgcagacttgaagacaaccactgatcaggttaagcaacaacggaaacacaattttactttctatcttcgcactgattgtaatgactgtaacccttgccatccgctaatactccgaagagttgcatccagaggcaaaaggtttgtgttatgcaatccatcagtgatcttagatatgggttctggcatagcataaactctttcttcctttctgatcaatatttgctaactggaccgagctccagattgaagtgccctagcatctatgccaggaccatccgtatatctgcccaggtaagttgtggatccgagttagcaggaaactttaacagctataatggggcttttcgagaatttgcccttgcttcttggctcttctcacaaggcctgccaggtaaggaataggatatggcgacggataggaggactagaactcacttctttgaacacggtgcgaaagttgcaaacgccacagtagagccttgttgtggctatcccggcaataaccgctcatgctcaaatacagatgtgtatgtcatttgatcctggaggtcaaaatctgaagggctgaagcgcctttgtgctacgaccattcttcgcaggtcaaggtggaccttctctccagccaatatgtaccagctcctgcgatctcaaagctgctctatggtcccgggaacccgcattgctggcatgcatcgtcctttggtcatggtttacgaagaacgaagaaagagaagccgttcaggagtgggatcctcaggtgttggagatcgtggccaagccacagtatcatgcaacgtaagccagccaacggtctcatcgcgtacacctggtgtgcagaatgtggaaaggcacagacaactgtcatcattgaatggccatggtcgtctatctatgtccggctgactaaaaatgatggcgcacgatgcctaggggcaagcggtacaataccagaggtcggtgtgcccccgacacagaacgtggaatgggatgattcccttacattattggatggccgacgtggccacctatgaatatcgttagcttactaaataatgactaagcgagctcgacccctaggggcaggcgatgccattggacagtatgccccgacacagaatgagtaacacaagacatttccatatcaattgccaaccacgctgtacctcactcatccaatctccctgccataagcggatagttatagcttctggcgtattcatgtgattatgctaagctgtcggagcatgggttcctcccctgtccttggggtgcccggtctgcacagtcttagtcagcatctcattagtatttagcctagcttccttgtgcatccgcacccctgaatactagactcctccatgcttccacataagctcagcgctgaacggcgactcatgcgcggctgcagatacaggtcttaacagtcagcgcgcaaggaaaagacaccgcgcacgccaccacaaatctcgcctgggatgtttctcctgcaaggcgcgacgggtcaaagtaagtctgctgttctgaatactttcccttattggacgacttacgcctgcttttcttttggctgacccgctgtcggttcggttgacgtacagtgcgatgaggttcgtcctgtctgtggttcctgctcctcgcgcgaagaggcatgtgtcttccctgatccgtcagcggcttccctcaagccgaccagctcctctctgcagcggcgaaatctgccacgctcatggagtagcggtagtccccgtcccgtctcatcttacctagaaacatgggaggagcctacgtcgcggcgggtggctgtttccgcaccagaagcacacatcgacctgcggatggatgacctcctgtcgatgcagttcttccatctgcatactgcccaggagatgtctctccatgcaaaacgtagtatggtcaggcagcgggtgattccccgccttgccggtaagcaccattatctcatgcacttactcatcggcttgggcggattcacttgatcacttattgactgaagcaaagtctggtgaagattacaccttagtaccggagaacggggccataccgatacttataaaaggcttcagactttcaaaggaggggcttttattccacccaatgcccagttgttcccaggttcttctctctgtggttggtattatccctccgtgcccgttgcttggtcttaaaacttatgttttttttatcccctttaaaggattttctcatgactcctagaatggttcctatcggggggaggaacaaatagcttctaatcatttcggtcggttttattgtatcaagaaggaagatctttcttcacaatcacccacccctcattttggcatctctaattgtatcttctttttctacttcgccttcttccccccac

SEQ ID NO: 5724 - DNA, 6550 bp, Emericella nidulans
  unsure (1)..(6550): unsure at all n locations
gcttgaaatcccgtgttcgacccggtgtttgttctggctgcgactcgtatccaccctgcgcctcgtcggtccaagcttcaaacgggacggggaacttcgtcagtgccgagcagaaccgcgtcgatgctcgggtttcgtggcatataaggccaattctcgcgaacctggtcatgttgttgcacaggcacgcaatctgttcccaaaccgggctgaccaccgctccgtatcctatcagcattgagcgtctctggtgaaaaagagaaaaaggcctgctgttgacaaggggaacgaaagtccctgctttgggaccaccaacctgcggtctctgtgcgctacatcttgctgcataatggggcccagtgtggctggtttggacgacagcccgaggaagtcggaggaagtgcacacgcgtgtttcccctgtctcagcaggcaatggttccaagctcaatgcgcccatcaaagtcccctacgtcacctctgctttacgacgcgctcacaccgttgcacaagcaaagcacattgcgaagaaaacaaacattggctcgggaacggcaggggacaaggcggctcctcctttggtacagaccaaggacagccatgaagtgctccgagcgcggtctttcaagctccttgatactaaaccgaaagctcggcgtgaggtctttgctgggccgagggaatctagtcattttactgtcggaaacgtgggccagaacggcaaaatattcctgaggtaagactaggcctgtataccttccagtgcatgttttgttaccgcacagccattgagcagcgctaaactttactttctttttttttaggcccgttcaaaacttgtctcgcaaagaatctcgtcgtgcgccagccgtcccttcagatagccaatcgaagccggaatatcttcgtacgcaaggactagatgataataacaagaacgaaccctcacgatggtccaattcgcaactgtccgagctccgtttcgagggcgaagggaatggggatgacgctgcttcaatagactcgggttcgcagcggtacaattcagaccgtcaaactcgacggcgcacgctccaaagatcgtattccttctctacaatctcggaacggtggtcggtttcccatgaggggaccaatactggatttcggtttattatcgaccgggcagatgatagacctaagtcagcagatgaatcttcccatcaacacctagaggttccaattccggattaccacctgggtatgagacggttcaacacgacaaacgttttacatagctcgacgcactcaatggaagcatggacctcaagcactgctcgcaacacttgcttacatgacgatattcaccattcatttgctccctctatattttctggggtgtctgctatggatttaggccggagtgctgccgttagccccgacccaattgtgtatgatcctggcgactccatcaaaccgtcaatcttcgagacgctggtgacagtgatggatgatgagtccgtcgttcgttacgtccctggcaccaggaatatcagtgctgcgacacctgcgcgcatagtcgcgcaaatatcctccgagtccttcatggattatgagcttgtctcagacttttttctcaccttccgaccttacctctccgcaagttctctactctcccttctgcttgcacgtctgcaatgggcaataaaccgtttgcaggaagatgggagaatcataagaatccgcacgtttgcggccctgcgccattggatcttaaactactttgttgatgacttcgttcctgacttcaaattgcgagctcacttctgcgagactgtcaaccgtttatacgacagcgtgaaggctcgccaaggtggtggtatgagtgatctgaagattctcatcgaccttaaacgatgttggcatggaaagtgctcggcctattgggacatcccagaccattacctgtcgtacaacagcccagaccgccccattgatcctgggggcgaggagccaaccgtaggcgacttgcaaaatgtcgccccgactcatggcactcaaatgcctgagctggtcgagacggccagaaatgcaccgttatccacgcatcacgaccggaatgattcttctgccacggctaaaagtatgccaacttcagctggcagtgactggagcgcccctgcaatctcgtgctcattgcctcctaagttacccaaacgccattctatgcccttctcggccaacacaccgcacccggtgcctgtaaaacccaagacagcaggcttctctcaggatcctgcatctccaatatctccagttagcgtgagacgtatcccatgttatggccatatgcacaaacgcagtggtagtttctcggactcttttcgagacgatagagcccccatctcgttgcagcgcttggataaccatgggatttcctcggcgcaggagccgtactatctgggtggtttgattcgcggagaactataccctcccgccgagtcttacatgaccatgatggctcccccctccccgcctttaccacctctggcgcctggtatgcgttttgaccggcgcaatacggatggatcaggcaaacctgctgcttccagctcgggtgtaaagacgatcatcggctctatccgtcgagctctaaacggcaagattccagtttctagtaactccccgcgccccatgaacggactgtccccacgaggaaaaacttcggcacttcctacaaatgttgcattcggatcggatacctaccgggacaaaaagcctggtcccccggcaaagaagccaactaaaattgaccttctatgcgacgaggctctgcggcagtatcgtcaagcgtccggtgagaaagtcgattcgacagacttgaacgaggcaccccgacaatgcactgaacacattgccggcgaaacaccgcaatccttccttcatccacctgttaataaaacgcaaagccatctaaccggtggtagccagtctatagttattgtcgatgacacaggcacgccagtcatgtcaggaggcgttcaaacggttcctgtgggccttgatcagcctcctacgtttcttacgggagagaactccccttcgaccccaaaagctcatacatttcttgcttcacctcgagcgtccacccttggagctgatgagtattcgttgccaatttactatgacgaatccagcttaagacagtcaagaagaagttttgctttccatggggagtctggcggccctgcatcgcagagatcgtactctaatgagagggactcttcgtggtggaagaaaaagtcgtcatctgtacgtctccgaaagtatgcctcattccagagcagtttctcgagacaccgccccgctatggatagcgaactcgaatcgtcaacagctgggtccagcatccttgatattgcggacaaaccacccggacctacgcttagacggagacctgggggcaatctacgtcggatgcaaaatggtctggatgcacgttcgttccgtgactcagcctcagcctggtctgatgtgacctatcaaagttctgtagctgatagcacggctaatacgttggatgattccgcgtcaaggccacagactagtcttgtacctccaaagcctcgattctcgctattgaaaacacactcgtctcagctcattcggcgttctttcgaatccgctattgctcgttttgcgcagattccagatgaagacgacggaggagttgagtctgcattattgaagcttgaagggaaatggaagggtgagccagccggtggcgcgcccaatgctactgctggcccaagtcagcaggcacctaccaaagatcaagaacgtacgcgagaagggttgacaccgcatgattttaacccacgtttcagtaccctctcaagagtccagcagaaaatgggcgacagcctgacatactctcaagcgcaggcgcggatcctcaccagatcctactctgggtcaaacgtagactctgaggactcctacagttctattccactcttagagcgaggacttagatgacgagtccatgaagaagcctgtggatggaggccaactcactgcgcttcagcccatggcagctaatgaggggagctcggatgttggatcatcgcatccttccattgacatggtcaagaagaccgagagcatgaagcgcatcccgcgaggatccagtcttcctgtccctcatcaaaaatccagagtatctcgtttatctggtctatcttcggagctttctgtcgacgtcatagaccccaaggaagccgcggatgcgcggctatcgtttgacacgcgaagtctcaacgagtcgagtgctacaataccccctcacccccttgcacatccaccttccccccctatgactattcaaaatcatcgctcagttcattcatatcgagcttccctgtatcctgaccttgccaaagctcagcccctgaccccagacccatctccgatccataaggctgggaagcgggcaaatatcccatctttggatatgcaacatgtgtcaggagacgttctctgccgatcggaagcagaccaccatatttctgcaatcccgaaaataccaatcgctcaacatgtgccctttgtcctgtcatgcgaatctcacgttttggccgagcagttcactttggttgagatggctgctcttggtgaggtagattggagggaccttgttgacatgaagtggaatagcggtcctccatttaccacgagctgggtgcagttccttatggacgaggagcgccggggcattgatttagtggtgggacggttcaacctcatggtgaaatgggctctgtcagagattgttctcaccctggatatcaaggagcgggctcttaccatctccaaattcatacacactgcggtacatgcacggagaatgtgcaactacgccaccatgctgcagatttgtattgcacttacttcgacggattgctctcggctccagagtacgtgggcgctagtgccgctcgaggataggcggatgttgaaggatttggagatgctcatccagcccgtccgcaacttccatgacctccgtgtcgaaatggagactgcgaacgtgcaagaaggctgcattccatttgttggtgcgtccatttgtaaacctttcccttggattcgcaatactaactgggaatcactaggactctatatccatgacctcacgtataatgctcaaaagcctgcccaggtggcagcaacccgcgagggagaaccgctaatcaacttcgagcgctatcgcacgacagcgagaattgttaagagtctcctccgattgattgacgcgagcacaaagtacaatatcgagccggtaccaggaatcgttgagcgtgtgctttggatcgcctccctctcggaagaacaaatccaggtccgcagcaagctattggtataagggggtgaaggatgacccttactacacacgacaccatctatttactacctatatttctggtatatagcgcttgcataatacccccgcatttttcgactttttttggcgtttagcgactgatatccccgacaatttgtgatttgtgcatgggcggccttcgtcctgaaactaatgtatagtattcgttcgtttagtgtttaatttgttcatgatgatgccagacatttgccttacaatgaccgttttaattgcgtagatctaatgtccgagtcaaagtcaatatgtaacaagtagcagctaataacttagtagcagagaccctgcaattaaaaccgagacctctagtgaggcagcagtggaggaattcagggattgtttgtcgggaattgcatcactggcactcttgatctacgtagtcaccggcaatcatcgtcaggaacccgaccaccgttcgtcttctgctcgtccgctcagcacccctcgtcttccgccgcccttgccgggtttttgtttcactctttactacggacgtattctctctaaatcatccccatggagctactgctccctctactgaatagtcttccgcccctcgtcgactcttgaagcgtgatcgccctccgaaacggtagacgatggattctccccgcggggctacacccgctcatttcgaccacggccacgagcccggagggtcgaattcgtccgacttcgatcctaaaaagcttcctgatgatttaccgaagtccttggacgaccgccgctctttccccgccatacagcaggagacggagatgtacgatgcttggcagggttcgtggatagcctcctttgtttctagtttctcttcaggggaactcaactgatctttcgtggcttgctcgtataggtcaatcccaattcttgacacctgttgctgcgaaaccactcagtttcagtcttgcattggacgatcattcgcatgacgatgagcatgcactgcacacccactacggacgcaacctcgcactccacacggacgacgacaatgaatctacaacgacggctcggctggaggatagcgatgcccggataaggagatgcttgctggngcaagccgcgcacccgcgaggtggactcgctcgatgcggacgaagacccaaatgct

SEQ ID NO: 5725 - DNA, 8534 bp, Emericella nidulans
  unsure (1)..(8534): unsure at all n locations
tcttctctacatcgtcctttcccagcacagcatactcctgccagccggtgtaggcagaaacccagtcaccgacttggaacttggaagcaaggtccttgcctacagcaaccactcgagacatcgtcacgccacgcatgacagcgccgatcttcacaggtgctatatatgaacgactggcagagagccactgacgcatcgccggatcgagcgaaaggtagtgcactcgcacgagcaccttgtcggcgggaacattgtcgggtcgggggacggtgcggagtcgaaaggtgccggatgtgagggatggatcgatggcatctgtaggacgctcgtggaggatgatctgcttgttcgacatgatgatggaaatgaataaaaggagaagagaataagattgagaccgattttgatcccagaggttttataaaggtctaatgacagctgctatatcccaaagccggtggggaattcccctgtgccgaggttcaattcggccaatgattcgtaagcttactgctcagtaagcaggcattattacatcatcaacaccccacaccttcaatccaacgactatcgaggttcagaagtttttctctcgtttttccaaaccgactatgcaaagcacctcatcagtgacagatcccctctcaatcctccccccagagctggtactgcgcgtgttggagtttgccacgctctccactgtcgcttctctaaccgcggtctccaaagcctggcaccaattcatcgactttatccaccaagacgcgatctactcggtcctctccgaaacctcgcaccctcccgaagctactttttcccagttattcgatggtgttccgtcgtacaagagcctatgcgagcgccagacacttcttgcccgcaactgggcagcccagcagccggtcagccgtgagtgtatattgcaaattggcaatgatccagtctggcgcttccgggctgacctgaagcgccgcttcattatttctacctctcacggcggtggcttgaatgtgaccgacatcgattctggtcagctgttatggcacctgccctcgactctcgacaccgataacgagcatgcagtgcgtccgtacgcgcatctcgaataccaggatgggatggtggtctttgatcgtgaaggggatgccgtggaagtatggcaaaccgacgtagaaggcgcaccgcgcggggagttccgccgcattgctgtcttggatcatgattgtcagacaagagggtttcaactctcatactggacgctgtgcgtggtatcaacgcagggccagggctttgtatacgatatgacccagcggccacccagtctgacgacccacctccaaattgaaaatgacgcggttggccatttagatcagagtcatgatgccgtgatctactccatggggccgcgaggatatcatgtctacaataaggcgtctggtgaatacctgggcgcattgaatccatcgcaaagtacggaaaaataccatatactccctccaaaagacgattctcgttcagcaacggagaggctcatccacagtctcgcgggagacaactcacttggcccatattcaggtcttggaccaccttcaacggagcacctgttgcctattaagctggaaaaaggccctctgccaccgccggatgatccggggcatgtgcggaacggtgaagacgaatggggtgcaggtatgcttgatggcgacttgtttgtcggcgtttctcgagctggtcgagtctttgtctgttcgaactggcgcaacgcaatccaaagccaggagagtttggcgtcttgcagtgccatcatcgagtgcgagtctgacgggtcaacacatgacctgggcggctggctgtcggtgcgcaaccaccggctgatgttcgaggtccaagagcgggtctacgttgttgcgcttgatgacaacaaccgtatccaggacattgatcatccgacccgcgcatcgtattcattaattacctgctcaaccccgcagctgactgttcccgtcagttacatggctttgtttgacgacgccataatgagcatctacactgtaagtcttggcccccttgcatagtacacaaacttaactatccagacactcggtcgccgacagccccctccaaacacccctggggttgttgatcctggtgaccaggggggccccatgcgcatctttccaacaaaagccattcgcatcctgagtttggcgcctggtggcttttctgctcggagccagacgtcccaggaccctgatatgtgggagcgcggtgtggaatctgcgggtccaagtcatcaagagcgctatgaggcagtgcggacccggagcctgagtctcattcagttgctcagcatgctgagagaggaaaccgggggagccgaggatgggctgaccgatgaagagtgggaggatatggacgaggaaggtgatcaccagtaaggcagccaacctagccggctacttttccccacggtatgagagcttgcttttgtagcttgtgccgccatcgaaggtgctgcaccaagaagtaaacatccttttgtgaattttgaagcgcgctggcgtgtcacatgtctcgaagccgctaagagtaccatccagatctgacggatatgcaaagactgtctcaaactaacaaatttaacttgctatatcgcagcgggttggtcgacatagcctcgtgctatgtctggcagtcaagccaagtacgctgcatctcttttctgtactgtagcgcgtcatattacactagaagatccctagtcaccgtccatagtacattgtgctgtaactcgaccagctgtatggtgtctatcagaaaccccttgattctcgaccccgactgtggttagaccgttcccgacatccgcctggagagacctgggttaccatgctcctccatgtgtatatgagctatcgtctaagagaagtcatcagcagctgatgcgctgtgccgctgaaatgttgccaaagacgatgcctggcgatgctcggacaatgcccgtgacccaggcagtcggccggggcagaataacaaatgatatcattagcgatagctctagagaacaccacaatcaatcatacttcatacatcgatcaaaccttgctcattgcaacatgggccgctcgcttgcatggcccattcgcttacaggttacattaatgatatttgagccctgtaccctgtagttctaggaagttgtgattctatcccatgtgaagtttacatgaaagttagcttctaagcatgggcaaacctgcaattgcccgacctgttgccatattataccacacttcagatccaagcgtcgatgcgacttgatgccttgtatcaagttcgccattcgtggctgcagatgtccagtcagccatccagccaatacgggatgcaagatatagcgcagaacacgggtcatcttaaacgcaatggccgaaaaataaagcaaggcctaaccagcatcatacagagtggggtgacttgccattaccatgtcagatcctatttttttggcctaaaccgaaagtccaagatgaccttgactcgattttcgtgcgcgcgcgtagacctgctgtattgctgaaaccagttgagcattttcttacaggttgctgcatgatatctctcacatgctcctgataccacgactgcgcgaccaataagacaagatcgctcgtgtagttccctatctccctcccgcctctctcactacatgggtcctttatatattacgtagagagctatcctacaaacgacgatattccatcatattcggaaagctctccaagctcgctacaacatccactatctaaaacgaaaacctgtgcttcctcgctttactcgcaaggatcaactgttgagttcgcgacattaggccaaactcagactgccggagcccaacaagcccatcatgcatccaacgcttctgtacacgtgcacctttttcataactgttacagccttgctctggcgatatttccgggtccccagcacaatcccgtctaacatcccgcggatccccatctgggtgaatttctacgcgtggtaccacgacctctcggtaatagaactttatgacgccttctaccgcaagataatggaagagcacggtgcagttgtggtctggttcacaggcgcctggtgcattttagtcacgaaaccagagtacctcgtcgaaatcttccgcaacgaagacacatacccgaaagtgggcgtgaacgttcgtggaaaaggaagtctaatggggattttcgcaggcgagaatatcatcaactcaagcaaaccgacttgggctacgcttacgaaagtgatgaagccggggtttctcaagagttttgacgcgcaggccatccatgccaaggcgaagaaagttcctgagcggttattgcaggctcagagcgaggttgggaaggggaaaggcgtccctgctacgcaatggatggagaagtacgcgcaggatgttatgggactttgtgtatttaattttgacttgcaggtatagttgacatctgtccgccatttcgatttgaggtcagccgcgggtgtccatttctcgttgaagcaagcaagccatcgtctgagtctgacgtaccaattgactgactcatcttggctgcaggcgctggacgaaccccgtgtaccgtgtgcgcctctgttggggcagattatacccacgatcttcagccggtgggcgttttattttccgactctggatattcccggtcgatattttctctcgcgtaaggcgacgctcgataacatcgccaagtttgacagcctacttaatgagattgttgagtcaactttaaatgcggatgcagagaagcaaccgaaagtagtttcgcatatgctcaagcgggccctggataacggtcaattgacccccgagctgtacagatacaatctgcgcatgtcgttcatgttcgggcatgatactactgctatcttcatgggactgactatgtatgtgctgggaaataatacagtacgcatcgtcctccctgcgccttccctgctgtttcgtgcggctgatactattattcatcccattttctaggtcctccaagaccgcctccgcaccgaagtcctccaatcgacgggcaagactatccatcaactcccctacctgacttccctcctctacgaagtccttcgactgtaccccccagtaaccgaagtgctcaaccacactgtatcccggcccacagcgctcggtgggaaggtcaccattcacccaggcacctggctaggttggaacgcctacggtgtacacactaacccggccatatggggtcccgacgcattggaagttaggcctgagcgctggggtgacactgtaaaggatatccaagccagctttaggctgcagagtacgaaggggaactatatcccgttctcgctgcatgcaaggaagtgccttggacagagtctggtgcttaccgaagtcaagctgttgatgtttgagatggtgagacagcttaagtgggttgttgacccgacgtataagctcaatctgggcggggtgagtagactattttttcttttccggagtttgatctattttcagcttccatttgttttgctttttctgagagagttgtgctctgtattgaccgagatatgcaggttacgtttacgatgctgctagggttgcggctgatcgtggaggagctggaactggatagccgagacactgtcgcggatgagaaatcccagatgcatacttgaggacccagccatactaaacgccccattgagtccgatatggctctgtgtagatcatacagtgatctgatgtgcttgtgcttatgccttcgcaataggctccacgaagtaaggcggcttgatcacgaatattatggtgatgatgcttgagcgggccgagagcgggatgcagagggcttggatatgctttggaaaatggtaaaaagaggattggctggcacgaggaactaactaacgaccaaataaatcgcgttccatctggtctgagattgtaaatgttggcaaatctcatatcattaggctttctgcacctgaagcgtgtaatcaacacgaggcgcttgccacaggctatggcctggatcttggttgtcggccatgccctcaacctggttctaaataaggtttctgcaacatcagtgtacagcttcggaaattgcggcctcgaagcttaggaaaagagatccgttctcataaccttggaaaagggatccgccgccatacaggtccgggaagtcagaaaggttgataaaggaaggagagatatctgcgcttctatcttttgtttctttctctaagcttgtgatactcgtttatacaggacagccagttgagaataatactgcctacgcccgttacagcgctgattgatatatctaccgggcatgcccagttatccatctagtgttactatgtatatcgagctacagcgagaggaacgtcatcggtctcgaagctaggtccgcaaactgcaaggactttcgctttatttcttctctaagctgtaaatcgaatacttaacctgggcccagataacccgggatcgggatatagtcatgtactaagcgctaggtgacaggtccaggtacggttcaatcgagaccggggcagggaaatctccaacaggctcaaatagcgatgtcagatatgcaagtgcctggtacagtgcgaagtgaccaaaattgggattaatgatgactgcagaagtacatcctagcccattacactgcatgtaaattggtatctagtaggcagattctagctcgtaaatccatgaaatggctcttcggtgagattgtgagataggcgccgggatcgcttacgttgccattgataataaatttgctgcaaagagcctggtgatccatagtgattcgacgtgtcgacggcacgatgatggatggtggaagtggtagagcagtggttcgtctacggcaagtagtacaaagtttgatggcctttgagtgcgtaatggcgctgaataataataataataatagtagtagtagtagtagtagtagtagtagtattgctacttcgttcggctgttgccatccggtgcataaaaccagcagggctgcacttcgctgggagataaccccttgtccatttatccaccttcgatatgtaaatatatcgccagatagcgattttcggaaaggcaaggcctgggagtcttggatcagcctgttcacaagctggaactggccaactacatcacaccttagctaccacttgacaggtctctccactcctccacaacaaagacccaatcaaggtctatcacttcatggttatatttcctttatcctagcctcgagttctatatcggggctaccaaaaagccggcggggttctcggccttgtctggagcttgcgcagactgctatttatacgctgggacgagagtatcatataaaaaggccgcaaggcctaccttgccagtgccgagttgtacagagttttgggctttgcgttgcattataaattttcaccagtcagtcaagcagcataaatagactttgaaatccatcatcgcgctcactccgggctgttacacatgatcccagcctgatactacaccaccgatactccctacagatacccatatacggacgtcttgatactgcgtaagcaggtcgagccaatcaagagtgatctgcaatcgccacttgccgttccggattcctcaggtccaagaatatcactgagaaatggatgtctacaggagtctagtaccctcagtagatctgattggccgtgtagatgcaacgcaatgcaaagcggtgttagatcaaaacaagattattgattgccagctcgatgcgtgctgactagggccgtgtttcacagctagccacaaagtgaacttgcgcttattggcagatgcatagttgatgccataaagttttttgctcgcgctatcgtatgtttattatctagtaaggcagttatattgtgaggatctagctcagcccgtgcacgacccctggaggcatataatgcgcccttggctggtgcacctgtagcctgtaaacccaagcaagtgctgtgctccaagtgctgtgctcctgccaaacaagtgtatcctgtccacgttctcgcaaaagaccctgcactgcatcaccgcagtccacttcagccatcagaatgtctactggtagcgtaggagcctacgacgtcatcgttgtgggcgggggcaacgcagcattggtctccgccctctcagcctaccaggcgggcgcccgcgtcgcagtattcgaagcagcaccggagaccgagcatggcggaaacagccgattctcatcggggatcttccgtattccgcatggtggactatccgaggtgcagacattgctcgatggcagtgtgctcgatngatgtcgcgcactgccgctggcngtcgtacacgccggagcagtaccgcggggatattgagcgaacgagcaaaggacctggggatcggcgccagtggtctgtcatgctgcagcatgcatttaaacactcaggggatgaaagacgagctcgggtgaaat

SEQ ID NO: 5726 - DNA, 10015 bp, Emericella nidulans
  unsure (1)..(10015): unsure at all n locations
catagacgccaggtgagttaggaatcaaggaataacccccaaacaagggctcaggcatggctttttctgctaaggatgtcagagcatctgatcagattatcagttatctttgtacctttgctaagcagcccggcctatagttgtgcaggagatctgcgcgcaacaggaggctgttgcggtgaagtctaacaagcagtactggtcaaatacgtttggccaagttgacaagacaacttcacctaacgcgacatcagtttgtggtatgcatcatgctatctatgtggctagtgacagttttcttctataagaattttttttagcatgcttcttaccctactttgggtgcggcgcatatgcggcttttcatgggagaaagtattctgcgcaggattttgatgcttcagtactgtccccagacctcttgtcccgaagaaggatcagcttactctatgaagtatgtgaaagtatgtcaggataacggctaacttgcgctttgattttttgtagctgtctaatagatgattctcatagtcacggtgacaatcatccaggtgagcagtgtagagagtgtgctgataaacagatttgtttgttggatcggtattgaatagagacagacagtgaggtctctttaataatagaggtgggtattgattctttctatacctatgtaaccatagacagatgatatattggtcttcgaactgaataccgttccttagttatcgcctagaagcatgcggctgcaattagtttctactaacatcatacatctagagcacactttattatattgcacctatcgtatgactattccctcgtttaagaaaaccatgcgctgagtatcattctgttgatcaaatagattcaaggtccattgggagtggaatgtattcggtaaatgcttgtactattccgctgtataaggtcggcatccactgcgcactctagctcaggcttatagatattacatagctcttcagaagagtgaaacttacttatcaggctcttcgttcaggtcgtttcggtgaaatgctggtgggtcatcatgggcaggggttcacctgggagcgggcggaatttatattccaccttgaacttcacatgatatgattcgagatcattcaaaaagactgcaggcattagagtcgcttataactattggtagttatcattccagcaggaggaagcatgattgacaagtgaagaacccagatggggtggttgtcatataagcttggtctgcttgcctcatatagctctcaacaacaaacttgactgttcctttcttttgcgtttatgcacccacgattccatcttcataatcggaaatactcatctgacttttaatatggcgacgaccagcatatcactcacttacgcgttcacccttcgcgtaaacatagctgttccaccatacccaactggccagacgccctcaggcctcagggcttactacgacatccaaggcggcaccatgaagggtcccaataacatgccacaattcaacgaggggagacagcctcctccaacgcacggacggttgggcgaatctggaaattcactaccctgctgtgaccgagcagggggagtggctctatgtccggtatatcggagttttgcagggcactgaagctcttagcaaaggtgagtatacccacaacctaggatcaactcgctgactgatcacttcgcctgccacaatagccttttccaaagatccttcggccaagtgtatgcgggctaatctatccacgaccttatcaacgagtacctatatcccgttcatcggtcgctattcccacttcaggatggttcttacaagcgaacggagacaaaggcagaaatgcccaggcagagtgtatttggctcaatatgagagcaacccacatttgttcttgagcagtgactctgccagcataaaccttgttaccgatcagctgatattagccctgggaggccacaaaccgcctttatggtcgtaggcgaggtcggcttcgactcaccagcgcagaaggacgtagggagttaacagttcaaagttaaggtgtagatgcggataagaacagctggtttgtagaattggagattttagtaaatcaagaagctataggcaccaacatctttgatgtacgtctttatattcctccaggcgggactagatgtaatcagggattttggccgttctggatgaccgatcttccaatccaccaatgtccctgggttcctcaaatgctgattcctagtgctaagatgctagtcatgcaaaaatagtctggattggtgatattattcacacatgatggcacggtataggtgcactcctcgagagaaggccttctgccgctccgcaaagtatacgtcaagtcaacgatgtgagagcacctgtgagatatcactctctcaaccatcgcttaatatttaaagtacaacttaagagagccgtcaactcggtaaagtagactttatacgttgacgtcatatgacatcacggagctttctacccccgcgtataacaaccatccactgcttgacttccaaggtttttaacccaaatcttaccaatattgttcgatacagacatggtgcgaatcttcatcaccggctcaagcgatggtatagggcaggcagctgccaaggtcctttccgagcagggccactcagtcgtccttcatgcgcgcaacgccgaccgcgccgcctcagcccaagaggccgttccaggcgccgaggccgtcctggtgggcgatttgagctccattgctgaaacaaaagccctagcagaggaagcaaacaagttgccaccgttcgatacggtcatccacaacgcggggatcggatacggggcgacggccagccaggagatcaccgcagataagatctcggctgtctttgctgtcaacacgcttgcaccatatatcctgacctgcttaatgcataaaccaaaagcaaggcttctttatatgagctcggatagtcattacggcggtgacgagagtctacggaacatcacgcagtcccattcgtacgggaataccaaactgcacgatgtaatgctagcaaatgcattctctcgacgatggggcaacgcgatccaagtagttagcatgcatcctggctgggtgaggaccaaaatgggaggcgtaatggcgcctggggcgttggacaggccggccagagtcctggccgactgggcaatcggaaagggagatctggcccgcctcaagagcggtactttctttacgactagcggcccagaatctgcacatcccggtgccgataatgtccagaaacaagaggagttattgcgcatctgtaaggaggtgtcgggcgtgggggttccgggggggtagcaaaacgacgggaagggggttcttatgattagcaatgcaaattcaagttaagtcgacactattggagaggctgcatcctagagctgttgcttaacctgagtttagcttgtaggagccggttgtccggttctttatcggtgcattggcactatctgaatagactgagacggcgccaccatactattgaataacaggcctgcggtacacactttagaggccagtccagaagctaatctgagcctaattgtacactccgaagatcgatcggcctctagatactcggtctactaaagtctaaatcaatactctagcggctctcgcggctcgtgcacttaatatgactcgggcatccggaggagtctaagactcagactggcataggtaggagaaagctgaccccgctgatcagtagcaattattgtattgcagtaaattattgctgtagttaagggtatagcctccaaaatgcgcatctcgtccgtcattactccctacttcgccaaaccccgactccatctttgagcgcgacctctaccaaatacacataccgctcaatactctttgcgctgtgatatccctcattgtacatgactcggatcttcagcttgccctggtatgaccagacagcaactatcacctcctcgcccgagcattcggctgagagagagaactcctcgaccgtgaacccgccatacgatgaggctaaataatcgtcgatcttgccaaagctgttgactattggggcactgtagaacgtaggacacgacggtggatcttggctctggaaaatctctgcaaaggccggctccaccagggccggcaggtcggggtcgctctctgcatctagataggcccgtttgaacagctctgctgtctgccagaaggtagttaccggtattgatactggccagattgcatgctggggcgagatcgcattcttagaagacgggccgtccttgggccggcgcatatcgaggacgatgatggtgttgtaattctgggtcagggtaaaaggaccatattccttcgcggcaaaggccacaccagcgtgaacgacgggtgcgaccgtcatcttatgcttgcctgccatagtgactagctccctggtcagaagtggcgagtactcgagatctctccacgacgcgagagcggaacatggcgtctgctggtccgacataatgcctactgagggatagctgcggagccagcggcgctggatgctccagaaccgggccagctgagagacagaggcggagggtagtgatgcagcttccttgagactgcaagccagctgatcgagccgctcggtgcacagggagtcgtccgccctcgacctgcccataaccatcacgctcagctcttccagaaagtcgttgaggaccataacggcgcccagggtgtccataagatgatgtggagtgcgcaaggcaaggacattggcattttgcagaaagtacatcgccgccgtctcggccgcgggcaggctgtccagcaactctgccgtcacctcgctctccccagcgacagtcacaaatgtgtgatctagccaagcgttaatatgctcggtccccggcttctgatggactcttttcgagccactcacggtcgaggcaatggccgggtgtcgctgtcgtagtgcgatccacgcggcgcgggcttgcttgatgtcgatagtgagtcccaggtcaactctcagcttgacggtgacggtgatgtcgagtcggcgtcgtccttcgcggacattgtgcgatccattagccaggtgaaaggcttccactgcatcgagattgcgctctgagacggtctcatctcttgggcgccatttaaccgagtccttggactgcagcagcacgcgtgcggtgcgaagagtggtcatgataacttgcaaatctgctcaactagaaaagcatcaccgtcaaacctagttcaattgccaggtgcaaataggccacaaaataaatgctctgagaccacgattcccctgcatgttgaccctggcgatcagcggggacatcgccgaccctattccaaataccatcacagttgatcacacagcacccagctggaggcaaattgcagttcttggcctgccgagccattgggctcgggtgccacgatctgctgatctaccgatcggctgctccatgcccgtgcagtgtcgttctgagccctattctgccctgtttctggtggcccttgcccggtatccgcgatccactccaactagagtagatcacagcccccccaaaaaaaagaaaagaaaaaaaatatttaccaagtcacggacagcaaattccaattattagcccagaacgattatgttatggattagattcaacgtacattccctggtcggattgtgcctgatgaaatcatcgtgtagtcacagtgggtcatgtcaaggaccaaaaccacgagacggcgcagcataaggaactaagatgcaaagaacaagcctttgttgacacttgacggtcatttataagcattgaccagcattgaggcgtcgagatggagaagaggctctcgcttcgccagcgactctcccaagcaacttggggctggtactcggcctcgatggcgacggggggtattgccgtgctgctctacaacacccctcaccagttcacgggcctcgagacaatcggcaagattgtctatatcttcaatattgtcctctttgttgggatctccctctgcatggttgtgcgcttctgttcgagcccgcccgccctgaaagagtccgtccgcgaccccagcgagacgcactttatcgcgacatgccctctcgctgtcgcgaccatcatccttggcgcctcgagctacggcacagacgcgtgcgggccctggctactggctgccctacacgcggtcttctgggtctacgttacagcctcggtcgtccaggcaattgcccacaactggtacctctaccaccgacgcatggccagccagcagcccatggctatcgttaggtgcctgccgtccttcccggcgatgctcagcggcacgattgccgctggcctggcgtccgaccagccggccggccgggcagtgcccatgataatcgcgggcactacgctgcaggggttcggcttcgtcatgacgctgtttgtctactcggagtacttctaccgcctgaacaaggacggtctgccggacctccatgaccggccggagatgtttattgccgtgggaccgtggagtttcacggcgtggcgctgattgggatggcagaggctgcagtggagaaggtcccggcaggctacatcgtttcgtcggccacagacactgcagtggccgtcgcaacagggcagattgcacttgtgctcgcctcactcgtggccatcttcctgtggatgctggccctctactgtctgtgcattgccatcctcagcatgctggcgccgtgtcgtgccctcggtggagaagggagggtgccgatgtcgctggcatactggagcatggtattccccaacactggatttgtcatagccactatcagaatcggacaggtactacagagcgagccggtactgtgggtagcctcggccatgaccattgtgcaggtgggtacctggctaggagtcggattggtcaccatgtggaagatcgtccacgctttcatgtaccagtaacggcaattatgagacgatagaggacgcaacggatgtcatcgtatgtaagatcttgattatggccaattccattttgtcattggggaataagcctctccagcaaagcttgtcaatgcttggtatcgccacggtggagactgcactgctctatggcccatttacgcgttctgcctctgctttatgttctgccctgttttcctctaggcagacggtaaaccgtcttgctttgctttttgttcttctctgctttttctttttctttcttcttctttttgctcttccagttgacgccagtcttcttctgcttgacgccataaatgtctgacgaccacgaaatcggcgtcaaagaggaattttcctcggatacacctctcctcgtgtctgagaaggaagccctagcccttgcccgcagcaggccgggcgaggcgctgcctcttctcatcacgtttggacctagtgacagcgacaatccgaggtgctggggcttctggcgcaagtggtacatcacctgctttgtgagcatgctcaacgtggtcaccacttggtgtgccggcgggttctcgtctggcgctcccgagattgctgaccttttcggcgtctcaaccgaggtgacgaccctctgtctgtctatgtacgtgcttggatacgcagtcgggccggtcctgctggctcccttgtccgagtacttcggccggtaacccgtctatgtggtctcgtggctgctcctttgcctattccagctgccgttagcactggccccgaatatcgggacgatgatcgtctgtcgactcctcgccggcttggccgggggcgcgcccttgaccaacaccggcggcacggtgagcgacctgtgggagcgcaacgcgagcggcgggcccatggccgtctacgggctgagcagtacctttggcccgcctatggctctcgtggtgagcgggtatatcggcctcaatctcggcttccgctggattttctggattctcatggctatcacagggggcttctgggcccttctcaccctcacggtgcctgagacccggcacagcatcattctgcagcgcaaggcccgtcgcgtccgcaagcagatggagcaggaagggttgcgctcggcctcgacgacccacgatctgcatgcccctgagcgcaagaacctgcgccagctgttcgccatcacgctctcccgccctttcttttcctcttcgccgagcccatcaccagcttctctgctatctacaacggcttcctctacggcctggtctatctcttcaacgaggcgttcccgctcgtctttggcggaccgcatggccacggcttcaacatagggcagcagggcctctgcttcctcggcatggcggtcggtcccctcgttgcgtttgccctatcccctctgcaggaacgctactatctgcgccgcgttgccgagaacaagggcagggccgtgcccgaggcgcgcatgtggatggcccgcggcggctcactcctcatccctcttagtctgttttggttcgggtggacgagctacagctctgtgcactggatcgttcccattatcgcttcctccttctttggtgccggtctctacattgtcattctcagcattctgaactacgtcgttgacgggtaccagacctactctgcctctgcactggcaggggtcatcctcgtccggaacatcgtcggggctggattcccgctcttcgcgacgcagatgtacgagcgactaggatatgagtgggcaagctctctcttgggcttcattgccatcctactggtaccgatccctttcgtcttcttttacaaaggcgaggttatccggctgcgcagtccgtgggccagggagcatttcaattcgagcgaggacagcccgcattagcattagacaactagatctagcatatgattacatgccgtacagacttgactagcgttcgttcacgactgtgactggaggaaaggatgcaaccaagatccaaggggtattattagtacgtgagaattatatacaagaagtgcagtcaagtccgatccagattcatccaagtaatgcttgtttcacatgcctcaaaaggccttatttttccttttcctcgagaagtgaagaatgaaaagaaaaaggcaaggcgaggtcgtcctcgtatcccatctccctttacacaaactcggcggtgttgcctgcgttcagcgtctcggtcgattcggtggatatccgcctctggcgtttaacgaacttcggccatgtgttagtgagcacgagatacttgatgctgttctcggcgtcgtcgaacacgcctgcagtgaagcccttggggatctcgcccatgtactgagcgcgattcttgatggcggcgactgaggattcggagaagttggagttggtaggcgacggcatgccggggttgctaaagggagtggcagggatcaacctcggccttttcgtctccgtataggatgcgagcgggcgnnttcgagatgttatccagcttcttgggatcctgggaaggaaatggtggccggaaaatccggcgcgccgcccccaaccgaccaacnggncnaccncgcaggccggcacccccacgctgatcagcaagctcgtacccatcgcgtctgccggacaagcgccttaccctaacacgcccacggaccgtaacccgccctgcgcagacatcacacctcgacccgagaagccgctgcgcccctgcaatccgcacctacaatcgcaggccctccaccctccctaccgcccattgcagacgcagcctaccccgaacttaccccctcaggaagccacaaaccccctaccttccgcatggacatcacacgcccatacagcccattgacagaaccccgcataccgaccagaatctcaaggatgcctccctggaacccggccgcccatccaccttctcttcctcctcgtaatacctaccccctacaacccacctacccacattgcccacactattcccccccaacattccaatcccgcccctccctccacctctctctcccccctcctttacctccccc

SEQ ID NO: 5727 - DNA, 6318 bp, Emericella nidulans
  unsure (1)..(6318): unsure at all n locations
gaaaaagttccccccccccccccaaagggtcccggttttttaaatcccaaaaaatagttttcccccgggcccgaaaccccttaagaaggttccaaaatacttcgagaacccattgggggagatcttccccgccccctatgagcatagggtaaccaatcccgccctggggtaaccttcccaaaggacaaagggcaacagcctttttttaaacaaaggtttcggccccccataattcagggctccccctcaaacctccatgccaacggtttctgtgttcccaaataggaagatttcccttttcagcccagcttaacacaataaactgggtctggttcagtcccattaaacgcccgactttaggctgaaagagctgcccttgcgccgcgatcttccctaatcccgagtatcatattcttcgggcgaacagctcacgagaggtccactacgtcgttttctatgagagtgcaaccccgagagtgcaccaccaccaagtcttatatcgtcagacatattcactgacacaatcagccttaaaattcaaccaagctggagacctagcagtgcgtttacagaccgtggaagagacgaaagccgcattagataccgttccagagtcgtccgatgaagaaccattttgcaataaaactcagcagccgattgcccctaccaaacccgagagcatggagtttctcgctgtgataaagtcccggtgatcaaattctagggtattctcaaccgagaattctcaagacctgcttgttctgaatacgtcggagcatacactcaaatggctgcggccgtctcttggctcgcgggaaaggctgggatctgccagttgaccgaggaagctcctagggcacaaggaatatactgccaccggatgtggtgatatttggaacttgtctctacctgacagtgggtgaatgagggttttggaatcgagaatatcacaccctgtccttttgcgaatgaagagaacctgcactatgataaagaactttcggcacatggaactagagatatatgcttattccgaatcatggtgggtcaattttgtttggcaccacaccatctcgcatatcattttctcgataaggagtgtcatggctgagagatttgacgacggcggtcgacttccgattttgaaggtacaggttagagtgagggcaccgcatcttaccctaagtctgggatttcggcagcgctatcattactcggngtttctaaatgattgctttaggtgattgcaaccaatattgatcagttccagctagacttctatatggaatggtggttcttttccaacttactactgatcattagattaaacgatgcgaaacagcgaattttcacaccgacgagggtccaaagacacttggatgacaaaagtccaaacgaaactacaaacgtaccggcctatcctggggtcttctctctgctaacaatggtgatacagcgaggatggtaacattcaagcagagacccggtcgtatatttagcctatgtacgatcaatcccactggccgaattatgtcttttaccttttaagacacagatccaagcagagcttcacagtattatgcgcatttagtttagtgtacaaccagtcctcaaaagaccgacaattccgacatccgaaaccactgcaggatttcaggtgtctcggctatatacattccgccacatcagcgacgcatttattccttgaactccttaacccaaaggttaacggctctgtacgtggagctgtgcgctccgtaccagtagatggtcttctgggggttgtcgccatagccttcaatggcgaagtagtccttgtccgcatgggtgaagtagccctcctcgttgacgccaaagtccagcatgctggcgccctcgggcagagcgccagagtggggccgggtcagcccgacggggagaacagtcttctcgacgacgtagaggttctggaagccagtgggagtggaggacttggaggtgaaggagacagcgccagtgtcaggggtcgagtggactgttttgactttgtcagacggaaattggagaggattagagagtcgaagagggacaaatggagggcttacagatggcaatctcgttggtggtggtgtttccgccgacatagaggtattctagaaatatagttagactcgagaagatccatggccaccaagtagccgttagtggtctggtacttaccaccgtcggtcaggacagtgtttgcaccatcagccacgagggtaaaggcagagggatgggtatcatcagtgacagcgctgcgaagtcagcagcggcagcgagaaagaacttcattctgttagacagtatgctgtgaagatggatttttggaggcaatggttatgatgctcaatccagggtatcgccctccatatttatacccttcccagcggccctggcacgtcaaggctcttcgacccggctctaagagaacatccggcattgacggcggtggacaacagattgacgtcgatttaagacatgcagggctcgagcaatgctagttgactccacgaccttgaacataattcgctttgttccgtcgatcgcccctggtcctggccgttcaatacctgggaatggagcggtggttccccacacagcgttgagccatgtggactcgtactataaaaatccacatcttacccaattttgaggattctccgacgaaattccactactcaggaggccggctgttgtttctccgagaaacgtcaaatagcgtcataccccaccgctttttggagcaattgggaccggcgatcgcggtaatcggttcgttggacacctggtgatgccgtggaagacgtgcttgggaggaaactgtttctgttggtaagatggtcttcgtgccagaccggctagaaacgattgatatgctagaataaaagtgtcgctgtgtggaaatgtaatccgcctgactgaatcaatgccggccaatgccggccagtgtaagatagccctaaacatctactaaagtacagtatatccgtcgaaaccttcgcgacctgcacatgacgagatgcgcccccaacaatgagacctagttcagggtcgtagatcgtcacgggctgtggatctaatatcagctgatagccaaagtattcgaaatgagtagggtggccccagctaagggcaattgggtaaaagaacttctagaaggaatttaggcaaacttaggtagtttgattcttctgctgcaactggactccggactatggcagtgactaatcaataggccagatcaacgatcttcaaagtaccaaggatatatccagacaggaatggaaacttcgagggtggagagaataagatgaatctcagtaagatatcctggtcgggtaaatactggagtattggtacgttaccaagatgtcgaaaccaatcatatcaagccggcatgtagcactgcactgctgtatatacacatcgccaatatatggtcattgaaagtatactcatggccatctcactaccggcccactgcgagacgcactggacgtcccagtaacttcaataaacaactccggagcctatacttccaggtttcgaacaaaatcccccatcggctagcttaggagcaccgcatctcagggatactgttttctggttagctcgggagtagatagccgagacaacgcaaactcaagcagagctggtgcggcaataagtttggcttgagcatagctcttgcttcctcacgttggcggcgccttgagtgtcgctccaacagaaatgtggctgtgttgttgctgcgctgctgagcaaatcatgttgcattcctcgaagaatttaggtgtcagcggattgcagcactggccaaatatatatattgggaatattgaccatcacccgctccgcgcgcttttacacacttgtattagcaagtactggaactcgctcacacatctgaaaggaaaccacatacaccagaaaatatcgatgataaaaaacagaggacctggcttttaagttgtcctgcattgctttggcatgtctcccaggtgcccgggttcggtgtggattgtttggaaaacacgcgcctccacgcaaacaaaacgggtgcagataccatgcaaacccaatgcacatgttgcattaagtgcttaaaaaatagaagaggggaagaaaaagggtagggatgaccccagcgaactagtagaacataatggcggcggatatacaaaaaaattcaaaaagtttgcccccacaccggatcgaacgatggacctctccattgccgtcgtatgataactaagtcatcatatacgagtggagcgctctaccactgagccataggggcggttgatgactatttatttatctattgctttataatcgccaaattactcatcatggttgtaggtaattcaatctgccagaaacgtcaatgtttgagtcagtttagcaggcaatattttcctgtcgcgtcaaacgaaatctatcgcaacaacatcaggaccgacactctgcatgattctgggctgctaagattcagcagttactatcgacaatgctggcttatggggtctatgtggatactcgaacggttatgaagatgacatctcatctacgccgcgcaatacggacaacttgaggccgccaacgtgctcgctcataatggcgcggaccgctacgagccgaccagctatttgtttatcgaaacgtgtaatgcatacggacctccgttttttgagggtgcaaagaaggtcaggaaagagagtgtgaactcctaccaggcaacggccctgacattaatcaaaagcggacgggagaactagtggtgtctgttcttgaagccgccatatctggtggctacagctctacagtccagcttctgctggattatggcgccgggatcatacttgactggtacaaaacacctctgaatgcagcagcgtactacggattccagatgtggctcttctcctgctgaaaacgagctgatattgaaatcatggctgggctctgtgcacagccctccaaacagcagcgagtcaggaaataaggatattattcagctgttgctggattgaggcgttgatgttaatgcgtatgctgacacctggccatggcgctcgtttccgcttcggaagtggaggagccgtacattatatagttgttaaggtggtgacccggcgcaaccgaggcacaagtactgggaaaataacatgctgaacactgaacggtatcatagcagatattgggaagtttagaaagggaggtgattcaactggacttggaagccgatgcgggaatggagccaatattgagctaaagatcaattgtaacctgcaaacatcgcgggattccggattagtctaccataattgcggcagaccgggggtgaaaatacggtcgcttagtctcggttgagttgaaggacggaggataattgcatctgccggcgaatcaaaagcctatcgtctatataatcattcttagcggagactaattgcaccatgtttggttggttcattggagtttggggtctttcttataggatgattgatggaaagtatatgcacaaagattggctgtagtctgggagccgcatccaagcatggatgtggagtacccgaagtcttgccctgatctccgccatcaagaaccttcatccgtaatgcaccttcacaagactacccatatgaccatactcttttgcaatgtggttggtctccaattagcatccatacctcttatgttctgttatatcgtctcgcttaccgcggtgcaatgtacccctggcgctaaccatagtcgcgcttccaattgcaatacagagagtgaacccgaatgggtgtattgctcggcacttgtggcgcctgcgacacagtcgcagagggtcgggagacggtaaaactattgtcggggaaagtagatattcgagatgcagactcgggatatagcagtgtctcgtttcgataggatggaagaaatgagttccgacggttgtatctatcagctctgagaggaaggacgaataaatcaaaatagctgattatacaaccgaaggctgtttggccgttgtttcggtgcggacttagacgttacttgggcttagtagctgcagaatgagttttctgcgaagacaggaacagtcaacggagaacaatcagggaacaacttgtgataactcttaccttttcccgaaccatgttcctgcagcaaagtaaagagaccaagaagcagtcttgggtgatgagagtaataggggcaatagcagcaacatcggtaacagagcagaccagctatcctggctgatgcgagaggatccctatagtgagtcgtattatcgca

SEQ ID NO: 5728 - DNA, 6572 bp, Emericella nidulans
  unsure (1)..(6572): unsure at all n locations
gattacttgttgttgccaagcgggcttccctcatcacccttcaaggccagataaacaggtcagattcgggtaatttgggtcaaccactgtggagtaagctggcttcttgttaaaaaatgggcctgcaaagaaagcgaagattgggaaatggttccaagccccaacctcactagaaggggctgatcaccattagtgtgaaattgatggttccggggcactggtcactggtaccttatcggaggcccatccttctaggttgggagtagtgcatccttagtactgctgctcctgctgctcagcactgtgacgatattgggtgagaatcggatagaccccggctagcaccatctccgtggctatgtgcatggcacagggtcactcgacttcctctgctcgtgcctgtgctcgtctcgtgctcgcgcttgcgtgcaaaagggacgaagggatccagaggctcagattcagatagagtgatagtgatcagacagcatttcaagaataggtttatgaaggatcaaggaaggggcgcattgtctccattgagaagatagataaaagcaaaacagatctaccgcgtatactttgcatgctcttttcccaccaaaaagttctctgctgcctcgccttttcctgtccttcttactccattctctgttaacacctcctttttctttttccgattaattgatccatctttctcttctccccacaaggcatgggcagtaaggctttagggccatgatattgatgaattatgatttgtgacgcccagctaatgtttcgtcattcaccatagcttcgagtcgcctcgttcttaggactttcaataattgttcgggatcatcaagcccatcttgctgctcatgagaaccccatataagccaggtactactcccttggtgggatcttcgtccctcgttcttccctcctcctcattcccattcgcgttgcccctctcctctcgccgttccccaatattaagcacgtttgggctgcaaacctggagcagactgacaccctgcattgcatctaactttaattgcacagtgcccgtccaaggagttcgcgatttactttccgtcgtctttgcttccaatactggttgctttgtttacacgggtttggaagctctgcggctcttgcttccatctgctgctcgcctcgcaccagcttggttctcaattgctcatgatcacttgtttcctgtttgtctagcgtctgaacctctgagctgcctaaagtaactctggtgagtactgtcattcctcgtcttatgatgaagcccaccgagtaatcgatatctagattgtcctgtgataccgagtcctcgtgcaggaacgaaagccttagactgacgcgcgcttaaggtttacggtaatactcacgtccactctccctccggagaggcgacagacgaatcgtcttcgagggaccacaagggtcagggcgtacttgcagcgctgtcaagatttgccgttaaacccgccaagctggaatcctacgcaagccctcccctctccccgccgacgcattggtcctttgacctcgatccagtgcgcaggggtttgttcaggggcatggatggtgatcttcgacgcatgaagcaggatgaacagcaaggccaatacgcaagtcaaccgggcgtgtcccgtcgctctgcttccagatcaaccgacagaacggcagaacgaattagacaggccgcgttcaatccaacacgtggagacccatcgcaggccgctggaagaccacgaatgcctgcatacatggactatggatacacagacagcacctttcaaggcggtgcgttgcaggaggacgaattgcaaccgtatccgccgacgttgcgcgaccaccagcagcgccagcaaccctttccttcatatgagtccgagctagtatacaacctcgggcagcagggcccaacgcagactccgtacgaggtcgtgccacaattttcgtcacggcattctgcatctctcgattcactctccggccaatttcctgttccacagtattttgctcccaatgaaccgtcaggcaccgggctcccttcgcattacctgccaccggggctttctctgtccgcatataatcagccggggcccattggacggtcgagcgcaacgcagccctttcccgcaaccatggcggacatgacccccgtgggggcggcgggacaacagcaggcgctatcgcagtcgcagccgcaggccttgcctgagcctccaccgtcagctgaaccacttcgacaatttcagcgagcattacgagtgaccgtcgatcatacgcgagccggtcaattggtagaggctagtcaatcgttgctggatatctccgagtggctggtggctactgcacgggagctcggtacgttttctcttagtgatcgaatcctagcccccatgcacagatgatttgctctgccaggagctgccccttttgcctcaataaatggttttgtggattattggttaatgttgtgatgtccataataggtattttgcgggatgaccaaatgctccactctgatcgattgaaattatggaatgatttcaatatttgctggttggcaatatgccagaggcagaaagacatgacgcaggatttgctccagacaggccgccaagcaccccgaactagtcttctcgacgtcgagatgttggattccatgggcaagcagttaatacatttttgtgatcaactggagcagcatggcctggtagattaccaaatgggtatctgggaggaggaaattttgtctggtaggttgttctgcagccagtgaggtattgggatgaaaattaacctgaaaaccggagtagcccttagccaatgcttggacctcatcgaaagccgaccagacctcagtcaccttacccgtactcgtcctgccgcagcctcgcacacgtgaagttctaagcgtcagctgcacagatctgtcttatgcagatcgactttgacactaacttgctacgtcatttctctcaaagcgccctaaggcaggggctaaattggcccttggcccattgcagtcgcaacttgcaagacgcactatcgatttgaggattgatagatccagagatttttgatgcccgacttcttgctcgccaacataacctcccattctcttgaaatcgttcgccacttaacgcctgaagctggcctgccgaagaccctgcattccttcccaatccaagagtttcgagcgagccctaaaacaatcagctggaaggctcgaactcaggtcggtcatcccacccctgtccgccgctgcaagcctgcgacaggacttttctcgcgatcatcctacaatgtgacacatcacaatttggcgcttgagtgggtattagcggttcggattcgactccacgttcttactcgtgtccaacgctactgtctgcactttgcagctgcagcacaccactctgccttttctactccaatatgatgagataatgaaattacgacatgagcaaacaaagcgtcttgttttgatttcgagcagtacatagattccccgttcgtctcgcttttctgaaaccttatcataaatgttgtctcatcttcaacattgctgctactcttagctaatgcaaacctacagggatcagtcattagttcgcctcctcatggtgccagatctgtggcgagacgctgagatctactacggtcattttacccttttctgacgagattttggctatttcctgttttctatatatagagagcgaggcggcgctgttggaatcatctactccgtacacccgtgtgttggaattgacatctatactgtatagcatatcaagagccgtacatattgccggtcacgcttcgtggacttgcctatgatggtcattagtatttttcctgagcaactctagacttcatcgaatcccggcctgcggagtataatttgtaattttaattgttgagatatccccatatcgccaggcatgttgatttttattcagataataggacgtgaatcgataacatccgcatctattcatatgtgtatgcttgcgtgtacaacagacactggatagtcttagtagaaaactccgtaaccagtccaatatgcatagctcaaaccaggattcataccatagcacatgatgcctaacaagacttgatggatcaatagtagtatctgatacctacagagtttacaatgaagaaagaactccccgatattcggtgacttctcagacttttcgaaagagcactactttgtgaagcgccccagtaatgtgtttattcttgtcatgcatgtcatttgagtcgtccaactgagtaggtgctagtagtagaaatcgggcgtagagaacagaagctgtttctaagcccagtataacggcatgtaatagagaaaactacagtttccgtgtcgtcacaatcatttcaaaagtcgtaggtatagtagttatgcaaactagtgccaataagcggtcgagcacagtcaggccatccagtcggcccagtcacttatgcaggcgagtacggtggtatccaaacacaagaaaataaacgcgggcgatgttcatgtgtagggtatcccatttacgttgcgctagaaattaaatttggtctaatatcgccgcatgttagcataaacaccagcaccgacgggagctccaaagcacaatgagggcaggggtggctataaaaagataaaggaggaccacatacttaaagtcatactcaaattaacatccgtgctctccaccatatctgtaaactcctcaaagctgatcttgccatcgtgatctttatcagcctccatgattgtcttgtcaacaatctgttgtagctgcacatccttcagattattgccgaccatcatcttcagcacgatgaacaactcgccattggatatgtacccgtcgcgatcgatgtcgtagaccttgaatgcgaaccgcagcttctcttccttgttgccctttgagctgaaagcggataagcccgagacgaactcttggaagtcgacgtcaccgccgccgtcttcgtcgaatattgcgatcattctgttgactcaagttatctcgttagatgatattgaactgagatggagttcgaggcagcgcaccttgtagcaagggggttagttgagacttgtggaagggagaggaattcgtcgcgatcgattgtgccggagttgtcctaggccattgtttagaaaggtcttctctgtttgtacgggttgcgtaggcaccttgtcgagcttcataaatctcttgcggagtcggtccacttcatccttgtcgactgaagagaatcagtacgggagaccctggactgtttaaccggacatacagttagacccggaaatgatgttctcgaagatctgcgatgttcctagagagctccgtcgtctccgcgagtacattgcggcgttgttcggttcattaggctgctccatgacgaaaatcttactcaaatgcaaacggacctaaaagcaatgagacataaacagcagaatcgtttaggcaatgataatgaatgcaggtctagtcttaggagacaagaaagtacggttgcgaaggtctatcaaaagagatgcggctggaggaggcgctggcatgccaagccacggagaagccccgcactaaaccaaaatgggccaagcaagcgaaactcaaggcccctgaggccgtgctggccaaacgtcaactcatccgccaggctgataccgcgagatttacaaggttcataccatctaccattcatccccgaagatcaaagaaatacgactacgcgattgcgtatgaccagagctttcgatagatactgatttcgaccccctacccatggtcgctgcggcttaattcgccctaaacgttcggatgactcgatacgcgggactagggagaacgcgccccaaaaagctcactcccaaggcgcctatacccatttaccgtgagcaccagatagatgaccttgaggaagagatccaaaatggcctacagcaggttgaaaccggtgttgagaaggccgaggagtccgtaagtgtttatccgaatcatccctgtttccagtcacgtgatatcagacaacctcatctcatcatgaaaaatttgcacgggtcactacccctttaccagcgcaagctaatgcactgttgcggtataggaataccatttgcaagttgctatcaatgcagttgcatcggggagagttgtaaatgaggcccatattccaactccagagaccgtcctcagtaacctgcaatatgacgagctatatccaccagttttctcgcagcctgcgacatatatccgcttctcttccacggtggaggactgttgcgggtgtccatataacatgactgacgaggatgatgtattcctgaagatcatgaacgagaagcgggaccccgctgaccgatgcacggaggaccagtttgaggaggtcatgaacttcttcgaagagacggtgcgattaaagcagccgtacgcagcggtaggcagtgctccggtcttgagttttgcagaaatgcaagagtccatggatgcaaccgtagaggattatgtaaggcgattgngcaaggacgtatacgaccactggaaaac

SEQ ID NO: 5729 - DNA, 14691 bp, Emericella nidulans
gacacggatgctgacggagcgcgggaacgaactgatggacattgctggagcgttggcgcagtttttcggccggcgccttcaaggcctttccaagtccgaatcgtgacgaggtgcatggatggacgcctatctggatccatccgcccgtgtttggggtcgcattacaagtatacagcttcgcgaaaatcctcgtctgcctccatcggccggtgacgactggcttcgcgggataccgtacatttcaggtatcctccccatgaccgacctcgatgtatatgtgctgacgcgttctgtagaaaatactgaccgacgctgtggctacgatctgcggcatcgccatagagctcaccgacccaagctgtcagatcatgtcggcgcagtgcttatttggcgccgggctgtgtgttcagagcgcgccgcagcaggaaaccatcatttcgttaatccaggcgtgtgagaggcgcacggggtggccgatgggtacgatacaggatgatttgcgcaaggagtgggcgaaagttgctgaggggaagatttcatgacattgacgcgtttatagatatacatcaattcaattactcagttctgagcgaaatatggtgctctttcacatgtaaactgtaaatatacgtcagccctagatgtgcttgtatactcaaaggcgaatgctatatattcagtgtatattcatctctagactcgaacgtgataggcctaccgctggcatgttcacgctcgttcggggaacactgaagatctggaaatcaaagcctttaagattccccattctcctataccatcgcttctccttaccttccgcatacttattaattttacctcgcgcgacggaatgctttctagcgagtcacaagattggccgacagcattctccaaaacgcatatatttcctcaacgccattcgcatctataaataaagcaaccctagaacaagaatctaccaagcccccacgatccccgcaattggaatatcgattcccgtcgtatacgtcgcagtgtcactaagcaggtaaacatacgcgccacccaactcctgcggaatcgccagtctcggcatccccccatagtacttcatcttggtatcccagtcgggacttgtctcaacataatacgtcaatgcagtcttcacaaacccgggcgagatactgttcacccggattccatgcttcgcccactccatcgccaaggtatgcgtcatgttccgtaccgccgctttcgtgcctccatatggcgcgctcggcgccgcgcggttcggtctgtaagatgtcatgctagcagtaaagacaattgagcccttgatgccgagtttgatgaatgtcttcgccgccgcagttgcgcagttccaggcaccgaagacgttgagctcgaagaggcgcttgacctgatccatggtgaagtccaacgcgggctggtgctttgttgcgccggcattggcaatcatcccgtccaaccggccttgttcagagacgatctggtcgagagcagcctggacggattcttcagaggtcacgtctgtctggatgaaggagaagcgcttcgggttcttctgcgcgagctcgttaaaggggtcgccgggcgtggagatgtcgagagagtagacgtgcgctgcagagttggccagaatgacttctgcgatcccgagcccaatgccttggtttgcaccggtgactatacgcttcttagcactgccctattggaatgggacggttttgggacgcactggcaatgacctttccagcaagcgtaacctgccagttatggtcaggaccgggaagcgtgctgacgacgggcgtcgcttctgacgatgaggacccgttggtggccattgtgtttgcggagttgtatatgatcagatggatgcaattgagtgaactgagcacgaaccgagcagtaaaggccgtgctcctaatttaaatactcccgaatctcctttttctcctcacgaacacaaacccctctatctttatcaacggatcaactccgagtgtcctcgtcgcgaacgtcataaagagacccaagtggccgcgtgccgcgcatacctcgactcgcggtcattcatctccatccagattctcagggactccaccgatgactcgaggatctttccccttaataagcgccgtacgagtcagactgtagccccgtcaccccagacggctccatcccgcatgctgggggtggcgatatggagaacccactgcaaccccgggcatcaatcaggccatgcgtcactcatagcctctagccattgaaatcggctggaatataccgcgttctcgtatccggtgtcgcatgctccggggttgagggcttgtcaatgtccatgcaaagataggacttggctacgccgatctataaaacgtggagttctcctctctctgagtctatccctaaaaccgttcagcctgttcacggtaccctttgcttggttcccagtctcaaaccacatctttgaccgtcttataccttttcgttgggaacccgttatgaagaaagccaaccacgactcagcctccatgaccgaggtcgaggacattgaggggaaacctgtcgttgcccatgagacgctcgtggcaggctatgttcctggcacagaggaggagaagcggttggtccgcaagatcgatctatacctgttaccgtgtatctggtatgatccttctcccttggtgttgtcgtaaatgtaaagctgaccaagccaataggatcatgtacctccttagctacatggaccgaacaaagtacattgacccttccagcacccctctggatgaaaggcagctgacaagtgagtacagtatcggcaacgccaaagttgccggcatggaaaccgaccttaaacttacttcgaaccgctattcaatcgccctcgttgtcttctttatcggctacgtgatctttgaggtaccctccaatatgctcctctcaaagatcaagcccaacatctacctgccttgcatcatgtttgcctggggctgtgtcactatcggcatggcgtacgtgcagacgtacaaggcgctcattggattccgagtcgctatgggcgttctagaagccggtttcgcaccgggcgtgttactggtgatcagctcttggtacaaaaagtccgaacagagtaagaggtttgctgtatatatttcagccgcaatcctatcgggtgcatttggaggcttgatagctggcggtattgtgggggggctagagggggtgcatggaatcgaggggtggagatggctcttcattgtcgagggagccgcaacagccggcgtgtccattattgcgtccttcctgttgcttgactttcctgcaacaacgaagaaactcaacgagagggagcgggagcttgctatggcgcggatggcggccgaggcgatgatggttgatggggatgctgaagccttgggtcacggacaggcactccggaccagtttgagtaactggaagacgtggttattcgttgttggatatatggtatattccgctcatcccctttctcaatgcagaagcgcaatatcgctaacaagcagtaggccatcgtcggctcgtccacgctctcttacttctacccaaccctcgtctccgggctcgggtacaagggcaacatggcccaatacatggtcatccccatctacgccgcggcctttgtgtgcaacgcgataaccggctactttgcggaccgacaccagtccaggcgcgggtacgttctcgtcgcaatgatgagcgtcgccatgatctgcagtatcgtcatctgcgtcgtttacgacctcaaggcgcgctatgcgctccttgtgattatggcaatgggactgtgggcatcaaacggactctccttggcgtatgcgtccgtgagctttggcgagatgccgagagaagtcaggggcatttcgttggcgcttgtcaatgcgatgggcaacctggcacagatttatggcgcatacctgtttccggacaacgataagccgaagtatcttatgggtttcggggttattagcgggctgtgctttacgggtgttgtgagctatctggcgttgcagctcttttcgacaaggaagagatctccctagggctgagcgggtaatgaatgattaggcttggatgtttattagaatcatagtagaaggatttgcattccgtcctggatatgaactcttctcaaaaacaagagtatagaccagtactgaattagggtaaggtgtatacctacgtgttcgttgtctcaagccctaaatgctggcaactaataccctggtaggcacctgatgctagcacctactccatttccagcagtctagtttcttgcgctttttcttgattcccttttcaagtttcgatctcgccaatgtaattgataacggccttaccagcaacggagtatgagtagctgataggagctgagggcctctctttaatgtatgtgtggatgttctacaagaagagaacctagatcccagactcgagacctgcatatttccttgctatttttccgcatctgccagcccagaacagcactaataatagaccctattcaagccggttatggtacgaataaacatcccatcgaatgcggtatcgacagttaccgactcggccaacccaaccatgggtcgagcaatcaagctttcaatgacgtttgccgaccggagccctcggcaaacaatccaccaagatcgatgagacacttgaaacaatatgcaatgcatccccagtctcgatctgcaatgggccgaatcgggcgcgaaagtgatcccggtctccaggtcctcggcgtggtcattggcggcctaccgatggtgatcaattcagtgaactcaagtaaaccgcattaccagtcttcacgagagatggtaaagacgctggaggaactgacggacacacttcagagacagcacttcctgctgcagaaggacctagagagtatactcaagtcccaggcgggagatcttggagaagagagagtggcagagatactccaccagccgcacgcggtctacttcgccgagccagacgttgtaatggctgttgaacggtctctcggggatggaaaagatgtctatgtttcaaccgttcggaaatgcggagaagccgtctttgatatcgccgagcgactggccgggtttccttcgacgactgggaaggggggtaaaggaactggaagagggagagcctggggtaaaaggcagctgatcacgtcggcaagtcagcgaagggactttgatcgcttgctcgagagactggattatacgaccgtgctcctggctaggttgagggtgaccatcgagccccagcgcgaggaaggactgactggaaaggttgcacgaacggcctcgaggccaggatctagaggaagcaatgtcaatgcgaatgcgagcccaagtctagattcgcttggaaacgctgatgttcttagccgcgcggctgagcgattgtatacagcgatatccgcaggccttgacaacgactgccatacaacgcatacggccgcgctcttcttgccgagtggaacggagctgaaaaagagaagccaggaaaatgtggcaaagcagccgtttgtgtttacggttggctttcggatgcccagcatcatcaaggggtattataccgtggatgctaaagtcataccaaacagggccaggtagggtttccgagtattaccctgcattacagctcgaatctcagtctgacagttatggtcaaccgaccccgggccaatcgtcaggcagagtttccaacgacctctgccagctcatcacaaccgccgaagagcagggccgcatgctggagctgcacgtctctcaagcaggctcctgcacctggaacgaactccatcccgcgctctcaccctcccagacacctgcaacggcggacctgacgaccatggacacggtcattcgtcactctgctccagggagctggacgcacgcgcagaaactgcgcctctcgttcttcctcgcctcatcgatcctccagctctcgcctacccgctggcttcaaccctctcaccctctgaccagcgacactatctggttctcaaaggccaacgcctcgacgctcacaagagcttccgccagtgcatctctcctcctccccaaaccgctaatcctgcgcgactttttcggcagcgatactcggtcctttgagccccccattgcgcgaaacagccttctcgagttcactgtcttattgcttgagatctggcatcagcggacattcgactggtacgcggaagagatccaagcacctctcgacaccgatttctgggcccgacttaggattgtcgagatgtgggttgaggatagcaaagaccttgtccttgatgaggtgtataccatcatgatgcggtgtctgaacgggacatttggaactgcagcgacagaaccagtggccagatgggatgacgacgttttcagggcagatttctggcgcagggttgttgtcgttctggaggaggcgcttaatacggtgtagcagctttcttggtatagcaaggcggatactgagactgtcgagcaacaagatccagcctgtagttagggatagctggtacgctataattgcaagcccactttctataaatccgccttcttataaagcagtggtcatgatacgatggccgattcatattaaacgcacttgtcccgtcagacgcatgcggactttttgaccatcgcgatggagtgattactcggcagggaatcctgcctttcaataaaagaatgcagagcaactggatcaagcacggattcgccaatggggtagggatgccaggtcaatgagtgcattctgaaagtgacaagctccctccaaatttctgtagtacattcgcctttgccgctaggcatggttcatagttccctcagtcactttacgaatacactctgctcttccacccatgtatcaataaagcctcatccagaaacgatgaatgccagaataaaccagcaaactttgggcagagccagtccacaccagatcgatttcttggtcatctactataactctccattcccgacacagtcacctatagactcatcaccattcatgccagcgttgccattgacggcattcccgtcctgcatgggcacgtcaccatcgtcgtcatgtagcagtgggccaaccgggcagatatcgtatagttcgtcaagcgctcgttcaatagcacgatacagagcaccttcctcctcgctcactgcttggagggttgccgtgtctggggttccagtcgtactggccctcgcaccggcactcgtgcgcgtactcgccgccacctgctcctcgccattctcccgtaggtgctggctatcccgctggctactgcgctggtctcgcacgtcttgcggcgtcggcggcggtgtccgggagccccagctgagcggggatgcccaccgaacccgtctaatccggtgacggagtgtctgccttcgtccttgcggttcctcgccctgcccttgcgctgcgtcttgtccggcctgttccgcttgctcgacctcatcattctgaccgtcctgactcgcttgaggggcctgactcatttggccggcctgaccgttctctcctgattctcctgtctgtcctggcgcttcattctcccccgactgtgcatcctgcccgttctgcgcgttcggtcctgacagcaccgagcgctgctgctgtccctgatgctgctgctctcgccgccggtgctcttgctcttgacgttctagatccgctctttgcgccgccgcacgcatttgcatcaatgtctctccatacttattcatctcgttgccgagccgatccataacacgccgaatgtcctcgcgcgcatcaacatcgttgcagagtgttgggcacaaatgcacattgccagtctcgtctgaagcgaatagagcgactctggcccagttgtcgaagcggagggactggttgatgactgcgagaagctgtttatcgtcgttgccatggtaccctcgcgccgagcagaatccgtgcgagacaatcaggtagaggttgttgaaagtttgggaagaaggtgacattttgatgctgctggtgattgttgcgcgggtgtgatagttcgttaattgggtggctttggcttattggagcaagtacggcgcgggtagcgcagagctataaggggttgagtaaaagtcttgcaataggattcggaacgagataaaggatacgtctctataaaaattgaacgtgatgctggaggtttgagacggaagaatagctcgagtctcgactggcgcagagaatgggcgctgtctctggaagcggatagggtctttttgtagttccctgggagcaagaatgagcctaggcagggcaactgccacccatcatagttcctgcagtaagtaggatacgctgccctacctgtaggatagcatatagcggatattgacctagaactgtttccaatatttagctaaccctgggacagtacaactcggccatgttgcggtctgcacgcgaaggcagctgctcagtagtgtattttaatagtagttacgccccgtactgagaagaataaatggatattgccgactacagggccttgcctatgaccatgttgagggatacgttgagagattctatgagtttctttaccctatcacgactgctgtttacgagactaggcccgtacagtgagttcgtgctcaggcaatgatagacttggcccttgggaacatagctatctcttctggaaaacttccagcatgttgctggtttgccattcaagcagcttaatcacgtatgttgcccttagggctcatccactgagtgattctcctcaggcgtccccgtctaccaggttcttctgccttagaactaagccagctgaccattcaactggacgactacgaaggccaagctgcccgtgctcgctgcaagctagaagccttatctcccaccaaatccacagtttgaatgacttactccagatccgcctacaatcatgttccttctccaagccctccgcattaaaagatgctatagcacttcctttcacgtattctacagctatctctcactgatctgggatggctgcagctaataaggaaataggtagctaagatcagtacgctgttattcggcgctgacacggctcactagacccgggtggccgccagctaccgtggctagctaattgacaagtatcgtttcaaaggagttcaaagggataacaaatactacttaggcacaaagcgcgggaacacggcttcttgtcaaaattctgtacctggtccagcagccagagttagtaacctgtatttttacctgagatctattgcgctgtggcttacgcccagtgacgtcgggcaaggatacagaacaaggaatttgactaatgactctttgcgaaaccgtcattcatatctcttcaggatcgacggtgcatgattggctgattatggaagccgtcatcatgcagactcatcgcctcagagcgccatctaagaccattaaggctatctcaggatcgatcttcggcttggcttcgtgctgccagatccaaaccctaactcgcttcgtgcaacatctgtgttcgactcctcaccaacaagggaaatatctagcgagagctacgtcaattgagaatctcaattaggccagtaggaaagcccgctcgaccattccagatcgcttcagcgccactgtaagacttacatggcagagctcagacgtggcttgcgcaaggctagatttcgtttttctgatgtgtcctgatttttttattacctttttttttttttttttttttttttttcggctaaactttttgctttggttatgcttcagcttttgctagggattcttcttacaggcgattgtggccttatgtggcgccagatcgttcacaggacaagcatagaatcaatgccacggcactggcatctcgtctcagctatggagagaacgcctcctgactactgatgggcccagctatgacatcggaatagacttttctcgctaggagtttatataaagcaaggctccgcggtatggcttcagtcctctctatattcatatatcttgatactccacccaccttacatagtgttcgatacgcatatatacttcacgtatttctttatctcacatcctaagactatcttcaataatgggttctatcggcctgcttacttccatcaaaggcccgaccctcgtttcccttgtggaagacatccgctcggccgcaatcatagacactagctcctcgcagtcaccacaaagccaccaccacctcctaacccttatcgacagattacgtctcgccgcagagacgcccgccgagacggcccgtcgactgatgtaccaggttcgccaccccagaccagcatcatgcgcgtatcctgactagaccctttccagccccctcagaacgcaacaatccgggccctaatagacctgggtgtctttgaactgcttgtaaagaatgcaagggatggccgcaatcacggactctcagcatcagagctgtctgtgcggacaaatgcggagagtgatcttatcggtacgccactgactccctctttcaaggatggccgtgtctgataagattcatgaaaaagcccgcttgatgcgcgtcgctaccagcctggggctctgcgactccaacctcaaccccgaatgcgccgagccagaaacaatatatagcgcgaacagcaaaacggagatcatgacgaagccgcttgggcgggacggccttcgttgcttgtacgtgttgcgcgctaccaataccctctccctttgagctatccttatccttccactcgatgagttcgttgctgatgagtcagatacgacttgacaatgcccaccctctccgtgctcccctcatacttggcacagaacgcctatatgatgccaacagattacgacgcctcaccgatgcgctgggcaacagggcagagccagttcgagtggctggaagagagaccgggccagcaggcacggtttaatgcgctgatggctagtagacgggaggggcaagcgcggtggttcgatatttatcctgtcgagaggcttctgcgttctattccttcatttgaagacggagctgccaaaaaagacgagaacgtgttcatgattgatatcggcggaaacgaaggccatgatctgctgtggttccttgagcggtacccgtacttccggggaaggttgatattgcaggatttacccactgtggtagcaaggaacgagattcagctcgagaggaagggaattgaagtgatgggatatagctttttcgatcagcagcctgttaaaggtacatccaccctcttccagtacaccattctttcactagtctccaaggctgactgcacgcaggggcactcatctactacttccgctccatcttccacgactggccggacagcgtgtttgcagatcctgcagaatacaatttgcgccatgggtccggattcacggattctcatcgtcgactttgtcctgcccgacatggacacccccctttttcaagcatccctggatatccagatgatgtgcctcgggtcgggcgtagagcggtcgagaagcgagtgggccaacttacttcggaaggttgggttggaaataaggggtgtttggagtgtgagtccgacgcaggagagtgttcttgaagttggacgggtgagggatgttaatggcaatgggagttgagatttggcacagtaggtagggtagtatgaagccggaatgatatgttgaatgtgctttgatgagtattgagctgacttgtctagtccggagaagagatgagaagaattggaattagtttctgtgaaaagacctggcagaattacgtattacatgtacaagctatatactgtgggtagataaggtgaaagactaattactgcatcggacatccctcgtcttcttcctgattttgtccctgttcctgccacgacagaggagcagacctcgtctcgccaggagtaatcccctccagctccatcctcctctgcacctcatccatatcaggcaactccccgcgcggggcccgtatcacttgctctactataatggcctgctccgtttgtccgttccggcgtaggtggcgcgcaaactgaaacagcatgtgcctctggatattggcttccgcggggtccgcaggcggtacaagctcgggtagtaagtatcggggtgttctgatggtattgttacctccattgccatcgccggagttattgtccgtttgagttgtggtggtggcgttcgtaatcgctcgttgtggtgagtctcccgctggtgtagctgtaacaggccacgcccggtcctcaactctggccttgacgtattccatcatctggttcatcaggataccccggataccattgtgtatacgccacgatttgacgaccaatggcacaagggatcccgcatagacttggtccgggtgatcaatcgcgagcggccagaggtcctcgaggatggcgcactgagaggcaagcatgctgagaagatcgccccagactaggcttcccaggatacggagctggccgaaaaaaccgggcgtttcgtcagggcggtcggggccctttcttggggtcgaactcggggtcgactgcgagaatgaagccggtaaaatcgcccggaaggacgtagcttgtgctggcggtgtaagtggaagttgtgtaagaagtatagctagaggtgtcaactgccaggaaggctcgctggttgatgtggtcgagtagggtaagcggatggtccgtagaggctgtgtaggtatcaaggtagtgtctgatctcagttagcatattagtctataaaagggctggcaggagaagccgcactttctggctgcctcaacgtcatcctcagggatccctaggtcttttccatcacgccagtgtagggccagatgaggcttgagagctgcagacccagtctgtccgcttccccagtccgacagatgggcctcgaacttctctcggaacgcattccagtctgcttcgttttgcccatacgtcaacctatagacgacaaatccaacccggtgctcatcggtcttcatccaatgcagaatgtccgtaatccacggctccttgggtacaggctccactggctctcctcggatctcgcgcctagcccgatgctggcaaccaagttgaatttcggtcgtccgctgaaactggataggatccgcgatatggtactctacatgtccctcgcgctcccttcgatcaagtatattttgcacttgctggatgcgagaaattgtcttcatatatggcccgtacgccttgcttcggacatcccatttgggtgaacggagggagggcaggaccccttccggaattgaaggcgcggtgtacccgtaatatccgtgcattggcagcatgatagtatagtctgcgaccccggcaatctccgccagaatatgcagccgatctgtgatcttccactgcacgcgatccggattgtcgagatccgccggtcggtaggtcacaaggtcacgaatgagcggcttccgcagggcattgacatgaacaaggacccagcgatgtgcgcgctcggttatgacctcgaaatgagccttgatatactcagtccacagctgtcgcacattcacatgggggtggcccttccccctctccgcgttaactattgtttcgaattctcccaaatgctgcgaaatcaagttaaacgtgtcccggatgttctcctgcactttaggtcggttaagatactcgaacaccgcgaccactgccgagagatactgcgcactgtatcgaaattatccggctggtcgagccccttctctttccatcgctgctctgacaatggtgtaatgcccgcccataggcggttcttgacggaccagatattccgtccgacgatgcacatccgcgcctcatcctcaatcgagccgatgcgggtcatgacccgcgtgatgatgtcccgttcgtcattatctgttgtcggagacctgtgcagcagttccagctcggtgtccttgaggagttccaacgaaacggttttgccgttgggcagagtcccatggccacatgcactgaaaaaatgggctattgtttgtggttcgatgaggcgatcaactatgtttgtgatcagcgtggacagctgccgatccgaggaacttacccacccagaggcagatcctggttgacaaggtggacgctcgtgatggcaagctgtgtgccttcctccaagtacgaatagagttctgctggttgcttaccagacattgcgaattagcatcacccgtatagataataggcggctctacaatcgcagaggcaggaaaaaggggaggcgttttaaggaaattctcgcgacagacctcggaaaagggtcctgccaagagaccagctcgaggtcagggtccagtgcgaatccattggcgaatctgagagaaggtggagtgcagagatcgaactaggatcaaaaggagtagagaaggcgcttgaggccgccactgctgcctgcctgagtgggtggtacctgacggactctgggatcgctgcctgactgctccatctctgtggtatagccctaggcatcatcgctggttatgcttcgaataatgtcagaagagtgttgttgacaggaacgagcagttagctggcgctcttgacggttggaaaggttggcggtgctcgtatcagtgttaggaaccttcattgttgattggtaagcgatgctgtgcataaa

SEQ ID NO: 5730 - DNA, 6384 bp, Emericella nidulans
tgtctccacaccctatggtcgtatgtacttgtcagcaaggaaatacaatatgtagagagctatcgaagtgaatgagtttagtaaggtgaggtttgagggtgatatccctattactcgccggccggtccttacatttagttattatcgggagaatatgccgctaagacaaaggcgccatgactttcaaattagtcttagacagtcatattttctagtcgacagttatccacatgcctatatacctgagcacttccaggaccattattttgcatggcatagcaaaaaggactgtatacaggacgtttctgtccctgggtttgtttcttgcatattgtatctaagcacttggtaactgctcatcaaccattttcaaagacatacctcatgcgatatttgctccttttcaacttgtaagcgtcctcttgatgctacaacataggtatggccgtggatagcgctagttggatactccggcaaatcatcaagatgctcaatttggagtgttttaagaggagatgatctagcattaattagagaaatcaggccaggcatatctgttcatacagcttgagcaacttcgaaggaagtactagcgacaagccacatgatccctgcgactgaaggcgtttacctctgccttcctgttcgcaagtgagcggacggtttcttgagactcttaagggtcttgtttgcggtcataataaagtccctctttcgtgcgccctgcaaaacctcgacagagtgttctaccggaattaccagtgcccagccacacaaatatggcaattttcccttcttatgggatattataagttgcttagtactcctgtccagtctgttgtcagggatactgtcttcccattcgcccacttttcaagtttacggctgtccgtcgctgactcttgataccagtggttcgtttgcaaccttcgaagttacatcgtatatcacgacgctacaggtctgtgaggctcaccagcgcgattccctccatgtcatcgtctgagaattctgcatattcagctgaatcctcctcctcctcctccccctcctcttcctcctcatcctcgctgtcattctcactcttactctcccccccactctcatccccattttccgaatcatcctcgtcatcgctctcctgctccccctccaagccgagaaaacatggcacattcttacgaactgcagagcccgacagtcggttcgaaatgacagtgccaacatacctaaggttggtcccggaattaaaccagttcgcgggtatcactctcaggtcttccttgcctctaaatttttctaacggctcaggcaagacctccgcaaggatctgcgtgtcgatatacggcacgctcgacaaggtatcctcacgagttcgcagcagcaggcacctgtgcggctcgctcaacgccatccgaatcttagccaggacagcgggatgggacccgtaaggatggatagcattgcagtcctcttctgttagtgtagagacgtcaaaaagtccgctggctattccatctttgatgataataacatcgcttgtggtgggtgttccgtacaggtaaggggccattgggcctgcggtttgacccaagtcgaaaatggatgggggacaccacgagtaccggccggagcttgctatggtaacctccccgtggtaaagatagcaagtgggaatctcatggaaagtgttcaggatacacttggtttgctcgacggatgtgcgtgatgtgttaaccttccccggttcgaggcacagcagtgatgctaggatcattcgatctctcgcccatgatgtcgtccgaggcccaaggacacgcatcaggtgtggcaatgacttgattacagtgtatttcgaagtacctgaatttcgcactgcacggatgatatcactggttaccagatgcgcatggctgcggatattgtcgtctctggggaaggtgctgtagccccattgtatctcggcagggactagcacctcggtctcgagatccttaatgaggggctctgagctatcagggtccttgaaaaggaccatgacgcttgtgtcagaactcctcccggtcgcgttcagttcggccgctgtccatccacgagtgaaccaggacgacaaaagcactgccatcgcgggagtgccgtcatctctccattcaaaattcagaagttcctgatcatggattacagtatatgttgcattgatgtagttatccagcattcggtccatcgctttgcgtttctcatcccgcccgctagggatgcagatagcatcccaccagagcccatcacagttcaatctgagagcaattcgggcaaaatacgccgcaagacatgagttgactttgccaagatccttaaggccaacgcccgttccgtcgctccagacgtgtgaaatagcgacgtagcgaccgcgcggctgcttcagtaggggtgccaccgacggaaagtcgttggcccatcctctgatatcccaagcagtcggcacccagtctttatccgaatgagaggctatgtaatctctcaactcatcaggatcaaagtatgcttctgggcatgtgctgggctggtatggacatgttggcggatgcatctggcgcttgaccgtactgttctcgtcggcgaacaggcagagctgcgcggtacatcccttgtgcttagtgccctgatctggaaagcctagctttcgcaagtcctgggtgatggcaacaaagcccattggctggttgccaccggagacgaggaggttccaaacccggctagggcaaatgccgaaccgcccaagctctttttcatggcgagggtcgttgatcacctgaaagacaaatgactggtagaaggagaaaattctgtccatcctaacacgcatcaagttctcctgttcggtagcaatatacgatacccaatcccagatagccatgacgccaacaatgtcgaggcacggaagacgcgagttcatgactcccattgagggttcgtctgcttcctgaatcctctcaaccagtgagcagagatagtcgagatccagaagcttgggtatgactctcgagttgcggcctttgacagttgaactccagcacgagaatgctgtcaccataaattctcgaaacggcacccaggcgcagtcaggaagaacctggcgcactaggttggcccttacgacgcaatcttgtgcgtggcacggttgcaagtctgaaatcacgcagcaccaggtgattgccttgcggagtttctgccctggacagtcatcgatactggagcggaatgagaagggtggatatcgagcgatcttccgcttcatgttataatgtcgctctctccattctgcagtctcgctgaaaatccagtgcctattggagcaaccaacatccgcaagattatcatcggcaccttcctgagcaaatatgtcaggagcataacgaaggagcggagtgctgatttcatattcctcatcatcgatgatcacaggtgcaggtagtagatcatctgcgcttgaaccgcacatgttgcactgtaaagctaaattcaattgctcaaataatctagttccgtaagagaaaaatagacctctggttctacctgtcgagatcagagaagggctgaatataagtacttttcccgctcctgcttgggctgtccagctgatgcatctctaccatccatcataagataatgccaatatgtcgaaacgcaaacgaagcctgtgctggtcatgagaattcagctggcgggcacagcaggtgcaggggagaacagaactctgggcgaacgataccgaacctacatggtttgctgaagtgcaatcctggtcaatagacatcaccctgcactgacttatcaaatcagagtatctagtgatgcagctcctaatcggttttgggctagcccttcctacatatcgtgcattggctgtaagacgtgttggactgtcattcactgccacttttacaccctagtaagcgagcagcttgtacagagtcatccctcgtgtcatcccagctggagttggtttgctgccccccaccattccctggaaattccactacgccgtcgtcgtgaggtttccggctcccctcttcaaaatgaaaaacatgaggctcaagcgcacctatacagtgtcagttagcacagtgcataaatatctcactcctgccgccctaagtacagggcttctatttttactgctcatcacacccttcccctcactcccattgaggaaaatgccgctgttttggctacctcctctcccggaatgggctgcccagctggtcagcatcctgcccctgtgcgccctaattgagttcagcgaagaagccctgaaactgcatgtcttcgaactggccggattgattccgctctggagctggcctgtctcccctaagggagcgcgactcctgctctcgtccgataattcgattgacgcctgctgcctcgatcggcctggcgcatcccccgagctccattgcatggacggcaaatacggagatcattaccccagcagcgcagcagccacgacgaggctgtacctcagcgcccaaagtatcaccaagcgggtcagcaaccccttcgagaaaaaccctaacctctcccgccgccagaagctagacctctacctcgtgcgacccatgcccacctcacaatctggtctctggatcctgcgcgggtgggaaaagttgcacggcgtcgtctccccgcgctacgcgaccagcgcactgaccggctggatgctctggctcgcaatcctcatcctctccctcgtcagcggcacctaccttggcttcgcatatctcctgctcatgccaatcaccggaactgcagcctctctcctcctaggcggccaggcccggaacctcctcgcatccgagaacccaggcaccgaagaccgcctcgttgtcgtcaccgacagcctcaacggcggcagctggagcgcctattacggccccaaagacccaatcaacgccctcctcaaccggccccttctccgccccacgcgcccctctcatccgcatctcctccgctggatcatccgcctctgcgtgagcactcagtggatcctcctgattgtcagctccgcactgcagggctgggacgccgccgtcgtcacagcctggaccgccttctgtgccctcttcgtaacgtacatataccctcccgagcgcgcggcggccgactggctgcgtttcaactgcgggttggccatctcgcggatccgcacagcgttcacgacgcggcgccctctgctctctgcgctggcatatatcaaccccgaccgcgaccagacggcctggatggacccgattctggccaaggcggaggagcgtacgcagtgggagaaggcgatgtttgaactcatcgctacgggccagacggatgagaaatgggccaaggagtactggatgcacctggtggtagagggggtggagatggggaagaagctggagcaagcggttaaacaggagctggcgaggccgtagatgggctaggtaggtattgttgtcgtgatggtcagatggagactgactggcgcagggagaaaaacccaacaaaaaacccaaaaacgaaaaggataataatagatatggttcacgcgagagcccctgctatgcagcgttgtaagtatgcatgggaatgattagcaattatcaaggctgtgctatgcaagtcgactccaatatgaacccccaaagctgcccccgctcaagtaccactgcacgaggccgtcatacaaccccgtacttaggcagacccagcccctctgaggggtcgagtcaaatacgcagtatgaatatttctccagccacgcagtcactgaccccgcatggaggaaggcgctataacgcgggttcaaatctttagcgctaatggagaatatttatttgaacttggagagctagctagatgtatgctcgaaatcatgatacgaaacaggattgaataaatataagaaaaatgtgccagacaacaaggccccgaccagatcgcaccatgctgaaaactgcggaagcccgaacgcacagttgcagcaactaacgtggttgtgatgctcggcttactacccatgacttattaaataacatgccttcgcctcttttggattgcttttcttcccgcgttataactttgccttgtgtttagcggctagcttgaacttttgtcttagttttgggacacccttttcaagatttaatttgaagctgtggtcttcctaaaagctagccgttatcggtttgttcaggtttcctccatggtgggataaatttaaattgccggccgcttgtggttttaagactcgaaaataataaaattgcccagtccccccctcttgagactttttttttttgggggaacaatttttaaaaacccgacccctttgttgggtcatccttttat

SEQ ID NO: 5731 - DNA, 7339 bp, Emericella nidulans
ctgcctcttgcagaggagacacactgctgtagcaaatgcgggtgtgagcaccggcaacgtacttgatcaagtgctcgggtccgatcaggtagccgacgcgccagccggtggcgtagaaggctttgcctgcggagccgacggtgagcgtccgctcatagtactctggcttcatggtggcaattctggtaaatgggacatagtagagacggtcgtagacctcgtcggagaggatgatgaggttgtgcttcacggcaaggtcaccgatgcgttcgagttcatcgcgcgagaaaaccttcccaacaggattatgactagttcattagcacctaatgttgactgccggaaatggaggcttacggggaattgaggaccttgaaccgcattagaatctgagcgtctggtttgcaatcaggaactcacaatcatcttagtcttagggtttatcgtcctttccaactcgtcaaaattaatgctccattcggacgcaggtaacgtcttggtggctccatccttcggaggctgcagagggacgtatcgaatagtgccgccgggcatttcgatgttgctgatatacctacagactgttagataggcagaagcatcggagcgtccaaactcactggtcgaagaagggttcgaaaatgataacctcatcgccttgctcaatgaaccccatgaaagcactcaacatgccttatccagtcagctcgtatcccagaaccagtgtagataacctcaccctcgtttgcgccggtagtgattgtgacttcggtatctgggtttagctggcgcccaaaaaagggcgagtacgcgtcggcaagagctttcttgagccgtgggcggccctatataacggtaagccggagtctcatcacggttctggttctgagataagatgtaccttcgtcggcgagtattgattgcagtcgacgcggtcaagggcagccttcgcggcatctagggcaaactgcggcgggttgtacccgctagagaattatgcggttagcatttctctgctgggttttagaagccggctcactcacaagaacccttgtcccatgttcacgataggctggacaggagaagccgcagcggcttcgttgacaatggacctagaagccagtcagaataatccttagcacgcattgattgcagattccataccaaacgtcctgtcgttgacctgcaacccgcgccgcaggcttgaacgggtctgaacgagctgtggtggccgacatcgctcttactccgaattggaaccttgggatgcggaggctgagtcttgaccttggggagcaggaaagaagactcgatgaattgaaggatttaaggagcgtggcagaagaacgagaactcgagagcatagagaatagttaagaggggcaaagggtgaaagaggggcaaaatgtaactgagggacggaggttggagaatgaatcatcccgcttgcgacatccgcggtctatcgttccggtctatatcggagccctaatccaaggctggagacattcactgcactacaacccgtctgataacaaacctggataacctcgatgaggaatatcttgcttgaatgacgacatctgataattgtgaatatcggcaaatattcaagtgctgactttgcgcgcctagacctgtttctggtttatcactcaagcttgatataaaacccaaagttgataccatgcagactgtagtacacagagattaattgacagttcaactgaggatttgaagggtgcgatataggtttagtctctatattgactggctggatagctgaacgaatcaggcactaaggcaccaatgcgagcctacaggacgtgactaagctatctagacgcgttcacacgcgtcagcaagactgatctatcaactccgatgtcttcaacgatttcattcaagatactcatgaatctgtcatcccagtgccctggtctggcacacaggtcagctgtcggtgattgaaaccatggtatcttgtccgatttgttcgaaatcggtctcatcgctaaagatcaatgaccacattgactcggactgccagcaattcatcgaagagcccacatccagctccagcgatccttcaccgtcccaaaaagcgcccgtccctgctttctttcaaccgtcgtccacgaaaaaagcctccactcagcgcgatactcactccgttgcttcccccctccgtaaccccagtggcaagagaccggtaacgcagaatggcggattggacgatactgccgctcgcctacaagcagacgaagcttcagaacccgttccgaagaaacccaaggtcaatgcattccagagagccgcgccgctagccgagcggatgcggccccgaacactcgacgaagtatgtggtcaggaacttgtcggcccaaccggtgtactgcggggtcttattgaggaggatcgagtgccaagtatgattctatggggagggccgggaactggaaagacaacgattgcacgagttattgcgtccatggtgggaagtagattcgtggagattaatagtaccagcaccggggttgcggaatgcaagaagatattcgccgatgcaaagagcgagctcggattgacggggcggaagaccataattttctgcgatgagatccaccgtttctcaaagtcccaacaagatgtgtttctgggccctgtcgagagcggacaggttacgctgattggggcgacgacggagaacccctcattcaaagtgcaaaacgcgctgctctccagatgcagaacttttactctatcaaagctcaccgacgaggacattagatccattctaaaccgtgccttaaagactgaagggccgaactactcgccatctgccctagtggacgacgagttgctcgattacttagctaaatttgcctatagagacgcccgcacgtatctcaaccttttagaatgggcgatgaaccttacgagacagtcacaggtcagcacatacgcgataaaacgagttctgactaatacgcttgtctaccaccgtgcaggctaccagcactacgacaccattaccgtctttcacaaatccatccggggcagcgacccggatgcagcgctgtactatcttgcccgcatgatacagtcgggagaggatcctctctatattgcccggcgcctgatagttgtcgcgtctgaagatataggcttggctgataatagcatgttgactcttgccatctcaacgcattccgcggtggagaagataggtcttcccgaagcgcggatcaatctcgcacatgctacagtagctatggcgctgtctcctaagagcactcgtgcatatcgaggcctcaataacgcctttgcggctctgtccgagcctggaattgcaggtcttcccattccgattcatttgcgcaatgcacctacgcggttgatgaaggaactggggtacggaaaggagtataagtacaacccgaacttcaaggatggcaaggtggtgcaggactatcttccagagaagttacaagacagaaagttcttggaagacttggaccttgggacgcagattgatcctgatctagagtctaggaagtgacttgttggcacaggttattcatgagtcgaaccgcgctgtttcagcatcaagggatttgcccttgctccatgtacactgatacccatatcttgcaaattaagccaccactgttaaatatatcagtttcagtctataatattccaataatatagcacttgactcattgtacggacgagcgttgcatagaaatgtcctggccaattaaaagccgctggggccatcgctccgcgtcgctctcagcgtcagaactgcctggcaacgcaaaacacaaggcagagatacaaagatccagacgatcacccctcactccggacgcgctttgctcagaaactccccaactcgagtgtagcgcagccatacgcttagcgcttttcttgccctcgacactcgattggtgttgcccctgcgtcgacgccgcaacgacattgggccttgtgccatggcctcatccggccaaccgttcgggtcgagctcctataatacaggcaaactccctgaccgatcaatgaatcagaatgcgataccatttagcgcttcttcattttctcgtcgtgggctaggagcgacccagaagtgagttcgcgcccgacgccggtaagtcaacccagcaagcaacccagcaacaagtacatgcgcaaacacataatccgtcacaagaatcgaatccgttaaaccggttaacggaggagcagcgcgaggaaatcaatgaagctgtacgtcttcccgtatagcccaattgaccgcggttcttaccggagcattgactgattcttcctgctagttcaccctcttcgatctcgatcgtgaccgacatctagactaccatgaactccgtgtggcattccgcgcccttggcttcactctcccgaaacaagaactcatctccctcttaacgacgtacggtgtcccacgtcctcaggtccaacagcaagccgcagcgcaacaatctcagcaacagcccaagacggctccaactacgaatccccagcatccatctaacctgttgatgccactttctgcatttcaagcagtaacagcggtgaaaatcctcgagcgagacccgcgagacgagatcctccgagcgtttgagcttttcgacgagggcgggaaagggtatatcgacctggaggatctgcgccgtgtcgcgcgggaactaggggagacgggcctggaagaggaggaacttcgtgcgatgattgaggagtttgaccttgagggcgttggcggtgtgacgagggaggcctttgtgagtatctgttggcagtgaggtccaattcgaattttgtgatagcaccatatatcacaggtgtcaatatggatccaatgtcttggaaatggggctattctctatcgtttgtctgtactctgagcttgatgttgttcttcctgggcattggtgggcgccgattgactggatattgtttacttgccgtgctatattttggttgtcaccgtggatgtaagcgtttagccttcctacaggtttaggaatcttggattgaccagtacattgctgccttcaactgaatcactacttagtgggctgtaggtgagcttttaatcatggttgacttaaccatcttagactggaatagataaagagcgctagacacagagcgactgcttgcacgtagctatcttttggagtactagggggggaacatgaagagcaggcttttcaggacaagagcgcttgcgtggaatactgcgatatatgtaagctttatctcgcagattggccagggaagaatcatggtaggcacgaatacctctaagtgagcaaatgcgttaatgccaagaaaaaaaaaaagtaacaaaggccgtcgtatttcattatctaagaaggaaaggggaggaattagatgatatatgcggagtatgatccaaaacctccaactatgaccaaagacagtatgcagaagtacccaagaagtggcaagaaaagtaaatgcagtgaacctccatcatactccaggatcgaggtatacccgcgcacgccaaacccagcccgtattatgctatatacaatccaacactatattcgaaacacacaaaaaaaaaatctatgcctttcagctccagaaagctatctacgcataccgcaccgtcggcgtataccctggcggcggatcctcatacatacccgggccagaataaccaggataaggagatggtatcggccctggtcctcgctgaggtccggggccaggatagtgtccgtacggactcgggtagggagcttgcggaacctggccgtatcctgatcccggcgatcgacttagtcttcgcattggggtctgttgcggctgaggcggcattcggcgtggccaggggctgtacgcagtggcaacaggtggtattggtttcattgtatacctggtcctcctgcagcgtctgaagaggcagaccagaatagctaggaggatgaggccgccaacgcccgcaacaacaggaatgatgatattcttgtgcgcttcaagccaggacttcccgccctcgcagatgccgctacggatcgcccaccattctcgcagggcgtgccgtcgatgtaattctgcgcgttggtcatgcattggatcacccgaagcttgaacccctgagacagagcagtagatctggcaggaagggaacttgctatcgtcgcaggcagttgtgtcattactgccattttctgagaagagcatggttcgacattgctcgtcgcggctggtacattggccactagcgcattggagtccgttgccgcaagagtcgccgtcggctttgtaagtatctgttgggcaagttgaagagttgccggtgcatttttcctcaatatcgcatacgccagtgctggcgcggcagacggtgtttgcagaggagaattggcacgaggtgcagcagccgtcgtttgcgtcgtcgcagacggaaccttcggtgaatttgcaggtgcttgcgtcgcagcacttgttgtcgccgcagccttccgagccgccgcagtcgcagtcttcgccttcttcaacaatgccgttgccgcattgcgcaccggtgatggtaacaatgcccttgttgtctgaaagacattccgaattgaccgtgttgcggccaagcgcggagcagacgttgccgattgtgcattgtgaaaacttagtgacgtctgagctggtgcttgggttcatgatgtagtctccgccggcgtcacatgttgatgtgctcaacggacagcatcctgactgggtagacgaggattgctggttctggctgcacgattgggatgtgcagtcgtgaaccgctccgaaagtatggccagactcatgggcgaaaatctgccatccagcagcaccagtggagacgacaacgttggtaccgctgactgaccctgaagccttattgttgcacagttggcctagccaagcaagcccaacctccggacccgtgttgcagtcagtcattagagtccagtaggcgttattatccgattgctccccgcgccagtcagagaataaatctagtcgctgggtgatgttgccctgcgagcatggcatattccattgtacggcagacgaggtctctgtgcactctctgtctgtgattgtcaagttccgtaagccgagggagatgttgaaagagctctcaaaaacgtctgaggcgctattgaccatgctgaccactgactgctgaacgtcgtccctgccgtcgaatttctcccagaatgagcagtctgtagcaacaccgactaaagccactttcttcgtacttggacagccacttgtatcgccaattgtcgcttgcaagtta

SEQ ID NO: 5732 - DNA, 6492 bp, Emericella nidulans
  unsure (1)..(6492): unsure at all n locations
ggcgtagccagtgcagacattgcgtttgaagatgctaatatgtgctgtagagctacggcgtgttccttgcttactatctctctcacgatgtattccccaacacctcggcacttatgtatgccttcactggtggcttgagtatatcctgcgctctcctcgttgcgcctctggccacctacctcatccatgtcttggggacgcgtgcggtcctgaatattggtgtctttttcgaaacactcagtctgatagcatcttcattcgtttctcagcgttggcagatatttctcagtcaaggcgtctgtttcggtatcggtatgggatttctattcgttggcagcgtgggaatcacgccccaatggttccatcgtcgacgaagtcttgctatgggcatcaatgctgctggatctggcctaggaggactaacctactctcttgccgtgggagcaatcatccctcggctagggcttagttgggcatttcgaatattagggattgtttcctgcgttgtgaacctagtgtgtgcgaacttgctgagagatcgcaatacagctgttggaagccgcttcaaagcattccactttccacttttcaaacgcccagagtttcttctctttcttggttggggtatattttccatgcttggctatgtcgcgatcctatttagcatgtcaaatttcgccgtctcagttggtctctccgcccaccaggcgagtattattagcgccctgctcaacctcggccaaggactgggacgaccctttgttggtatgttcagtgataaacttggccggatcaacatcgcaactttcctttccttcctctgcggagtcttctgtctgctgatttggacatttgcccgcagtatgggccttgtgtccttttttgctgtgcttgttggcactgttgctggcacttactgggccactgtggccccagtgttggctgagattatcgatttgaaagacctacccggtggtcttagcatcacctggattgtcctggtggcaccgacaaccgtggcagagcccatcgcactgttattacgtgataacgactctcccagccgcatttatctacatgtgcaacttttcaccggcctgatgtatattgcggccgcggtatgcctctggacagttcgaggctggaaagtgggagaaaaccttcgcgtcaagcaagaaaagtcagcggttgccgtagagacagataaaaaagacgaaagtgttgttctgcagcagcaaagcggcggaactggtgcgagccggtcacaacagtctacaaagacagctgtttggtatccgcatgctctcatgcgcgggatggtatcagccaagaaggtttagcatattataattcccagaatatactcatattcaacagataataagaaatttgtcttgagccaaagtcttagacggtgaatagaggcatatacttttatatattgtactttgaagccgtaacttttccccagccattccatgaacgccgcgtataggtgtagcatgtcacaactcatctacaacacaatagtggcaaagccctgcttgtaactaaataccctaattcttactattcagaatcaatatcctcaccctcctcttcccaacaccccgtccagtctcctccttcacagagctaatgttaactttaaccctctggaaaagctccacggccaccgaccgttcttggtgccccttattcgagaccttaagggtatattcctctggatcaaactcactctcgcgcctggtaacaagctccctcctatcctcaacagaccgcagcgcctcatcactaggcagaacgaaatcctcaagtctgactacgccctcaataccaaatcgaggcacaaagaccacaacaccgttttcaaagacgcgcatgacgtatccgtcctcttcgatgccgatgtctacgccgtttgtggcgagcttctcgctacgtgctttgagagcttgaccaacatagtactcgatgctggcgcggccggcgtgctgtgcgttgcggtgacggtagttgatgttgcggcagatatcctcgaggcggttacgcgtaatggagccctcgatcgtggcgcggccgtcttcgccctcgtaattgattgccgctgcgagttgacggtgcacaaggagatcggcgtaccggcggatcggggacgtgaagtgtgtgtaaatgggtgaggcgaggccatagtgacggaattcagactccgcgtgcgcgccggcgcagaaatactctgcggaagtcatgcagcgggtggcaagaatgcggacgagggtgttgaagaacgggttttcagcgtctgtgcagcggtcgagcgagtcggcgagggcgcgagagctggagacgtcaaggcgcatgtcgcgcttcttggtgagttggttgatcagttcttcgaagttttggggcgggggtgtcgcatgtcgtcggagcatggcggtttgcgggaaggtgctgtagattttagccgcgacggtgatgttggcgtggagcataaattcttcaacgagactgtttgttgcaagcatcgcttttgtcttaacgtccgccaaggggtcgccgacctcgtcgttgtctgcttcgatgcggacctctggtgatgctaagttcagtgcaccggcatccatgcgcttctggcgcaggattttagagagatgaagtagggtacgcatgctttctgtcagctcatctgtcttcgatgggtcatcgatacgtagctgggcttgttcataactgaaggcttcacgcgatcgaatcacagatttcgtgaagtcggcagacacaacctctgcgtctggcgtcatttcccacagtactgagaaggcataacgctccacatatggcttaagggaacagagatctgtgcccagaaggtggggaagcatatcaatacgcttgtccactaggtaaactgttgttccacgaacgctagcctcaaggtccatagcattattgggcttcacgaaatgagagacatctgcgatgtgaacaccgacttcgaagttgccgttcggcaacttccgcgcgtgaagagcatcgtcgatatcctgacaacctggaggatcaatactacagataagaagatcccgtagatcccttcgccctcgccagccaatatcatctttgcttgccgggacacgccaatcgtgtccttcagggggaagacactccaacacagccttcgggaagggcttgtattgtacgtcccattctagtaacaaagcctccgtctcagcggacttcgtctctaattcgcccagtgaccggatgaagtgtccggtagggtatcgagagtcgcggttccaagcatcgatggtgaccaggatcctttgacctaacagttccgtagcctgtcgtgttcgaacccggatcttggggaccttcttttccatcgggaggacgaaaacattctgctgtcgtcggccagtggtttgagagccggtggatgttggatcaacggttccgacgtattggcgccaattccgtttcacgacgcccacaaccttcgccgtcggttgcggccgcccctcgtggttctttccatgcgcttgcctaacctcttcttgtaaagctctccgctccttctcagtgatgacagtttcgttgtcctcgccctcaggattatcattctttgtcacggcttcttcgtcgacgatctttgttgaaggcgacttccactgatctttgggtaagatttcaaccacgacgacatctccagatatggctcggttactgttatgacggcccataatgataagtggtttatcaaatgccgcgactttgacttgtccctctagataattatatggcgagacattgaaaacgccttggtgaagatttccggcccgtaatcctgtcatgatcttcgacatagaatagtactctggatagtagagttctccgcgggcttctttcgcctccctcgcttcccgagactcattgatcatgtcgagcaacctgtccgcatcttccaatccactaacgtagttctctaacgacaaggccgtcacactttcctctttggccttgcgcaagttctctttatcatcagttataaccacaatagccggaatggacttctccttcttgcttttggtaactgcgcgcaaatgatccatgtaccattttgcgacggtcctcacagctcggtcattccggtcatttatcgactcatcctgctctctcctaacatgcgtctcgagacgaaactcgttgaagaaaaggtagaagcgtttttcgtcggttttgattagcgcaagcaaacggttgtagagcggaagagactggttctttaactcttccaggacggtttgaaggataatcacgtcatagaaagcccctgtatgctcaaacaaattcattccattcaaaagcgcattcgtgtcaggaacaatgtaatgtctccgggggaaggccgttgtgcctgcaggttgcttcaagagaacgaatggcacgacatacaacgttatgttagcaaaaagactttcacgaaaaatttaagtccgttctcactatttccatttgcatccgtcggtgcaaccgaaaggggcaaaantgcataacctcgaagagcaagggatatcctgtcttaagtagagctcgcgaacaatcttctgcacttttccactttttgtcgaccggacgaagactttgctagtgacgttcgcagtggaaggatcagttgaataatcccgcctgagactcttcattgtgccccgattcaagacccgactttgcggatcagattgtctggagcaaagctggttgttgtagttatttcgatgtggtgtgggcggcgattatctgctaattccgcagtcttgatggcctgtaagaatccggcaagtgtcccgcaatagctcccttcgccgttagtcatcttaaccatgaagacgtgattttatattgtgttgtatcttgtaaaacctggtaggttgctcatccttggctcaaaatggctatcgcagtgagtccagatactgtggccttgcctatggccagaattccactcggacagtcattaacaaataacaggccgtggggcaactatgttcaacagcaaacatttcctccaacctcgcgcaatgtcgaacccttgtgcgaaaggccgttgaagctggcgcgaaggtactctctaggtagtcttagagtttaaccttctttatctgatgggttatgcttaaacaggctctattcctacccgaggcagcggactacatagggtcgtccccagcagagacgatatcgcttgctcgtcccgtacaagaaagtgaatttgttcttggtctccaaagtgaggctcgagataacaatctgcatataaacgtcggaattcatgagcctgcagcaaacggaagggtgaagaatacgctcatctggattgacgacaagggctatatcacgcagcggtatcagaaggtacacctgtttgatgtagatattaaaggagggcctgtattgaaggaaagctcgtgagttccccgctgatgcaacctgtgagtttcgagctaatggctgtacgaaggagcgttgaaaaaggaaacgaaatacttccgccattcgacacagttcttgggcgtattggattatcaatctgctttgatgtaggatcccgttggcttgttatctcttctagcaaaaagaggaaatgcttatggcacaattttacagctacgcttccctgagatcagcttagcattaagacgccagaatgctcagatcattacctatccatcagcatttacggtccccacaggcagagcacattgggaaacgcttctccgggccagggctatcgaaacacagtcctatgtaatagccgctgcgcaagcaggtcctcataatgagaaaagacagagctatggccactcgatgattgtgaacccctggggagagatcatggctaagcttggcgacgagtatgaagagccacagatcgtcgttgcgaatattgatctggagcttctgggaaaggtcagaacagagatgccgctgcttagaaggacagatatataccctgagatataggcggctactttcctatcgcagaggttgggcggctcgttgctcatagatcaatcacgccttacaactccagtcatttcaattgaggcaacttttcaatagcctgaagacgtctattggtagagtttctttcccttctggtagctctaaagcaaagcgtgggaatgaatagttcatggtacaatatgtcagatgcgcgtggagaacaagtaaagaaaagcgaattgaatgatacaagagagccaacaccatctaaagaggaaacatctttaccgagacagatgtgaccattgtcctgttgaatcactttatgtacacagtacaacgggaatcgggcgacgtcattgtttacttgcgctggggatcctcaaggataccttcagcttccagtctacagtcgggcttcctccaaggcccatgtttgtatcctgtacatcaggtcagtttatttatccctctctaagcgtt

SEQ ID NO: 5733 - DNA, 6687 bp, Emericella nidulans
tcactctcctttgggcgaacccctgctgaatagcggctcaagcttcacgaagtttgcaaacataatcagtccaccgattggggtccgcaagagtaaatggaacctcggggccctggtccgcaagctgaacctgagctcgctcgtccaccacagctctcccagcctaaccgcaaggctgctgggccgagttaaagaaaacttggaagtcttcatcgcacccagggcttcattcgccgtaaacagcctgccgtcactcgcgaaatgttccagactccgtcatctagacctctcgctcgtggccacacctattcccttccaggatctcagaagaagtctaagcaacctcgtcaatttgcaaacccttcgccttccccagtcaacttccatcacaggcacagaatcgttcggaataccttggccccagaatcttcgccgtgtccagttcagcggccacttttccgctgaaccaatgcgatcgttccactggccgacatctctcacaagcctcactctgaagaactgctccgacctctctctcacaaatattagcagccttatgtgcagtcctgatttgaaccgaacgctaaaacgccttacaatatccggctttaaccgccggctgagcccagaatcaattacctcaatactcggcttaacacccgctttgtcatttctcagtatccctggtgacatggtggatgacacattcttcgacctgctttgccacatttgcattcctacgctggaggtgcttgaattcggatggccaagtgaagacccgacaatatactttggtatagagagcttgctcggagcgcttgagctcggccttccgaacctatatgccgtgggcttcgccgaggtgttcacagaaaatagcatgttggatgacgacgcggtcgacgactttctgctcaaccgtgcaaaaacgagaaaagcgcttgaaaactctaacaaacccactctgaacatccagccgggcgtctattatgtctaagacttatctggttgtttcgctaatgggtgcttcctgatcacttcttgccggagaagggcacgggttctgatgctctaacctggtgttagggttgatagggacgaccactgaaactttccgtatagcaatatactattaatgactgttcattccttgtctgacttttatgtggtatgcccaatcgaaaaatagcttgatcggattcgatagatgctagagttagatataccctccggaagctgccaagctattctacccaagattatcgccaagaagaaagctgaagttttcaactcataggtttcagttctgaatagcaggtatcgtgttaatattgttatctgcatatgatggaatgttaagaaatggtgcagaacggctagtaggacaaattggtgctacgccattgacagaagatagaagaaatactctttgatttaccaaaatgcaatcattatggtaataacaaaggaccagaaagcaaaaggaaagaagggatgagaaaagaaaggagaaaacagtgcaatggatttagacgcctacacaaatcatcgatcgcatctaacttgacacatgcattatagacgagggggaaattgtagaagtaaaatagaaaaagcaagtctgatttcatgattccagactcatcatcgcctgagtataccttgagaaggccacaaaactacacaatacacccgccttcgcttaggccaaagaagcaatcaccgcaggggcaacacctccttcttcggcgcgaactgtgatcttggtcgtcactccagtcttggtggagtacgccatctttatgagggccgcgactcggccgcctaatactgtctttccgaataatttaagggtgtgtgtgctgttgctgagggcaacgtcggttccctcgaggggttgtagagagagtgtagagattaattgttcggtcgcgtctgaaactggttagcgcaggtcaagaatcaagggtttcaagtcacatacctgcgatgcccttcaagttgctgagttgcagagtctcactgacttcctcgccgttggcacctgcctgctcccaaacatggtcgaagctgccagcaaatgtggggatgacatagtcgctacctgttagctcgagatcgttgacctgatattcatcttcatatccgctgtcttccggctctccagttgtagggtcgatctcctttgtagtgaatttgaggttgtttgtaaatgaaacaacggggacgctctgttcgccctcgagcttcttaaacgtgacataaaccacaccgggttcgttggtatttagtttgggtgcggggacgatgaattcctcctccaggatatcttcttccgagggtgttgcgaccacggtaacgtcttccagaaccgtatccggaagagtgttcttaatgtcatattgcaaaacaatatgctccttgaagatgtgcttgacggcagtgacaacgtattccgtttcgctctcgctgagttcgacaggaacagaggacttgagcaatgttccgtacgccttgagctcggggatctgcatgagctgctcggcatacttttgtgtggcggccgccgtggcagcttcggccacaccatttgctttggcacccttggggggtccggtagatggtgccttgagtgtgggtgtagcactcgtaagcttcttagttcgctcctcagccaacgcctgctcctgggagacaactggaattgtggacacatcgaacgccgtggcaaaggtctctttatcgccagatgtcacatacatgacgagttgatgctcaaaagtagaaagagaatacatcgattctatctagtcagcgagagtcggagatcgaagtggtgaagtacaagcttaccattcttaatgaatagattggccatttcatcctcttcagccatcaatcggaggtttagagcagctcggtcgcgaacttcgtcatcggtgtcatcaaggcaccgcgtgaggagaacagaaacgctggacttcacttcaggatccttctggccaacgccaaacttggccaaagctgttacggcagcagcacgaacaatggcgttttctaggaccactcggttgtagatgtagcggatatacttggtcggctgtgatgtcttcgggccctcaacaccgagaagatgaaggactctgacagacaatttagtgaactcgcagtcctcgataaactcacaaagatgggcgagggctgccacaagttaataaaccacaaattaacagttcggaaggagaagcccgtaccatcttctttgctttcaggctggactttcagtaccaccagcacccccgctgcggtcgagacccccgttgttgttcccaccggcacttcccccgtcgaggtctccagctccgttgttccccccgctgtcccgacctccagcgtccctcagccgcccgctcccgtgcagccttccacctccgtcatcgctgtgaccacctgcattcccaccgtcacttactcgaccgtcactatcacccccacggttgctcccaccacctccaagcccgtcatccccggtgtccccaccaacgtcgctcccactgacgtccccagcggcactgctacgtaagtatccacgtccatttcttgttcagggccagttctaacgtgccacagtccttctccttctccccccagcttcaccggtgctgctagcgctgtcaccaactctttcggcttcgctggtgttgccgccgtcgctgctttcttcttggcctagattttttcacttcatgtcaatagtctagccctgggtgactcgtgagtcggtcggtcatggttctgccgtggtcgtggagatgcacggggtgcagagtccggggtgccgttcaattttagttgtggcttggggagagtaatctgattcttcagtcttatattactatctcttgatttctcttgaatttctctttggcttgccggattgcttcggagttctgtgaagctcagtcttggtggctggatacgagttaatgtaaaccatgaacgtccttcacatcgggtcaatttcttcgaagtaatactattggtaatcttaatcgtgactctgatataacataactgccatgtccatttccaaatctgtacccaaaattcaatgtagaaaactctgttggtcgattgtcaagtagaagaccctcattcctttatactcagatttctatatctatgcacatattttcacgcacaggaaagagtaaagagcaacagtatgcccgggctatctactcctggacccagtctataccttgagtctatccttttagcgtcaagactcgctctcctttacctcacctggttaagagcgaaggcttgtttttcgtgttcgtcacttgcccagcgatggcttgcagacacgtccgtagaagaactttattcttgcttgggcccgtcatacgtatgttccatatatatcacgggcatttctctcgctattggttactacgaccaaggccctgagatttatgctttttatgcatccgtgcgagagaggatgaaatggacggctctcttatgtgaaccaagaaaaataagtaaataattaaactggaaacagctgcatggcgcggttgagctgacaaagaagtgaaggcagagggtgcggtggcagtgttgctgcggtttttttctgcttctcctctttgtctccaacaccaactcgcacgcaattggactcggcgcttgatgcttcgatctatctgcatgttactttgatttcactagccttgcaaaccaacttctcgtgtctcctgggtgttaggcttctgccctctatgccttgcacaggagggcaacaaaacagacgataaaaatgtgattgcagtccatttttcagtttcgactcagatcaaaggattcgggggccaagtgtatccagcggggcaagtcaccattttgcttcgcctacgctcccattttggccgctcaccttgatattgtggtacttgtccgctgctcacaggcgacatccctcccttagagacccagttgggctgttggcggattcaacatcaatctccgatcattccttagcccagggtcgtcttcagggcgttccgccccgggtagggcggcgcagcgtgtcgcagctgtcgtatgagctgcgagaggtcctcctttgttgttggcctcgtcaaagactatagcaccgcctcgaaagtcaggcaccctccgataaatatgaacccttgtcacgccttacggggggtgctagaattcccccatctttattttcttactgtacgggcgatcgccgatatacctcgtgtgacgatccactcgtgatcgtattccgcctatattcttggttcgtcctcgtactcgcatgagtgctgggtccattcgacgaagcacccgcgcttgatttgcatttaggtacttataatagaagaagccgggctcttcctggccaccgttccttttgctctcctctcaggcgcgtgttattgcttgccgttagaatggatctctcctcgctggaggggcctcccattgcggacactaggttctccaacgtcgctcagggtgctgtcagtatccctcagattcagttcgatactacattgagtcctgtgagccctctggggccagatggctgggaccttccaccgcggcccgcttccacgagcgccattcctccccacaataagtactcgcatacgacttccaacagcttctggcaaagcatgcatcccaacatcaccgaacgaaacttccgcacgcctccaaaccagtccatgaacgcaagaccgtcccgaagcagttcacacctcaccactaccccggcgtcctcatctcgatcttcccgtcctcactcaaacagcgtatcaacgccgcaccagcttgtttggttggagagtgagcagatatggattgtaacagctcggacgaataccacacttgcaccgcccgaacggtcgcattcttcgatgtctagtcttggtccgtccagagggatggcttcgatatctcatttccaaccaatgaacaactacaattcaacggatcttctggcggatactcattccgatgatgttcctcccccttatgaacagcatgtcttcgaccaacctttaggacctattctacccgccgtcaccagggtaaatcacgaagagtcgccacagcgggggtctcgatggacagccatcggacggcgagttacttgatggactgaattgtgaccaagcatacggttcattcagaccattgtcgcgcataagatattggatccgctccgaccgcatcggtttaggtcaagccgtgaaccggaaaccttggttctccaggcacatccagattcctgccgccactgaaacagcgtccgcgttcgaccgaatcgccacgtacattcaatggaatgaggaaatgccagtgcgattaacttgacttccggaggtcagaaattgacacgatgacttcacgttctagtgcctgaggcaccgacacaatgttcagtggcttttttcttttgcgttagcgagcgttgagattataccgggtgctggcgttgactccatattattatataccatgactgaataagtaatgggttgtccttggtctagcctgtgctttcaaatttagaaatggtgttgtgtgcgggtactcaggcccgatatatataataggatatagactcgacacattggagttgaccataggcatctcccc

SEQ ID NO: 5734 - DNA, 3289 bp, Emericella nidulans
cgggtgatgttgtgatgcacatgacacagctgaactttttccgcgacctactagaactcgaagctcccaacctgacgtctagaaccgtcgtacagtcagcatctacattctcctccccggctctcgactttctcatttcgcacaagatccacgacactctgctggagtattatgtggatgaatcgaaattggaccccgtggatttaagtttcctttgtggtccagtcatggcttacgtcgctcaatatgctgagctctaccctaaccaccttttgcagaacccccaggcattattagatcgcattctctctcggattgatgcttctctcttaatttcatcctcacagtgggcacatggacctgtaccaagcggtcaactcaacgtcctctcatctctcccaagggtgctactgttggaggccagcagaaagggcgtaaaccccatcttttccttaccaacaaaccctccgaatcaggaggtgttcaacgcgctgggaaagattttccatgggcctccgaagcataccatatctgactcattggacctcaatatctccggacaaacagcaaccgactggaataaagaagcggcagccgcccgcgttctgtactttctctatcaaaatcatcgtccgtcgttatgggaggattgtcgtcgcagcagctgatattttggcgatgaaggacatctctctcgcggccatatcattcatgcgcgctatagtcacatctaatcggcagagattagcattcgacttgacctcatccggagatgggacatctggggaccagctcacacctgaggatgacctcggtcgtgcgcctccggcaacgcatggcgtacttcctacgacaggtgcctggcttgactatttttccccagctctaaccaccctgataccatgtctatggtaacctcctcggtcgtactccgagtttgtgggcggtggagcggctgacccacagaatgctgtctggaaggttgcgacagcgaggtacgaggttctagtcgccttgtataggtctattcaaagcatagaggacagagcgtcggaccttgaggatattgtacgcactttgaagaagagggtagacgacggacctcttggtcctggaactcagacaattgcccaggtggagacggtaggcctatagaaatcgcaagggaataaaaatctctgtcacagttatatcctcgtatttcccttctatgtatacgagatatctaaagcaagcggcctggaatggtgctccgagccctaatttcgatgcgttttggccccgccaaggcggtgagtcaagctccgccggaacttttctcgcagccgcggtcatctccagacagctttcttttccttttaatcatatcttacaaagaccatgtcgcgatttggcgcaaagaagggcagaaagctgcccggctcagaatttacatgggatggcacagatgcgaacgcagaggcagacacagcacctacgcccttataaaatgtacgttaagcacctcccaccttctgggctatgacaaaatcaaactttcatgcgcgatcttctgccctttgtgtgcatatgcatacgtgcctcatcgcattccattcggttatggtctgacccgtctatatagaaatacaacatcccacagccacggcccctaagcgcccgcgaaaaaactcaagtcgacctctaccgcaccctccgcgaacgcttccatgacgggccctactattcgattctcggtgtctctgcaggggcggcagggtacacgggtagctccaaggctaatttcgacccgttcaatggcatgcaaagttattccgggaagtaccaaaagaagaaaagacttgtgccgaagatacaggggaggccatatggtaagccaccctaactcatagtcgttcattacgtttggtgtgtaaggatgctgatatttgagcgtcgcgcagtcatgaaattcttccctcgcgaactctggacgaccatccaaccgaactacaagcccgacggcatcttagacggctacgtcccgcagacactacagactggaacaaaacgtgggttcgaagaagacgatgaagatgaggactctgcaaagcgccgacgagaagacggtgaggagggcgaggatttggagaacaacggtctcctggaagacgaggaagatcaggagggcgaggaggagattgaggacgatgactttgaggatgacgatgatgagatgggaggcgactacaacgcagagcaatactttgacggcggtgacgacgaatatggagatgatgggtttggcgatggagggggcggtggcgacgaggacacctattaaccacgcggtgtataaacggatggatacccttgctgagattcttggagtttggctttctttccatcgaagcggttacatagcatactactggagttggttgagttgtttcgttgacatgattccgatcaccagcttatgagcatttctttatcattatttctctgcttttgtggtatcagctctcaaaacatctcaagaatacccctaatcgattctgatatcctcatagacctccgctaccggtcctataagccacaactaaacgacacagcgacatgacgtgtcatcaggccagggccattatgatcctccaattgaaccctgagttactgaaaaattcatatactgaatatgactgagacatcgtggcgctgctagcacttccgtgatattgcactagtcctggctgtgtaaatacgttcatatgcgcatggccacctgcagatgcaagatacactccagtatccacagatgaactgtagttcgttcgaaacatttcttttttttgccccaccccgtcatgaccaggatgccggctctacttagttcccctgcagtgtctcgtgtagtcgcacggcagagtagtgcatctgaggtgtctgcggggaacgctcagagatgaccgcgcggttcggcgataacggcctcaaatccgcagcctactggattctgtaaatggaggccggtagtagatgaggcgaaatggcgaattagtgtcctttcctctcgttgagtcatattgagggaccgctgcttcctgactccaaggcagtttacaggattgatctacagttttaccgctagcaggacaccaatcctatcacttcgaactctgaacgactatccttagtgtagactctagaggcacactcgaggcacactctagtggcaacctagtgacctctcagcgaggaagttgcctaaaggccgacctagtagagtatcatatcatagttttatactata

SEQ ID NO: 5735 - DNA, 4881 bp, Emericella nidulans
  unsure (1)..(4881): unsure at all n locations
acggcagacctgagcttcattcagagaggaacctaaataccccaaccacgttcaggcaaaaggctatggacttcggccagctatgagtactcaggcgtgtacaggtactcgaaaactagtaggcggccaggatgaatgtggagtgacttcaactgggaattgtatnccagctgaagtcctgcgtgccgggggcaattttgatgataaggtgagcaaggccacatatctcctatgaggatagaatatgagggaggagacattttaagttgaaaaggaggatatgtaagccagaatattgataaccctttccctaagctttacatcgttgggaaagtaccaatggacgaggtaaggtggttctgtgattataaataaatacttaaatacttaatcagagattgttggcttttaaacggtaaacgtcggttcatgggagtattgtacgctagacccgaaaccagcctgctctgtctctatatctaatataagtataaccacagtaccgcgactgagtagtaatgagtcccaaccaatccggtttacacttcttgcttgtcttggtacgttgcttctcaggctgcccttaagtattagaaccgcgttgacatcacaatccagtaaatgccacatagccggccacataaccaaaagtatcaacgaacagaatatcatctagttggggcatatatggcccatactcaccccttttctaaggaattctaaatgaataccgtctccactcagcctatttcgaccccagattatcttctcttaaagtccaaacacaatgccagtctcaccttccacgaccctacggattacaatgcctactacttccctgaccgcgacgtgaagagcgcgaaggttggagctgctgcagatgccggaattgaacaattgaagtctcagccccaactccaagacacgaatggggggatagtgcagatgcaaccgtgttgagtgaatcatctcggcgccggcaatccggccgcgggctgagccaggtggcaatcagcctcggcatctggatgtactgaagcctggcagatataatattcccggctttgaaggcgatgggacggtgagaggaagtgtctaggccagaaaggcaaatccagatgaggagtgcatgttcctgggctctgacaggaagtgatgtacgtacgcagggataacccaatatgatgccgaacgtatgtctctggttggcttaatgcgttatttgtcaatactcacccctcagctagcgacaaggtcaactccacttgctgctgtggtagtgtcctctgacatcagggttagctcagtcgccaccgactggacgatattcgaagcaaccccacccctctcatagattttactctcaatccctgcgaatttcgatcgatattttgatcgctgtagatttaatttacagtcattcttggcagtatacccgagtttcattccccccctttccttcttgaaaaggcaaatcgaacctcaagatgtctggcaagccacagaataccagcagcatgacgcccgcagaacaactggcctactatcgaccggatcagggacaatgggtgtcgacgccgcagaagggacaccttgggaccgatacaaatacgcaaataaaggatgatgctgacgtcgatgcggacgacgacttgcataaagctctgaacatggatccggctacatctcggcgggcgggactcggtgctaaagcgcgggagctagatgtagatgaagatgcagagggtgaggatgagtttgaaggagggtacacgattacaggagtggaggatgagggggagcagctgaattcctgatcagccccatgcccctatctttacgggggttaggtttgattctgaacctgtggtttgttaagatatcattgcatgtataaagttgaagaaaggttactttcctttagatgtgacttcgacccgcgaaatctttgtacatccacaccagtcgttgataacatagtgtatagtatagagctaagtcgagcgcgaaggagtatttcttcacgtaaaacaatttatcacttgatatgaagcattctcagcaagggttgcaacaatcattagggcaggaccttgttataccctccttgacatcaatgctaaattaaccgccactagcctttcactatcaatgtgcaaccatacatctagtacatctagcattctcaacactacggttattcatctgcagtaattttcacactttcctccttaataccctcggctacacgaggaataaagccctaaaagatgaatttgacgccagccgaaaagcagactctccacacccgcgactgacccctgcctggaaatcagcagcacaaagacagcttcacaagcagacccatcaaccaaagcctcagacccgaagctgaggctgacttcgacggacccacagcttcgaccttcaacacggactaactagaagacgcatctgctggggttgcgcctggtattggagtcaccacccgccgtatagcagtagaagcggaggacgagggcgcgagtgtccctgggtttgaggcggatgagatgaaagttgcagtgaatgagggagatgatcgtggaggcagtgcagcaaagagggattcgaatgatttgtgactaagacaggttgtatggatcctgctatgttagtgtactatttaacccattggcctttcccgcataaatgcttgattaggcacatcatctattcaatgtgacgctacaaggtaaatacctaggttcataaattcatgagaaacttgggatccgtctggaagctgaatccgtgtgtagaggcgagctgagacagcaccaataccgcaatcaacagcgtttcgtagccgcttctcgaagtttgctactccaggtctcgtggtccgagcatgctccaaagaatcctaattccagggccacggactgtgcggccctgcatgttcaggtagactatgccgggagagtctctgatgaatttcacgtcgatgccggtatctgtacggcagagccgcttaatcgtgctaataatgccaatgtcaggatcctgcaggtatgggggatccgggtctggtagcgggcacgacatgtttatggtttgtcgaggctgatgttaaccgtgacaatgacaataactcccggctttttggaaaagcaggagatcagacaattctctaagtcaatggttgcccaatagagtaataaccttcaactgacgtattcacaagtcaggtaatcctgacatcagtcctggagggccggatcacagccacacagaaatcgtaggaaggtgatatggaagagccataaatatgattagtacgaagcttcattatttgcttaaaccactcccaagcaggcctcgacctcaaagttttttgcttgccactcaaaacacagacgctggacctcatgtngagctacattcaccaaacccaatcgacaaacagggacactgaatacatgtccgccaatgggccaccggatcttgaccacaacagcccgcagcatacactagcttcggctagaatgcagggcttacagaattcaattgctggtgatcaatctgcagactcgcaaatccagcccaaactcggagctggagccgtcaccggcagaaccctggaaagtggggatgaaacttggtatagccctgcggtggacaatgtcaaggaagcggagagtcgaggctctctgggggataccgggggatcgcattacctcaatctgtagatacggctttttatgataatgcctatctatcatgggagggacttgggtttgcttgtaaccccaattagcagctatgggggcgacctcacaagctacaaatggacgatgatgcgtttggagcagcagagcttatgggcttaggcctggccagagcaagtatcagcggcgaggacttgatgatgtggtctcaacacatagagataggagcaagaattcaaacgtgatatgcaaagagctcaattgcagctctatgcaatgtcgaagagtcaaagggcctagtattcaagctgagaattgaggttcatgcatggtagacctgattggatggacagactctgaagatggtagtagctatccttgacatcagggtttggtaattgtcacccgacacctacctgaatcatggtttgagctgggtatatcatggtcctttggtgcagtaactaatgattgctcctcttccttcacctctgattcacgacttccttactcacgtacactcacgtacagccgacactacactatgcaaccctcccagaacacccgcggctcgaaagccaggtaccagcgactcgacgtcgccgaccccgaccaagcagacatggatccttcgagcctagaagacagaattaccattgagcacgatgattcttctgcatctgctccccaggcgggcggcgggctgaatttcagccaccgccagcccaggtctacgaacaggtcaaatgtgtttggtggaaggatgaacagagagggggatcttgaagaggagccgggtatggatgaagaggatgagaacgagcatacgggaatgggaacaggggctggggcagggcgcgagaggggggactatgactttgctagtgaggattttgatgatctttagggctcagtggctggattgctttggcgggaaagtttatgcaaaagtttgaagtcgtatgacgtttcaatacagcctagtggaagtgtcgccaatggtatacttgatgatataccttgataccgacgggatctaatctttatacgttatctccgtcaatcatatgaaagttatcccttatacgtgactggggtttgttattgatgttgttatctgacatcatggctacatcaagtgccaccaagtagacagagctccaatatacac

SEQ ID NO: 5736 - DNA, 11551 bp, Emericella nidulans
cttgaaagacggcattcctggaatccttggaatccgcggtcgggtcaataccccggcagccagatagacatactcagccctaaacgtcctcttgatcggattctcagtaggctcgcggtgctccgtggctgtgatattccagagttgtgcattatcatcccactgcaccccttcaatatctgcccggaacagcgtcttatccaccagattccgcttttctgcaatccgttccgcgtgctcgcggacctcagcgccggatgcatatttctggcgcggtacgtaccccgtctcttcaagcaacggcaggtacacatagctctcgacatcacaatgcaggccagggaagcggttccagtccacgtcccgccaaatccaccggctgcatcagcaagacgtatctcgtcagatcttgctatcccctcctctataagacggactgcgaactgcagccctccgtagcctgcaccgagcacaaagaatcgacaccgaccgtcattcttgatgggtgagggtctagcgttcaaggcttcgtgggccacccagggatcgtcagccagggatcgtagccgctcctcgtctgcagatgtcaacgggacgaactgtgaagatccctccggcttgagccgcttgcttgcttcctcggcatagcgcttacggactgcggcgagcttctgcgggtcaactgaaggtatggtcatatttgaatgcggtagtagatcgtataattaaactctgtgtatctatttactactgaggaattgtttattgaataaatagtcgacgtacgttccgtgttggagacgaagaggggcgtttgatgacgcgacttcatcgcggcaaggtgtgacatgggtggacagaaataagcaatccacgccatagttgagcaatccgagcctacctgctgctatacaatgagatgccatatccaataactacagctgtcatgccacctataagactgccgtctcttatcgtgcatcaagcattctagcaagtatacccccctagcctgtcccaacatttcttccgagaacgtttcattacctacagagtccatcacctgctaatattcccgcattctctcaatctaagctatctttgcacagagcttattaggacagtggcttcaacgttcacataatttatcgcaatcctcaagcatcgttcacgacccagtttacaacagcgctcacgtatctaatcaggtgtagaatcctaaataaatatcttgacacgagcttaaatgtaatcgtataccaagaaccaaatctaccttgacatcgtatgacggcccggatgtatggtgtgtgagcaacaaacaatatgtaaccaggttagggtttcatccgctaccactctcagctttagcaagtaagcaggtgccatcgctttgaattcttctggattatcattaccagagtcgacgccggactctggacaattcgagaggccaaaagtagcggagcttgtcagtaggtaggttacagcgcctttactgtcgagaaactcgagaaactgcctgatttaacatagatgtcctctcgtctatctttccgctgaaggcgaggtctttccagtggaataacaggtcgtctgtctcttattcagattttgtactgttggcagattacggtccttaacgttattggtgcagctcactagccaataccctgatttcaataggactactccagggtgtataactagttctagtgcacgttgagcggcaggtttggccgactgggctgtatggatcaactctggtcaggtacgagtgcttgaaaggtgagccccagatcataggcgcattaggctaccggaacccgaacggcaattccaaataagagtatggagacatactctctagagctatgagcatatatctgatagctgtataatacgatgaaacttcgttgcacgctattcatacttgagccataaagatgtccaaaggctaattcttaccacttcgcccatctcctgataaaccccaattagatacacggtgagatgccaccgcatcgttttctttaacgggcccagtcgtgaatcttcccaactggcataggtcacgactgacataagcgctcaggtatagatgtaagcaagccagaaaggtctcagctgagtgcaacccctcccacatcacgtggtatgctcagggctcccgctggactacgatcctggctatcaagcaaatggcaattgactcagtgaaggtagataatatatcaaatacatggccttgcgggaccagcccgggctggcgagactgtctgctttcagcattcctggtggttcggctcgttatctgcctagtgggcatcttcagcttagagatactagcgggctcggaagagatgataaaataagtctttgtacttatattagaatctcagatctatgtggtagaaaactgatcaaccatatagtgcattatcaagccggttggcgagtgtagttagccagtcagtctcaatacatccccgaatacaattatcaataatattctcacatatcaccccggcacggtatgtcccgtcaaccccaacattccccaaagacagatacaagccccagacagaccgcgaaaaaccgccttccccggcactccctccgtccagcaaacccacgcgtcgacggcaccaacatacccgcccagaataatcagcactgtatcaaactcctccagtcttccctgcgcgtaaaaagtccatagcgtcaggccgaacgccgtgattcgaccgcatttgagcaccattactgcttgtgcagctttagaggacgcgatccgtgccggcaggccgaactcgagtatcgctttctcggcatcaaagaacgggaggagtccgccaagagttgtagcagtcgcgacaaagagcggcgggatgtgaacgaagctaaagtgagggagcattttccggatggtttagtatagcaatgtaaaatatgggtcgaccggtgacacagtaagggatttggatagcgatatgccagtagcagcttttgtcctacttttttttaagaaaaaccaaaaataaaatagaatagaatagaataaatagagaaattaacatatgaacaacatatgtataaatatatattcgtactcaagtacagaatgctgacaaggctaggagaggggttagagataaggaccggcacaattaccagttgactgcatggcggggcgagaaatatgctgactgatatgatccaataatacgagaatatagctgcgtttggggtccaaggggcagtgttgcttatacgggttacctttcgcgcttgctgccgcgatatcttagtgagagaaaggcataatctattgatatatgtacaaccgtgaccacaattgccaggaaaaagacattccagtgattgtgttagggcatccgtattgtatcactagttactttctgccgtactttcagataataggttatttaactccgtattttgtcctacagtggacccctcaattcctcagctcgtgcgggtggggaagctccagtatataagctcagccacgcccgtttttccttgctcggtctttaatgtcctgcacccactactcgcactatggcctcgtttcggaccctctcgcggctggcaattgtaaactaccccaaccttccaaggtcctgctcactaacaagagcgtccaggccgccgtgcttctggccgtctccctgccctacctgcagagccggcaatatcccctcaccctctttctcaagaataagcccgagaatttagaagaaaccaacaaattcagctcatcagcgctaaaatttgcagacactggtgttcgcaattgcgaagatggtattatcgtcgaggaagacgcgtttgcgatcctgagctgcgaccctgggcgggatctatggaatacggtgatgggcacgttttatccgcaaagagagaggatccctaatggtaagctgtggctctatcgctatgggatcgatttagatctggagatgcatcaggacgaaaagaaagacgaggcaaaagtcctgcagccgatcgtattcaccgatacgcccgatgacttttcgttccatccgctgggcgttgagtaccgccgcgacaccgctactctgtttgtgtgtaaccatcacattgatggctcccgtgtcgatgtctttgttctggatgcaaagggaaaggtgcctgtagctcgacacgttcggtccgtgatccacccgctgctgcccgggccgaattcgatcattgcgctgagcgatcacgagctttacgtcacgaatgaccactatatgcttcggaaggaacacccattcttgtcgctttttgagacatacgccggtattcccgggggcacagtggcgtatgtgaagcttggcgacgacaaggagtccgttgaagtgaggactgttgcacgaggcccctttgtgaacggggtgactctgctgaatgagacgacacttgccgttgctatttcggctgctgcggaggttcggctttaccggcggctgccggagaacggattggaattccttcaggcgatcaagatgcccttgttgccggataatctctcaacagacaaagacggggcgctcctgatcgcaggacacccgcatccgccaagccttgagaaggcagtacgcaagaggagagagtgtattgatgcgcagggtctcgtgccacaggactgctggaagtccacggcgccatcgtgggtggccaggtggacggcggcaaaaggggtagaaaatctgtatgtgaccaccagtgggttcgggtctagtgctacggccgccaaggatgcagtcaggaatgtgggcatagtcaccgggctgtatgagaatgggatcttggtgtggagggagtaggcttcaagaagatatctgggtactacggctgggtacaaggagagcagggaaagccacctcaggcagtcaacggcagaatgacagacgtcacttattgtagtaggtgaatatcgtagttgtcattcagttcttcaagcttcacttgatccagaatatttagggctttaacacaactatagcttcctgcatcgcccatgtttctccgtacaactttccctcctttaggtaacaactattaagtcttccaagatctggcagcatcacttttaatttcagatgttttgcctggtatttaaaatcagctgttctggatttcaatcaggcaaagacgctctgctttcgcgccgctcacatatatagcttactaacaatgcatgctcctcaacaagaatatttcgctggcacagaggttgtactgtacggtttgtacagttctgtacgctaagaatgctctgtttgtgggtcaagggctgtcatttctgaggatgcgatatacccatcttactaaggaattttgcgtcatgattcagatactaggcagtctccgaggccgctacttgcacaatatcagttttgtcctacagttaggcactgatagtggaatacaggctatctgctaaaaagtacagcgagccttgcgcgggtggccagatacacaaaaatgtcccatatccgtcttgtgtgaatagagtacgtggagctcctctctcaaatcatctcttttccacctcgagtacagtcaaagcaaggaggcgtgtgatcattgatattctcacatagctccttattcatatacatagcatggcttctaggaagaactctcatacaggtcatggctcttacaaggagcattgtacctcgctttttgcgttccacggtgtgacccatggagcgactctggagctagcactatacgaggacttcgttcaatcacaagagctgcctctctcagttatgcttacttctacagtcgttggtttgtgcctgccataccaggaatcgttgcttaaatgacgtcaaccttacgcgcgccgtaaacaacccaacccattcaactcaacaggacacttcacctcatcaccatcttctcagccaacacgcaaggtcctcactctaactcatgagcctaacaattcaacgccgcctgctttctcttgtccgcgcaatgccttcttacaccggctcctgcacctgccgcaaaatacagtacgatctgactctttcgtcgcccgacgacgcgcggacgtcattatgtcattgtaagaattgcaaggtatcaaattcttggcctcgctttcagaatgattgcggtatggaacgcaggtattgacgagtcgatgcagaaagcatttggcgggaactacggcctgacagcgaagatccccaaggacgcgctgaagattacggccggcaagacggaaagagtttgccgccgataatggctcgggatcaattgtgcatcgtgagttctgtgataactgtgggagttttatctgtgaatacggggtaagcttctacgctgactatttcatgaggggctgctgtgctgaggagacgtaggacgctgttaaggataaatttcggtacatcgtcgttggatcgctcgatgatccggaggtactaccgcccaagggcgaattcttctgcaaggacagagccagctggatgcctgagatacccagtaagttgattctaactggatccggagagtgccatgctaacccgcgtagacgtattccataagaaggagattaaagagtgagaatcttattgtacacttataaccaccgagagaactgcatataagtagaccgatattcgaccaataaacgatgttcagatgagatggcaagtgtgttaatgccctcgacttcacgtctttttttcgccaaaatatggagatagcatcccattttatatttccggagggcgaaaatcatagcgctgcgagtatattgtcagcctgggagattgagacagacctgaccctctaccagtgatttttgcaacactacaaaactacaagatatgattattggaagtttggcagataactataaccgttcataataaaatgagagggcaggccagatgctagttgttatatctgcgaagtaatggtctaatgttcatattaacaaatacctcccagttgcgatcgagggcctaaggttggcagagcttttcacaagataaaaatggtattgggtttacttcaaggtgcgaattcaatgccctatggtatgcagtgaaattaaggtatccagcaagaaacgtgtgggccttcaaagggaacatattaaacacgttgaccgatatatagttgaaagctgcattacgaacgtgaggtgaatctttcaagttgtgaagactcccgtgcgacaccctgttgaatcataccattgtatcgcactttcttattcattaaacagccggatttatatttctacacctattgattaaacatccccgtctcctatcaaaatcgcgtaccaggctgcagctgggatgtcctccattcttccacaactgcctttgcgcacgctgcagcggtagttgcggcgtagggctgccatattttgttcttgtggctatctgcataatcacaggcacctttgatgataatagtgggcaagttatcccaggtgcctgctccttccatctcgaaggcgatgattttgttttctcgcgcaacctgatcacggtggatcccactcttcaacacgaactcggagcatgaaaatcgcccaaaccagatacaaggctgcaaaggatcacctgtacctgtggcaccatttgacgaaaatgcggcgagtctaagtcttttgccatcttcaagacgttttcggcgtaccaggcacccatcatcgcaacccaaactcccacaagaactgaccagagcgttgtcacagactctgtgaagtggcaccgtgcatcgtgcgcaaatggaacacttttcaggatcctggtgtttatgtcggtactgtgtggggaacagcttgtcctggtttgtccccggatatgcaccacggccgcccagacccatcacaatagcattggcgtaccgcgtggttttgtttttgagccttccatgtgtcttcactccctggagcttttgcaagaaagcgcgaatcattgttggtgcacgaccgagcacgtcctcaatctctgtccagacggtcaaccgacctgggtatcgttgctcggagtttaccatcacgacagcagtgctgatcaggacatcgcccaagagaacttcatgtccatcttcgtcctttaaatggggattcacaccgcatactccgaccaccagggcgagcttgatgccagggaacgtggccttcatacttgcggcagccggggcagagtccatgctacccatcctggggaggtacaccaatacgacatggtggcaaccaagccgtccgacagtataggtattaacatcgctgggtgcccggctgtagacgaagccgtcgcattcatactcttcgtccaaagccgcttcgatggcgtcgcgctcgacctttaagacggtgaatatcgcaatctcgaactcgtcgcaccttggacgtgaggccgatgccatgtctggacagtcaatgcaactgagagaagaatattgttataatatttgattcctgactttgtcgctagcgactgtcggtactggtcttccgctcactccactatggtccgctgaggtaaatggcccttgttttcaaaccaaggtagaggatgagcaaactcagctggctcaattaaatcaggagaaagaatacttaggcgctttatgttcgtgaactgtaaaggtacgatggttctctatggccatatcattggttgcggtgatgagtttcagccatggcggctacacagctaggcggctaaaagaggcaccataggccattcattgccgtggataattagcttcgattgcatggatttgagaatacgtttctattttcaagcagtgcggttatatctttggtcaatgtgcgctatttctggcattttgttcttgcgcggctgtgacgccgtgattattcgttacacgttcagatgctccggagcctcgcgaacagcttctggcccggacccccggccaatgtgagcagtcatcctggccttcgccggaacaaatgcttgacatatcagagaacatttggggtggatacccctcctcgctctagaccagccttccacggattgttggttagtatggtcgtcccgtttcagatggtgttaatcagtgcaggcgagtccgggatagaaagatgcaagaaatgtactcgaccgttagattgaactcgttaatcgaccgccgtttggcagcaatgaggccgtccacgacgacgtcgtacttcacgccacgaaccatgtgcatctgcggatcaaacagcacctcaatatagggaactgccatggaagagtacgcccaggccaattcatcgacgtcagcagatgtaataaggacactcaccaggcgaacccaagcaacatcgatggctcgagcgtgccctccatatgcaaggtggttatcgacttagggtgtggcgacgaagaaatcgtggagaggtggacttgcacatcatgctgacgtggtaaactttatccctgggaggatcacaattgtttcaacgctctatatcttttaaaaactcagattttccgttccgcactttggcgacgacaataacggattatttaccgtcgtcctcaggccactcaccgagaacaagcagaagagcagaagtctactcagtgctgtaagtcggcttacagtatgtttcagcacttatcagattcgttggatgcgagaggtcaaaagggaggagatgcgagtttaggtcctggtgtataacttcctgatacaacctggcctggactgggcccgatctggattgatatttccacatttctattctccacaccttaacgaggacgtggggcaaaatcttgagccacggttggactggtttatattttccaaatcaagtctagaatgtcccggcttgtgatatttgccttaacagagtataccctctcagcctcttcagtctccacttagtggcatgcgaatccttggatcaggtttctataaattgatgttatacaacatcagcacacagcagcaagaatgaatgtcacgacaaggaaatagagggcggatgagtgggtatccaagtaacagggagtaaggcacacagttccagcaccacagggcattttattctggagaagcatggaagacggcgcaacaactaggatcataaatatggtggaataagatctctcgattgaaggggctgttcttgagcacgacacatctggcaccggacaagacggatcaagcacagcagcttttcctgtcacatagactggaccgggcagattgcaaagaatgctcggtggggagagatagcagtggtagtggctctgagacagacataatgatagtccggaggctgcagctggtaagtgagactcttcacattctatccgaccactgtgacatggtgtatttcgggaattccgttcatgattctttcttgccaattaaatctagtaatttcagtacagagccgtgaagagaaatgaacaaaaatttcatcgtacccgttatgaggcgcttatgaggtctctggtttccttccataaacgaaaatcctatagctggttagtggacagtaaatataagttggtagatggctccgtacactctctgatacgcatgaatagagctatccttccatttcatccgacaattcgcgatcaggatctcgacttcctcagcggtccagcccagaattcgagtgaagaggtcgattgtaaagccatgcaggccgtttaggtggttggtcaatgtatactacgactcaacaattcactctcggcacaagtatagaggacttacaagagcagccgcttcatattcctctccttgggccagacattggtggggtttttcatgatcttcaacctcacatcaacaaacccagcctcttccattagggttttgtactcggctggtgcgggaatgggataaccgattctcctacgaccctcaaagaacagggtggaccactgcagtgcactgctgtctgcgggattgaaatcgtcattgcattcgatgcccgagtcaatttcgtgcatctcgaaatatttgccaggctttagggcactaccacaagatggaaacatcttagccgcgggttgagactctatagtttgggatagaatgtttctcaggtccgtcctcagcgcttgacggaacagcctcggatggtcgggactcttggccacagcagccggaggtgttaagtcgaaccgattggctgaaagcccaatcgtctagttgtcgttctaacttggatttgagggcactgcacagttagaggatctccacttcccccatcaactacctcaatacgttcccggagggccggcccccaccgcggaaaggtgctgtttcacccatgccatttcaatcaagcctgtggggcccttggccaatttggggggcaatcactctgaagaccaaaattgggtgaacttcggaattcccttacacaagtctaaaataagggctagcaccccctgggagaatttccctgttgaaaaaatataggagtgttcctttcaacataattctaaattattactctttttctctcactattttacttatt

SEQ ID NO: 5737 - DNA, 3787 bp, Emericella nidulans
  unsure (1)..(3787): unsure at all n locations
cagagtgatctagcgacatcccgctcacccggggttgtctggcgcccatcaacacgatcatccccaagggatgtttcctgaacccgtcctcggggccggcagtctgcgcaggaaacacccaaacctcccagcgcgtggtggatgttatcctccgcgctttccgtgcagccgctgcttcaaacgggtgcatgaactgtctcggattttttggaggggatagcgacggcaccgaaccgggctcgaaactggaaggcttttcgtacgctttcggcgagacgatctgtggcgggtctggcgccacaagcacgcagaatggcgcttctggcgtgcactgtcatatgaccaacactcgcatcacggacccggagagcctcgagaaacgataccccgtcattctgcgggaatttgccatccggcgtgggactggtgggaaggggatgcatgatggtggggacggggtggtccgcgacatcgagtgccgggcaccgctgagcttcagcgtcattactgagcggcgcagtgtgcctccgtatgggatggaagggggcgccgagggagaacgaggtgcgaactactgtgtgaagagagtcaatgggggcgaggggaacagggctgaagctgcggatcagtggcgatgggtgaatatgggggcaaagaatatggcgcgcatgcatcctggggatcggtgtgcgatccatacacctggtgtggaggtgtggagtgccagagctttctaatggaaatagcatggaagatgtaccttgagtgcaataactgcatcccagggcatcatgcagtgtgattgcctatgctgatgtacaggaagcgtctaattaggctaacccagttacaaacatatgcagcacatatactacatgtacatacatgttacccatntaccgttgcattggtatgccatgggcggtgcttggataagcctacaaaccttacaatctatatcccggcttggttcatcttcacttcgtcacatttatgtatagtattttcacattctccgtcatactaatattgttgcacctttcatccttcccttgatagacctcaccttgcttattccagatctctactttcgccctcattgagaggctaacagagccgaggggcaaaacatgcctatcaagttagtaatgaaagaatgggtacttaagacgtctattctgctgtgtgctttactctcatctcggcttctttaataaataagtcctaatgtatctgcaaaaccattctttggactgacggtagattgcacgatggggaggccgggcctcagctataatcatattgctaggatattgatatatagggatctttaactaacaggtactactagcaatctgatttcaaccagttcagtgtattgtataattttgattaaatatacattatacagtagatactgtctaaaagtataactttaggcccaagataagcgtacgtgctgggcgtggcttcgagaggacaggtccgaccaggaagcacatgttttcataggtgccagagcaagagtaggaatatcggcattatttattttaaataaaagttgtgattctgattgcgcataatagatagcgtgcaaaaccgtcgaagacgaagagattgaatcagggtgatttcagaccagattgtgcaaggcgcacgtgggatccttgtctttcaagccggaaagactctaattagcaccctgaggcaacatctacttcactcgactgttcgagatgaggttgatctacagcgcggatagctggagttgggaaaatatagcacagtacatcaatatttccaactccaagatgttggaacagaaagatttggatataagtaacgttatctgccgataacatcaacattggtcttgtggtctaatggttatgacatcagactctgatttatccgagtcacatctggtaatcccggttcgatcccgggcaggacctctccctttttttccttttaattatacgcgctcgtggtagcacgcattgagcggtacgggatacggggtgtgtcgatgtcgggatgcgtcaattcatgccatgtaggtacttgaacaggggtataacccgagttctgacaagaaaccgacgcatgttagctaagagcaggtatagtaaggccccgctgtctcccgcattatccagtaatccgacttacatctagacagttgttatgtatacctagcattgagccaggctccactcaggttcaggtaccgttttctgtactgtgtactggactagaaaaataacaataaaatcctgcaaagtataacactcacatcacttcaggattcaggtaccgggatgaatcccttgatcgccctctgtgtgacaggacgagacagccaaacagccaaattcggtggacaattgcagcgattccctgatctatcgagattctgcagtcggaaatcgtatttccttggtcttgatcttgattttgagtccaaccgccactgttttcttaccacgtatcccggtattttcgtctatttgagtttctcctgatcagcctcgataatctgtgtctgaactgccccggcgcttttttaaggcaccacccgttcgcgggcacgagcctccgtctagaccgttggcgtgatcgttggcgcgaacttcttatttattcgatgtatgtttttaagctgtctggactctagagaactctgccaggcaaggagactccgtcgtttatggacaacaatgccattctatagcagaaatgctaacgcaccccttttctagggtagggtccggacagctgcacctctagttttctccgctccagcattgaaaatgggatgcgcgtggccaatcgctaaccgcccaaaaccgcaccagtgctggcgagagaacggtggtccgagccgtcaaaccatccttgatccatcctcgtcgcggtcttagatcaatttccctgcatcttgtgcccgggggtacggccagcagtgtggattcgccctcgcacattttcggttgcacagcgggttgatttaatgattctataacctgtgcctgcagtctcttgatgtgcagtgactctaaatcaattgaaggacatggatttgtcttccctgcacaatgtcgcgcgcctcgcaagtcatggctttattaatgtgttcgtcctcgtgctaaactgctaatcggctcttactgacagaaactttgaccccttcccgcttcccatgagcggtcgaggtacatgacaaccgatcgcaatgacgctaaaatgcgatgtcaatggccaggacccgacctcttttgtggcccaaacgataagagcatggtcctgagtctcgaatgcccgggctctttcggaacccgtagctcaagtgctaccttaccgtctaagtcgacagtgacagttgacttgaatgctagtccaagcgtgaggccaggtaaactaaccacatcgcactacgctttagagctcagtgtgagaagaaaaggcgtgaaatgcccagaactagactcctgccattacctacatcaaagatatgcgtcaaatgccagacagcttggttgaattcgcaacatggttttctttctttttggccagctagcggatagctagtaccattttgtgtcctcttgggtcttggggcactgaacagtcgttcgcgcgatagtggatagagagctgaggctacatcccttgagaagttatcgagaatgagaacaagaggacgcagatggagcttgaggcgtttaagatacaaggacctagatgagaaggaaatgtagtcaagacaggttagcatagattctta

SEQ ID NO: 5738 - DNA, 4423 bp, Emericella nidulans
  unsure (1)..(4423): unsure at all n locations
acaagaggaagaggacgaggaagaagaggaggatgaggaagaagatatagatccagaagtcaggcgcagaatggaacttcgcgaaaggatggcgaagatgagtgcgactatgggtatgatgggtttctttggtcctcctggtggcatgccggctcctgggcctgtatcccgaaagcctaaggctcccgttcaaagcgagaaagactctggtgaatcggagacagttgcggctccaagtgcgccgccggttcctgtcatggccctacctggaatgaacgccgttagatcgccattggcttcccccactttggaaaggaacgacgagcctcgatcaatcgcatcggttgaacaatatggttcggccggaccttctgacagtgcacctgttccagaagatgagtctgaggaggaaacccctcgtcgatccgtcgataggccaccccctactccccatggtatgttcctcattcaccgtcaatgtcttctctatgttttttgactgacaatttcgctacttcagaacgccctgtgccccctccgctccccccgatggatacgcgccctactcctccttctagctctcatggtctgccatcgtcccctcctcaaattccgggaggtgagtattgagacacccattgtctagttcctttacctaatataaacccatgtcacctaggtcgtcctgtacctcctcctcccccgatgaggagccctacttctggcggcgaggactctgatgatgagctctccgtacacgcgaaaaacatgtctctgaacgctgcggctacaaatcaacattcggagccagcacctccagtgccagaccatctcgactctcgtcgttcatcaacctacgatatgacttcaccgaagtcaccgaccgtttcttccgagaaaagactgagtcgacctcctccgcctgttccacaaaataaccctcctgttcctactcaaaatcggccgcctcccccaccgcctcagctacctattcgacgtagttctacggctgatagtcgggccagtattcctcacccacgtcaggctggtgaggacgttgaaggcgaggtcaccgaatatgatggtgattatgataccgacatcgcttccggtgccaagttcaaggatgcattgaaagcacatggtcgggactctagcattgatgaaggaactgccaccgacgatcaatctcttcagtcgcctcgcagtccgccagagaaccgtccaccaccaccgcctctttctgctcccagaggggttccgcctcctccaccctctcaaccaccaaaaagttccggttctggcagagcttctatagatgcgcccagggcgcctcctccccctccgcctcaaccccagagggagctctcttatggtcacgatgatgagtatgatccataccgttatacagcaccacaacacggattgcctgcaccaaaagcagctcctgtgccgacgggacgacccgacctgcctccaccaccgccgccccctgttcaagaagatgactcggacggtctgtacgacgcatcccctgtgcagacagctccggaaacctcggcacctcctctaccgagccagcctccagcggcaatcccgccgccgactccattgagcaaccgtgcatctttggacgtcccgagggcacaacctgctgtacgaaggtccatggatgtaggccgtccatccatggaccaaggtttcattgctatggatctggacttagctgagggcacgctgtggtgggctcagccgaacgttcctccccctgtccttcagaatcggcaggatatcctccttgagttcgaagagtctagctcttcgaagcgaggcgggaagactacgatcaccaaggacgtgtacgtcctattccgtgattactcccagactgtgatttctgtgagttttgatgcccgcaacccagcggacgcagtgctggaacaacgtcatgagcagcctcctctacctcctcgccaggatcagcttgagaatgcccatgtccaagtcggtactcgtgtttctgagggcgttacggctattcagaacaccactgtagctgatggtacgccgttcggacttgttaagcacttattagaccccttgtcagacgcacttcgccctgtcggtaaccgtgcgtacggtgctttggtttactccaatatggccaatgcttccgtgcagcaacatgacgagatccgccccggcgatatcgtaagcttccgcaatgcacgcttccaaggccaccgcggtacaatgcatcaaaagtacagtgctgaggttggcaaacccgaccacgttggcgtcgttgttgactgggatggaaagaagaagaagattcgtgcctgggagcagggccgcgagagcaagaaggtcaagatggaaagtttcaagctggacgacctccgtagcggcgagtgcaaggtttggcgagtaatgcctcgcagctgggtcggatgggataattaaaagacaacaacgcgcaccttgcctaataatgcttgatgacgaccttaacgtgggatgagcttccagatcaaacccgcaatgacacctgatgattgattcccttcaagcgagagttcaacatgcacatgcgcctcgttcaatcttactctcctgctacactacaagctcgacacgaagagaagatggatggatagatgatttgtttctggtacattttaatgttctgcacgtacatggattaatacgaccttttagccaacccctgtattgttcgccgtccattctgtgatcacctcaatctgttctcgaatatagcatttgttccatgtacttattgatcctgttatcgtttcatgtagcattgctcaaaaaccgttctcttatcttgtggaccgaagagtcgtagtatgtatgctcatatacttctctgataacataggactttgttctcgtactctctcccgcttggtattcggacttccttgtgccctgattccggtactatggaaacagcctttagttcagaaggtgctagacactgggattagagctgggccgagcactggaataatcgaatgctccattttatcgaccagtgtaaacaagaaaaatcatcataaaagtcttaatgcatccatgtttgctgaccagagaaatcatacagcaatccgctatacttgttgatagcgaagcagcctacagcccgttggctgcctatcacaaggtttgtaacttgcgttaaggggtgcaatgtgactgtcgcagtatcgtcaatcaacgttagtagtcttccaatatctggtcggcttgtccatcccggacggattgcctccacgtcccagctggaagctccaggattagtttcgaggatctgggacaagtgtttgctattctgctcaaaaaaggagaaatgatcaccatatccctgccacgagaagtccggcagtagatcgagcaggtctttgctcttctactaccgtgaatggaagaggacattgcaagaggcctgtgactgtttgaccagacgcaacgctatattcgaaatctttgtctttttcactctttgaaaattggggccattggtaaccagaatccttctgctaaacggtctatagcacgaaggttgttagccccgttggaaaacttggtgcgcttgatttatgttgattatcttcaggaaaacgtatcagcaacctgtacatttaatctgagagattccagttaccaagaaccatgaattcatacgtggaccgggatgttgtaactgtaaggatggccctatagctttcctgcaaaggattagagcgtcctctacagacttcggctggataacgctgtaaatactttctgaattatgctcgggaacctaaggtaatgatcggccccaacagactaagcgtaaaatgactgtttctgacgaaagaatgttaagtgactcgaaagcaagacggaaaggatacacgcttcatactccatatgcttggagtaagcgaagcagcccggatcactgtctcaaagacccttcgcgtagaaagaataagagggcctcaaactgagaagggagataatttggtagctttgtaataataacactgaacaggaaggcgcaatgagatgctcatgatgtgcggtactagtagtaggtaaggcagcaaatagcgctgccccaggcatcattgaccagtgcgtgaccaacaagcggaactaactctaggcccttctgacctccaggctccgtgccgcctctccttctgtcccacagactcacactacgccttgaattcttcctcatgctcttgttgtcatcttgaatgccccagaggctgccgtcaaatgtgccccctagggagcggtttcaaagatggcgcaagcaggtccgatcacaaacgtcacccagaggctcttcatcgagctgaagtctaagaacgaggaaacgcgggtccgagcngcatacgag

SEQ ID NO: 5739 - DNA, 12651 bp, Emericella nidulans
gattagttgggtgtatgaggagtgaagatgaggttggactcgagctggtccgatatttgagtgtggggcgctaagccgctttgggaatgtatacttcccggagactataaagtttacaggatgctataaccacccgataaatctaactgttgccctctacaaataatcaggcggagccaagggaagttcttgcattactaggtcattaatatctttggacatccggactgaggctgaacactggaagctctggcaccggtcgatatgttcaaatcagtccagaagggaagctgtgcggcaaaattcagtccttatggtgagataatgtataaaagaatcactatatattatgaataccgagttaaatgcagcacagcttagcttgccagatcccatcccgcactaccttccatcccacataaagcccttcgttgccaaagctcctgctcggaagccggctggcactcttcgacctgcttgtacaaatccagcgctcctcactatagctatatttcctgatcgtcttaaaactcaagatacggtccctgttggctagcgtgaaggcatttctggtcttgaactttttcactgctcagccatcggctcgattgccgaacaagctgcggcgattctggtggcataggctctggcatcttaatctgcttaagttgctgctgctgctgctgcaactgctggtctgactgaggctcatgaggacttctgggatacttcgacctgttctttgaaccggcacatgaacgaatgagtgcagtttcctagcacatctttccgctccccagcagatatccctgatgcagaacgagcaatagcagaagtataatatgcaattgttctgccaggtcaatatattatacggaaagtcgccctctaacgggttgccggagcaggataaacagaggcgtatttgcggctagattgtacgcgagcaagaagatagatattcaacataagttttctgctcgggaggcctatcttgttactggaacgaagccctcagatagtatatacatgacgttggaagcgtacgagatcacatgctgtggcgcactacatgcttaatgttacaacctgccaccgtcacggccgtggtaagcgtggtcacgcttgaagacaaaaatgaagactgagctgctgcctgtccaccatcatttcaacggtgcttattccggttctattctgaagactttgagtttgatcaactgtgtgcaacgttttttctttatcttattatatatattttatacttttttttccttttgtaaaagggagcgttttggagcgggcaagaaagattaagattatgagagaagattagaggcaggagatgaaacgtttccccggcgaggaatttgcttcctactttggatgaactcaacctggaagcccattttctgtcaggcaagcatgaattggtatttcgatccacgtttcgagtttttgcttagacgactcgactcaggtagggctgccctaccccccaactccggctcggaattcgaaatgcggctgcggaatgacattgcatttctgggggtaaataacattatacatgtatcgatgctaagattttgacccttgttcaggatagagtggtgtttgtattctacgcaaactagtaaattcaacataagagaacgcataatatcgcggaagagtatcgtctatcgagtaaggcaggagccagctcaagaagagccgtccgtaatgttcgcgtgttttaaacacccatacactatttcgtcagcagcgagaggtgtgtttggccgtggcctaaattcccgttggacttctgctttctgcctacgttctactgtaggtggttatcgaccccggcccagtgaccgagttaccagcacaaagtaattctttcacgagccattgggatcttctctggccctagttgacagtatcggttccgttcataacccatgtagtagtgattgcaagtagagctggacccgactcagatacgatagggctgcgctgccctaaccccagcgccaaggtcagagtcattccttaatgagtttgcacaccagagtatattcgggagaactgttcatcgttcatgcccaattgcttcagaagaacagatcctggagcctcagaggcaccgggcaaggcttaaatgcagctaaacatcccgccgtctttaagcaccgtttctgcatggcactaactgtgccgcttgtgcattcttggcataaagtggactatacgattcagtgaacatgaccgtgcatttgttggagtgctccaaagtacacaattgtgggaattggacggtagatcggtgacaaaagctttaaattgacgacgatcgccaacttgatactccaaaggttccgaattttcagcttctcgtcaggatgaaagtctgcccgtacaaagccctctcggtgcttgagagtcttggcctcaacgctctgtcctacaagacctgtccagctacagcatcagtctccgcctgcgtaagtcaatatacagcacctctcagtacatccatagaccgggccattctttgctgaagacaaagtgaatagtgcacagcactccagtccacctccctcaagacctccgtccacgacccttcgtccccagcctaccacatctcgcaagcaaactactggcgcgttgacaacacccaattctatccctcctgcattgttcagccacgctcagcgtccgacctttccacagccctctccgtactagtctcaaccaacgacaatacgccgcaatgccggtttgccatccgcgccggcgggcatagcacgctcgtcggtgggacgaatgtcgagtatggggtcaccatcgatctctcggtgctgaataggacggtctacgatgaagagaagcgcattgcgtcgattgagccgggagccaggtggaaggacgtttatggggctcttgcgaagtacggggtcggtgttgccggtggacggggagggacggtaggcgtaggcgggtttctggtgggtggagggaattcgcatcatagcgcactgtttggattcgcttgtgattctgtggtcaatttcgaggtaggcatttccatcatcctcaaactctcgaggcttcacacggatccagagctacactgaccacggccaatgcggacggatgtagatcgtcctccccaacggcaccctcaccaccgcaaacagcacccataacccgcgcctttttagagctctcaaaggcggctccggcaatttcggaatagtaacgcgcttcgacatggagacgttcccgcagccgcgcaactccatatggggtgggatcgtcacatacgagcacgacgagaccaacgtcaatgcccagatcaaagccttgattgatttcacagcgaacgtcaagaacgacccctacgcctcgttgattccactgtacacgtacatctcgacgatggacagaccagtcatcgtcaactcactcgtttacacgaaaccctatgcggacccgtatccggatgcgtttaagccattttatctgctgtcgaatatctctgacacgacccggcagacagaccttgaggggttggttggagagttagagccggagagtgggctgcatagtaacttcttcacggtgacgtttgcgaatgacgcagcgatcttgaagaaggcggttgagatccaggaacgactgattaggcaggtcagaaagattgcgaaaagcagcgagtggaatatcaagagtctgtatcagccgttgccgggtttgtttgcggaaattgggacgaagaaagggggcaatgtgctgggtttggatgagaggagggattgtatttgtaattctccttttggcctatttaaacaatactaaccagcagtagtggacctcctttggcttacctgggatcatatcgacgatacggcgctgtttgactgggttggagagacatttatgagtgagctggatgacttcgcgcggtctgttggaggcgaatatccctatgtctatctcaactatgcggccgagtcgcagaatccgctgcggagttatggagaggagaatctcgaattcctcaaggctgtggcaaaggagtatgatcctcatggcattttccagacgcaacttcatggggggttcaaagttactttggcgtagccggccgagattcgtgataaatacgtggtcatctctcgtgattataaatattctatggtcatatgtacagtacaggattatgtctctaaagccaagcgagaacctggagtccaacaaagaagagcacagcgctcatcatcgccccggggcccaagctggaggctgcggataaagttccgcagcacgagtctcgatcgtaactgacgccgttcatgtcggccgcaacctggaaaaccgacccgttaaaattgccttcattgtaatagtcgactagcaaaaagttcggagggcgattccatagcgctggtttggttagtacctgtcaaaccaagttcgagaatagctacttactggtacagttttcagccatccggcccacactgccgtagccatggtcggcattggtctcgttgagcaaggccgtgtttggtatgagcagattaaggctggcgatgctgaaatcaatgttcaggttatggttggccatatacatccgtttcctggcgtcttccgctgccaaatcaggcgggcgttgcacggtgcaagggaagtcgcggtccgtaggagagaagggtgtctcccacatctgcgagaactcatccatcaaccaggggtaggctgtctgattggcctgatagtccatgaagacaatcgcccgtttaccagacaggataatgctgcccagcgtcggccagtcatcaagacccataggaatcatgggcggtgtaaacacgaaatccatcaggcccgagttctccatcggcgttgtgaaatttccagggtcgacataatcgtagttcccgatgagaattgtgactacatcgtaggggtgctgcctcagccattcggtaatgttgctgagatagtcttccaggggcccgacattcagcaaatcgcagctggtgtgacaaagatacatcgtgccattcattatgtgagtttgaaattgcactattcagtcagctcaacttctgattccatcggtgagaatacatacgcattcggaccccgtcgtccaactggtaatgcacgtccagcgcttgattggcagcgacatttccttgggccacgaacgggctgttgtgggcagcaacctgcgtgatattggagtattttcggtcacagaactcgggccagccattgcagggctgtgtgttgacgaccggcgtctgggacgggcttggagtagcggaatgcgtcgagttccccgttgaattgccagatatagttgtttggcctcctatcagcacagttaccgtgtcggaagtacttgtaatagtcgcgttggcggacgttgtggcattggcgttcggggtgcccgtcacctgcacggccgttgagccgatcaccgtgccatgggttccggtaaggtagacggtagtcgagtaagtaatataatcccccgaagggacggtggcatcatccacagtggtcgtgatagcgctcgcgatttcagctagagactgcgagatggcttcctcattggaatcggtggtggtgctgctgtcgctgtcggagtcggagtcggagtctgtgttttgggagagcacccgactggcggccagaagagtcagaagccaagttagcctcattctggaggcggtaatggcagaattaaggataacttcaagatggagaggacagccaggaagccaggggaaaagacaagagagtactgaacagacaacgtcacggccgcccaactcgagaaacctgatgaaggagcagataaactgctccagctgctgcagcgggtgtggcgagtgtggctgcgctaagtgaagttccgatctgcctagcatagccgccaatagtacggcttcacaggggcggatcgtcggtgggtgacgtcgccggctgacagccacaagcccaacaacggtccagactttttacttttgatgcccgttaggtcaccgcattctgagctgcagatgcaaacttacgatcgtgatacagcatttaatgtacaccctacaattctaaagactccaacaccttgttgggggtgactgtgcgaagtttatatcattatcaaggcacagcacaaggaagccacgactggcccctaacccctgagctgtccaattatattaccattcagtttctgatcaactgaagatcactagtgcttcatcgttgcggcctagagtggatgcgtcggagagctcgacggtgatccctctggccacttttactgtagctaccagccctgcccaagcagaaccttcattttgaccctgctccctccactctttcatgctttcatgctgatgctcaattctgggctaccatctctaaaaaacacatttcgttatctttactcgcctattattttttttcccattttttttttcctgctgctctcgttggtcaccataatctaacgtcattgggtttcttgggttttcttttgtcgcgctgactttctccttggactatcctgatcactttcatatctattgttatcgttactccgcctcacccgtcttactcgaccagcgtatttatatctaccggtctactcagcagttgtattttaaacattgttaacgtgtctgcccgttcatcccgcatcggccagggtctatggcggtgctacctcgcttccgcaagagctcggagcggccggcctatggccggagtcgacgaacggtactcacacatcgcattctacggtcgttccttcacctaatcgcctggatatttttacttctcgttgtcattgggaatacctcggacaagcccgttctccgacagacgtacttcttaaaaatcgacttgtccgatattatccctctatccgtacccaacgccgtcttcatcaacagtattgcgcgatctatcggcctgcatgatttctaccaggttggactctggaatttttgcgagggctacaataacgaaggcatcacccactgttcgaagcccaagacactatactggttcaacccagttcagattatccttagtgaactgctttcaggagcatccagtacgtccgcttctcttttgatgatatcaaacacacactgaccgctgtagttgctcttccatccgacataacggacgccctcgaccttgcccgagccgcctcccattggatgtttggtctcttcatcacctcgacagtgctcacattcgtcctcatctttgcatctccgcttgctgtctcatcgcgcccaccgcagaccatctcttccgacccaggagtcaatcggttacaccctccgcaccgccgacgcactttcatcttctgccgcgccattccatttacgatcatcaccttcctaactgccatcttcacaatcgttgccgcggtcatcgcgactgttatgtttgtcttgttcaagaatatcttcactagcggtgatgcatttgatctcaacatcagggccgaattgggtacccgtatgttggcgtttatgtggatcgctgcagcgttcaaccttatcgcgttcatcatcgaactgggttcttgctgcgctgcctgttgcggtggacgaaaggcgcgtaaggcgctcaaaagtcaccctgaaccttccacgggcactgctaccggcagcgctacacccgagatgcgcgagaagagtagcccgcactcacgcagtccgacgacatctgaacatcaataagcagcctatcctggtatccgttttgtatataccagcgataggaatcatccttagggatcatcaatatatatgcaatattactcacggaaagattcaggctataaactcgaggaagatagacgggtttgaggtgtaggcgggctcaatatgctattatatacatttgctacgatgttacggttacgaaatacaattgacatggctaattgtttatcggaattcccgcacctgctaacctgaactcggaacctccttccggagtctggaaatcccggcagatcggcgtaggacaatctggccgttcccgccttctcgcatgacccgatgccctggcgttcgacaagcacctccaatttgttccccacaccccagattctgcaccccagagagagaccctgattcgttcatgcaaccacaccaagtctttcgctaccttggcattaatcaacaccggccgggcaatctattccggctcttttcttatttcttctaaagatacgggatatcctacttgactccataactacaagcgtaagtgagtatacctcggactatccacagtgcgccgctatcataacgaagaatctggcgagtctacgtccaatgcttgtccataatagtaaaatcccccgtatttaaaaccttttcatgcccccaatcccgactcatgtctagatgtgaatacgcatagcccacccatttcccgttgtactgactgtactcactatgcatccccttcacctcctgacgacagccctcctcacaacatgcacatcctctttgccttcctccctctctcaccaaagacctaaatttgatgactcttacacgaaagcctttcagccattctcctggtccagcgctaaagtccgcggcgcaaatctgggcggttggcttgtccaggaagcctctatcgacacagcattctggaacacctatgccccagacgcaccagacgaatggacactctgtacaacactgggcttgaaatgcgcatccgtcctggagcaccgctacgccacattcatcacaacatccacaatcgacacccttgcttctgtcggtgtgaatctcctgcggatccccaccacgtatgctgcatggataaacctccccgggtccggtctatatagcggaaaccaaaaggcctacctccgaaagataacggagtacgcaatcacgaattataatatgcatatcgttatcgacgtgcactcgcttccaggtggtctaaatgggctcgacattggcgagaagaagggaaattggggttggttctataatgccaccgcatggaaccactctcttgaagtcgttgatgccgtggtggaattcatctttacttcgagttcgccgaggtcctttacgctagagcctatgaacgagccgactgatcggaatcgggacgatgatctaacgatggctgtttttgggacacccgcggcgctgtcggatcgtgctgcggcttatgtcatgagcttttggaaggctgtactggagcgcgtgaggacactggaatcaggaatcgggtctgggataagtgggactatacccgtcgctttccagagctttaaattgccctcctattggggtgggaacttcaccgcggactcaaatgtcgtctttgacgtgcataattattacttcgaggggcggaatactacgtctgagaacctaccgacatatatgcgctctgatgcagaggagaagtcaataactgaacaatggggttcctgtctatgttggcgagtgggcgatccaagcggcgtataacaacagttttgcgttaagggagaagaatctgaacgctggtttgagcatttggaggagtacatgcagggcagcgcgtattggactgcaaagtttgaaggcactgatgaagtcaacggagaggggaataagagtgattattggagtttcgggggatttattgagctaggttatcttggctgatcgatcaattccttcctgtgcgtatcaatggtatatagcatagatataccaagcaaaattcgagagaaatcacactataagcaccgggctccatcgaagcaacgtaatcaaagacaagaccagtatcaaagttcaaggctcaatagttgaaatatgcaatatcaagaatatgtaaaatatcacgatggtatatcagttgttttctctttctgattccgtccctcgccaactagccaagtgcaaaccatgtcacgctcacgaccacgtccaaccccttggcatcggcgccggggtacttgaacgtccacattccatcgcggttaacgtcccagaacgccccagaagcggagtgcatgccgcgcttcccagtgttggcggcggagccgtctgcagcagcagacttgtcgatcaagccttgttgcacaatggtgctgttcacggtgaagcggtatggaggaggagtggatagtgtggaaggggtggtagcggcaatgagggccttgaggatggagttctgtcacacaaatcacgttagatagtgtaagtcccggcagctacggaccgtagagttcaggcgtacgattatctcggagttccattttccgacctgggcgtggtcgtatccatctgctttgtcaagcgcggagtcacaagccttgttgtgcatgcgttagtccgagttttttatgtggcaacttagggtacacggtgcaccggtctgacacccacaatggtttcagggacgcacctctgtggcaatcttggtcaactccgcgacaggaacaggctattgtagcagaagttagcgatcgctgtttttccttgccgatatcacgcgttaaagggccatcgtgagattgtaattcacgtacagtagcgggtgaggtctcgacagccattgtgtgtatgtaaatgcgcgaaaggcttgggtggttgttgagagtctttgggacgaagtcagtatgtctgttgacgttgagagaaggctggcctgtgacgttgcccggtgaaggttgtgggcagaaccagagatagattgtgggggagaaatgtagaccgacaccggcgaagcgacaaatccggggaagggaaattgcacttacctagaaaaagcagttttatgcaggattgtatcactgattgacttgacaaaggtcacagagaaggatcagggtcctgttgctgctgagaggacaggacactcggtgccatcatggacgacttcgcggctggtggttggttcaatttggactagcctggccgacgctatgccgtagctggctcgagccagtatgtcgttaccacatctggattagcctgttgcttgtcacgaccgacatcggcaccggcgctacgttagtccgcaagcgcctaaggccaccagacaagaagcataccgcgtgcacgtgggtgctttcaggcgcctaaggacggcagaagagccacttcggccaattccgtgatggcccggccgccccatctggcatccgctcaccacactcaagctctgatgtccaatcaaccagatcaccacagtcaagaccttttagcttcgtaccgcactatccttgcgtcgtatatatcgcttggttcctccgcttttcgttttttataccactgtctgacctcctgctcctgatttctgactgctcgaagctatctagctcaagctatagctgtcaccccgcacaatgtcgagccagccgcttctacaaactgctccaggttcgtaatctccagttacctagaagcgaaccctgggagccactacttatgccaggaattaggcaaacgcattgccctgcctacgcgcgtcgaaccgaaagtcttcttcgctaacgaacgtaccttcctctcgtggcttaactttaccgtcatcctaggcggcctggctgttggccttctcaacttcggagaccgcgttgggcgcatctccgccggtctcttcaccgtcattgctatggcggccatgatatatgccctcgtgaccttccactggagagcgcagagcattcgaaaacgaggccacagtggcattgatgaccggtttgggccaactatcttggctatctcgttacttgcagctgttgtagtgaactttgttctacgtatgttgcaggattaggcggaatgaggatgaatacagctacgctcgagcgcatgctatatagggtatattcttggttacctgtttgttggccgccggctggtcggcctcgaagcttaacgatgctacgtggatgcatgtatttttatctcatcgattcgacattgaccgaattccgatgtttgtaccgtcgaccgactgtttacgcttttgcctaccagtctcttcatcctgagatatttttgcacagatctctgttcctcttgattaggcgatgggcgttgtgtttggacgcattcaatggaaacttctattattcggggttattacgttccttactggcatgaatatcgtgtaaaacgcggaacccatacaaataacaagctgtgcctaaaacagtcgcagaatacgcgcttacagaaccagcagcggcaatcaccaaatatttcgaaaaattgctggctttcatgaataattctcagttctgaactccaaggtatcggcaaaccccgacatgtccaacccaaacgccatgctaacccacaaaaaaacatactacgaaagaggaaatggagacacggtacgtttccatatgaacgtaaactcagcgaggcttcgagtagtcgtttagtgcaacacacacttgcccgcgatgatgcccactatactgacgtattatctgacccgaggcaagtcccaaagacgcgcatgtgtcacttgacacagtacagatggccgatcagcgaaaagccagtccagaccatcgtgtgattgcaaatcgtcgagaacatggctgtattgtcatggaggcatagctgctga

SEQ ID NO: 5740 - DNA, 9684 bp, Emericella nidulans
tggtatagggtttttaacttagctaattagggtcgctgtgccaacccccacaccgaactcttcggtattcggcaaagaccttacgtccccctcccgagttgtatcgcatgcgggctcccccaaattaatgcccctctcgttcgaacgaatacttcgccagttctgctaggtctcctgagcacttcttaggcttctcgcaagcttcccaaagacagtgtcggcatccctcgggggcacaccagcacgcttacagaactgggctctggtagcttccgccgtgtcgggcgggaagggtaatccgtggaccgttagcagaacatgcaaggtgaacgccgcatcaacgtgggtattgaaggtcgcatactccaaatacttgtcctgtctcgcaacctcgctcatagcagataagggaacaagcatagccgtattgggagtcctaaaatccaatttctccccattcttcaatatcgggaacgactctcccttgcccccattcgcatccgcgtacctctcatgcaggtaaattgcgatatcgaacgagtccccaatttttgagcccgtcacttcgtccacaattacagggagggtgtagaagtcgcttccgtcggcaaactgacggccggcggggacgccgagagattggcggacggaggggatggaggggagcggaacaaaggtggttttgtaggggacggacgcgaagttcagggcgagccgggtctttgaggggttcggagagcaggatagcgatggagtgcgcatagcaatgtcgtagaacgttattgaggcggggggagtggccatggtgggctgggtcgtgcggaggatggtctgtgcctcaaattggagaacagctgcgggcggaatgtggagagaagaggaattctggtgtgtagtcttggagaactcaggcgtggagagtcctggcgtatatacctctagaatagagagtagaggatagagagctgtctcgaggtgatgtagatggagagacatcaacagagtgggcggggttctcgtcccaagttcacgtcacgtgtgaggtgcatttatgtacgatactttgctgcaaaaatgctaaaaacaggtgatggctgccagttaaccctgctgctatacgactttgcccatcttgctcacaagcctcaggataaattcttgtgccaattggctaatcaaagtggtgatctgcgctttaggtgggccaagaatggcgcgatgccgagtatggttgtcgccaagcagaaccctatgtagaatattatggacgaccatctgtctctgcttgtaagcattcatcgcgatagttattggcctagtacaagtaagaaaggactccgtgctgcatgatcgtttgcgcgtgtaagcttagatgctgccgacatcgaattccctcgactttagaagtgacaatcagggcagcagggccactgctgggttcaaacaggaactggtggtaaaatgcagtcgtaatgccaatactggtttggctatcgtataacggcaatccatcaatataagtaacatttattcttttcgggaaacccttgtataggactggctttacgtagtcatcgtgtctgatagctctgtttataaccagtctcctagggagttagtcccgcaaaagataaagcgcctattcaagtcagctttcagatcacagtgtaggttaccagctgtgcagtgcatgacacttccagccctgtataatcgcacccgggtcttacgtttaaccctcctcaacgtttggatgtctgaatcaaataactactctgtggccaggaacatactcagccggcattcatagtcgggagtaacaaaaacgtccagttatgttcctctatgcgcattgttctacaataaagaagaaaacatccggtatccagacaacaacagtcccttggggaaagcgagaatagaagacaaaagaaaggatgttccatgagtctgcctatcgcttggtactctgcgggcttgggcgttcattatggcaaatgacggtaaacaagtaaccgtatcagtccattgcgccgaccatctataggcgcggctgagatcctcatgtcgaatgatcccgtctgtcgccggagctgtcattagtgttccaaggcagtcagccagtttacggttgctcagtgacgcctcgcaccagtcgtaagtcactgactgcagtgggggcgctatccttcgttgacaggaccagaagcagtctaccgggatgatgaagctctagggggctcccaaggagagacggaatagtagcccaagttacgtaaagcatgaactactggtgggagaagaaacgtctcgtagtccggactggcagagctgtgggctaaatgtattttacgtacttttgccaacggtcatccttgttgcctgaccaaatcactgatctcccgtccagccctacctagctaccacctcaattctatgatcgtcaactattccatcaatctaaagccttacggtttcccgactgtcaagctcttctatcagggaaggccacgaaggcacctactttcaggttctaaaggagtatctcagtcgacgagctttcctatcccaaggcggaagattgaccgtttggtagaggccgagaaataaaggccccatcatgcttccacggtaaatgacaacgcggtcgacagcaagtaagcgaatacgtatcgtaaatataagccgtactggtctcggtgtctctcagatatgctgtgaacatggaatgcctgtctatacaatctcctgtagctgagtattcttaaaaaaacattaagtacaccccgactttccaatgcccaacgcaacaagggcgtcttcgggaactcattaggggtatattggtcgcagtagggctcgggtattgttcggggtaagcaaggctgatcatcacttcgtcatttttattttctattttatttttattttctggttctcgagatcttgagccgaaaatttcagaggtcagatcgtaaataggacaagctaagtgtcgatcggaatatcgtccattatgatcattcctggtaactagcttgggtcgttaatggcttctattaacacctaaaatggcatttccacagcgtgtaaaccaagactggtgtaaaagaccgggctagtgaataatcctacggtgagtgatctcggcaaccctctagacaatcaccgtcccgctggaccgagcggcaacccccgaagaacaggacagccattatgatcgagtcgagtctctgtctgataacttggttggagctgcactgaaaagagtatacatggcagtttgacgtctatcctctctccaaagccagagaggtaagccccaatgccctcgtctcatagtctgtccgtctagaggaatcggtgtctggttcgcttgatgacgagtgcggtctgtagaactaagggcactatacttatccattgccagtagaaatgtaaactagattacgaaacaaactggcaattggtcgacaaagcctcaaattaaggtttagcagggtccattagagtggaaaaacttctctcaattttggagacgaaaaggtaaaagtgaagtgaaaagataggagagatcgtattctatgactcgcagcttggcatgcatgaatattgagattcctcagaaaaagctgcagtggtacgtcggataagcaaatcccagatgtagctttttcgctctttttcgtccttgtagggctggtgttggctttctgggcagaggatcgttcctcaataccgcgtgcaggctgtcagcacctaacgcaaaccctactcatcctccaggataattctgatccttcagcgtcacactattccttcttcggagaactgtcaacagggatagcgtatcccgagggcgtggttccactctcttttcaggaaacatcactccatcacccatctgactcccattccatccggtaaaagcccttagtactcatcccaatccacacggttctctcccttcccctcccctcttcccaggtccaacgtgtgtctgactcgtgcagacatgtcgtacgcggttcaaactcaccagatagaattttgcttcaagttccaagctctgagtcacggctgctgagtcaactcagtgtgggtcaacagtgtacgcaaccagagtttgtgtagtgagctcttgacagcccgccaccgtttaacggattagtattaccccccggtcgaaccccctgtcagtgctcactcaggggcgagcctcaagctgtcattgtaggcggattatcccatacggttactctgtcatatgaaaagccgagatctcaaaagagagtctgctattaccggtttcagggattgtattcaacaccaagtggagattttatgtccgaggcggccaagcagccagtcagataacgactgggatgaataataagacgacgaattacccgctaaaggctccacagacgcattccagacgcctgaagattcaacaatatctggggcatttgtcaagcgggccaatagcggcacatgcagagtctgccgtggcaaagtccactcactccacggtcttcccgtccctgtcatggtcgcgctgtggaagtgatcaacagctgggctggtccccgggcctgtatagcattccagctttagccctttacttggtcgttttcgcacactaagtggctctccaacactagcgctcatcttcaccgtccccttggagtcgcgctgacagctgcaatctcctggcggagccggatctctcccggattgtatttttgacagcttgccccggagcagttagtcgaacgccggcgcagtagctaaaactctatctgaaattcccttatatgggcatcctcccgcctacctcgaattttgaagcaatgttatgagccgccgcttgacgagcctgccgccaggatgtcctcgggcctcaacagtgatgattcggacggccacgtccgcgagctagccgtcaggtcggttgcggcctctttcctaagcattgccaccatcgctgtgtctttacgttgctatgtccggggctggttgatcaagggctttggatgggacgattgggcgatggttgttgcgatggtacctataatcgactcgaattggcattcattgatcctggaattaacacttgcaggccttttatattatgtttagcgcgtgcatgattggcggctctatatacgggacagggcacagattcgctgccttagaaccgcagaatcgcgtgacagccatgcgggtgagtatcctgagtgccatactccctctcctccgtcagcccggcattgctctggtactgaaactaactcggacggatagtactggtggctctgcgaaatcgcttactgcttttcctccgtcgggtgcaagatctccgtctgcatcttccttatgcgcatcacaatcaagcgcatccatatctggattctctatatcgtcatggccctcaccgtgctaacgggattggtcttcatgttcatcatgctgctgcagtgcaagccgctcgagtatttctggacccggacagcatttgatccggacgtcaaaggctactgcatcgatatccagatcgtcatcgccatgacctatgtgtatagcgcgtttgcggcgctgtgtgatttcaccgtgggaactctgccgatcttcctcgtcagcaagttgcaaatgcgcaagaagactaagctggctgttgtgggcattctgagtatggcttgcatgtatgttcctctcaagtttgctggtcttgtttaagggcgatcctggctaacagtatttcccctgatagtgcctcctccgctgtcatcgtccgtatcccctttgtcaagactttcgctgatcctgactttctctgtacgtctatacgccaatctctgtgccctccttttcgaactaacattgcttttttttgcagatgccacaattgaaatagcaatctggtccaacatcgaaattggcctcggtatcaccgccggttcgcttgcaaccctccgcccgctcctgcgtcactggatgggctctacgaacgatccctcttatccactgggcacaccttccccattcccgggtcgctccggatcgcgtctccctggtgcctcaggtcgagaccgagcatatccgctcggctcgatggacgacagcaaccgattacggccagacaaactcgcccttacggttacgactgtgcagacacagcacgatcccgaggatcgctggcctgtcctgcctgatggaaatagtagtgaagagcggttgaccaatgagcatcagcggaatggcaaggggaatgggaataggacgccgacgagatcgagtgcagagcgaaacgtgatgggatctggttttggggggattcaccaggtcattgaggttacgcaaacgtcgacagatttgaggtcaacgagtgtgaaggagcatgtttagcttgggtctgtttgatatgtgataccacgatagttaaaagatttcttttgttctgttataggctgttccaggtactttcgtagtgtctacgtagaccattgtgggtagctgtgcctaaacatgaaggaaggataagacgcactggccatgtgggtatataaaaatagtgcttatggaaaacgcatttggcagccatttgactggcatcgtcataatggcgatcattgccacgaacccgggcagacttgccctaattgaactttgggtacaacttgagacggagtggtgtgggtataggacggctgccatgctcctgcaattttgtccaaaaccggtatttagacattactccacaaatcaccggcgagctaagcgtaaaacacggggatgttgccatccggggcttcttctggaaatagctaatgaagacggttgtcacaggttccttaccgcccatgtgaagtcgcgctaagaaaatttgcgcattcctggcacaaattgatagccttatatatttataaaatgctttctatatcaacaagtagccgggctagctcaatcggcagagcgtgagactcttaatctcaaggttgggggttcgacccccccgttcggctttcctttttgctccattctcatctgcacttattattgaacattttttatgcttgtgattttagtctgcaaatgagatgtttttttttatagttacctaccggcctgagaacatggagaggctataccaaggcactctttagatatttatgttatcgtgcgtcgagttttccctattctagccaccagcctgcttgaacatggcgattcgtgcactccgaaaggcagacggatatgccctacataccaccgagaatggcggtgactgtgacagttcgtgcagtgtgggcattatatctacttattaaggaaattgatgcatcaagtccaataagatcatcgataatctcagcatggtcagcatcatgcatgcagcaactcggcgcacggagaatctctacaacttcgatccctccaaacggcctttgtcatcttccacttcgcttccgtcagatatatcgctagcctaagataaggctacctgagtccaatcccagccaagggaactcgactcgtgtgccaggtcagagacatgtcggtcgtcagatcccagtgttccgtcactgttcctgcaacagaccgcctctcatacatattcggtccccttacaaggatgaaggcgcctggccatcatccgagcccattctgcagttatctgaagaatctttgggtgggtgtgcggatactccatcgaccagataagtccctcgttaagcgtctcggcaatggcctacattatctgagggcccttggggaacgggtgatggtctatgacgaagccaacattcattttgttatagccgtgctcgggattctagcagttgggtggaggtcaacatactggcttctggtccaccctagtatttggtctccaggacacggcagctaaagtttgacatttgcttttatcaccggaacaggcggatcttgaggttatgctcgatgctgcgggcatattggggattccacgggacgctttcattatcaatgaatctctcggtggcagtgagactggaaggcaaagctaggcactggagctaccttctaaatatgcccggcggtggtttatacgagtggcctagacttttaaggaacgaggcaaagagcacaacggctgttcttatctacattcagggtacttatactggttcctcgactcctgcaacaggcactaatgcctacctacccgcattccagaacaacggaaacaccccagatcgcatgccaggcgcactacggtcttatcggcagcgtcgcccaagctctaaaccactacacagtccggcctaggtgcaaggagatcgtctcgttcaaccacacattccccggtatgggcttccttttcctgggcatcatgatcccccttagggcacggtataggagcatattcccttcgcgtcttgatctcattacgtttgtggcgttgtggaccggttcaagccgacttgggtgatggctcctccccatttgatgcgcgcaacattgacaatgccggcgacgccgaaattcggaagcatcaagcatgtcctcacaggcgactctttcgtctcttggaagcttgtggcgagtggcagccgaggtttgggtcgaaggttcagagtacgcatgggatgtccgagtaagtataccattttcaatacagggtaggtagttcgagaatataaactcgccgacagggcaggcttttttgcggttcctgatccgaacgaacccgttcaagatgctaatatggggattttcgtgccgaacgttgaagccaagttcctcgacgagagtagcgacgtcttatctctgaacgaggagggggtgtatatttgtacaccttttgtgagaaagggatacctcgatgagccgacgcatacggctcaggcagtgggtgaggattgatacatcaagacaggcgatattggatggattaatgaccgcaggattggttatttcgttggacggcggaaagtgagctgattgctgtgtttctttggtaacttgagtctaatcttgtgccgtgctgatataggatagcccaggatctgttcaataataggcgcgaccggttacaaggtctgagatcgagaccgcagtctcccggcatccgggcgtccgtgacgttgctgttatccctgttgttctgtgagaactagtcgtcttttaccagtaactaagctagggcactctggcttatcaactatattgttttctaggcccggtagcgaatgccctgcccctcgggcctacattgttaagacatacggctcgagcctgttaatagaggagctgatatcatgtatggcaaccaaatatcttccgcgcatgcagctcaccggtggtgctgcgttcgttgatgctattgaacaaatatggcatgtcaatgtcgcatgcacaggcacctaactggagtttacatgtaggtcagatatagtagggttgatcgccggaagctgtctgggctagctgggagggtcttcagctcgcatgtgtggaaatttgaagcagccaggtagaggcctgggcacagcttcatggtggctggcgggtttagtatatcacacccaagggcgtccggcatgccaagcctatgatgagaggactacatacgatcaacatcacatgccaacgagtccaagtctaacatcacaatgacaactgcctataaatgacatc

SEQ ID NO: 5741 - DNA, 12267 bp, Emericella nidulans
tctctccgcccagttttgcatctcctcgccgccttcgagcgctccaacccgtccgctggatttctccaccgggagccccacctaacgtttcgctgtctgcgctcatctcgaaagttgcaatctcgggatttgcctccctccagtcgcccttgttgtttgtttgtagatgaattcactctcctcccttggtctacatgacgccagactccccagatgaggctcttcactttcgcggcaagaccctgactcccgagagccctcgcccgctacacgttccggaacctaccagtatccctgtgctgcagaatcaaatggacccggtcttcaacgacacctcgacttacggccaagccgaggatcttcctggaaacagctaccgtacacaatcaagtgaacaatatatgaggtcaagcgaggcggggtggcatacagactccgcacggcgtggtcaggaacatccgccgccgcagcagcaatcgcatatacaaggtagcctccaatctggcccccctttaatgaatgacgggcttgcggattccgataccacttccccttctactctggctacatctgccgctttacccacctcgcccaacccagttccttcctcagagccctcgagtgttgggaaagctatggactcttctctaacggcacatgctccatcagatcctagttcccttgaagcctatcctgttcccgatgcccacccatatccctcccatgctgctcgcaacaattctttcgccaacgaggtagaccactccatcggcaccttgcaagcccagacggcgtcgcagggccgactagacgcggagggaaagttggagggtaatagtgctgggaacggcgtcgacttccagaacctccttgataatctcccatcatcctcgacatctgcccccgccctcacggtatctacaaccgccatggcagcggaccatgcttcctctcaagcaaaacgccgatgaagcgcatcaatcttccttaggcctgcctccgcgccctccgccgcaggagaagccctccattcaccccaattacaatcccaccgttgatatacgttcctatcatcagctccctgcccataacgcttctaccagttcaaacccttatgccgcccagccgagtaattaccagtccaacgtcggagtgccgtcattaacagttggcgcgccagggatttagtccactgctggtactcttccacctcctcccgttgctagcttccaacaaccgtctacctctccggcggagaaccaagaacctcctgcacccgccacgcaaaaaaatggccgagtcgacagacagccactccgctcagatgatgatgcgccgtggggtccagaggtccagaagaagtacgatgcgttcctgcatgacgaaagagtatacgtgactgaggggctatgggatcgctttccatatggatcgcgattgtttgtcggttagtgtacttccagtatggcagtaagcccttctaacatgttcgttttttatacgcaatctacccactgagagagtgaccaaacgagaccttttccacatttttcatagctatgggaaactggctcaaatatcgatcaaacaacgtacggcttcatacagtttctggaagcctcatcctgtaagcgggctctagaaggcgaacagggagccattgtgagaggacgcaaagttcgtaagtattccactggccttgtatctgattatggccttagcctaactcatcgttcagaccttgaaatttccaaaccgcagcggaataccagaccagcgccagctccgtcagaaccttcacgtgttacctctgctcgtcgctcaaggtcacccgactatggtcgaggcggaccttccagcaatcggtcatcgagggtcccaggggaccgctatgaccgaccccacgaacccgcaaggttgccatttagcgatttccgggacgaaccctctcaccgtaggcgggaggattaccggccgccgcgatcgccctctccccgcggttaccggcgagagggttaccggtctcgggataggaccccagagcggttcgatcggcgtgataggaggcgctcccgttcgccgtatggaagggatagacggtaccgcagtccaagccctcgtggtcgtgcgacgtatgatagtgatgtggacatacctgttcccaggcgagctcctagagacgtgccagacgtgcagatactggttcttgaggagttggaccggtaagcactatcattacgcgtcttaggcgctgtcactaattcagtcatccaggaacttcatctaccacgtagagagcagttttcgaaaccgagggctccgggtcgatgttttagcgctaggagcacggatccccctagacgctgctgtcaagcgtcaggcctctgagggcgtcctcgccgtggtgagactctcacgaccaagttatcttcagagaaaaataccattacagatattcgaccgaagtgccggtgttgataatgtccggtccatcggtgggttctcctcctatcgtccattgacatttgctgacgtgctgcttagaatatccggaccttgaaccccatatggcggcggagattgtcgttcaggcgcaaaccctacagcgaactgcaccaaatgtacctctcccctctcctgcttatggagttccacagctcccctccgcaccgctacatcctgctggtcctgcacttccaactcagccaaatcttgcaaatgccatttcacatcttgatggggctggcttgcaatctctgttggctgccctacagcaacgacctgctgttccagccacgcaacaaccaattcccccggtcccaaatcccgttcctactccggacctggcgagtcttcttaacgcggccactcgacagcctgctccgctcagtgctccgcaaccgtctgttccgcaacaatctctcacacaaactctaccccaacaaccactagccagtcagccattcccgctgcatggccacggtgcctctccaatatccgatccaaatctattgtcgctcttggctaaaggcctcggaggacatcacccacagggacaacctcccatggctcctcatcaggtccagaatcttatgagccagttgggcaagtggaaacaatgagtcacgtgttcttgaattcattattgcctattcatccaacttgcggactttgcaccaacaggagtcgggcgttgttgttcatattcgcttaggctcaagggttgagactctctttgtttttcacggtgaccatgtgggcgttaacataaagagagggctcgatatgattgttcctattatctttggccattttgtccatcggcgtccgttatgtttttcattcccatcgctagttgtacctagtcacttcgtcatataaagtggagtgttattattcctgctcgagcacactccgaacaataataatactaatgcaactcggggtaatatgggtacaaaagtcgagtcgttaagcgtaatatagtacaagtgtacaagtacaagagccctgggccgtcaacccagctgtccaaacggttgttcccctttcgcctggttctaagtcctacttgaagtccttcactttggtgaccacccttgcgacttcaaatcccggactgtagcagcatcttccttcttgatccgctcgattgtcttgtcccggttgtactccattacgcgcttctctttgaagtatttcacctgtcaagaatcagcctatgctctaaccaccagaactgccaacttctcagcgcggggccgtagataaccccaagagccaaatcattacatacccatgtactcgagcaagccgcctcaaactccgcaatctcctttgcacatttcttccgcgcctccttatcccccttaatcgagtcaacgatatcgttatcgtccaagcaagcgaaaaactggtcgcggccgatccagcaccgttgtcgtgaggttcggtcgggcgctatgcggccgccgtctgaggctttgttggaatcggacgatgaccagggaaaccagcccattttgtttgctgtttttttttttctttgtccgtaaacgaatggaaagtggttgaggtgttgtccgagctcgctgcttcaaagtcgggagctccgacgccgttccgcgctgctcgctccgcttgagttccggtcatgtggcgctaaaccaacatagtcaacagtcattagtttccagctgtcaaccgactccgacgaaccaacttcgtcttcgtctgacaacttcattgcaacaacagcagctgcagctcggtggacgtatcgcggtctcttgcaagtacatctgggcaggtttgttctcgaacgctgcgcgcctccaactcctgccgctgacgggcccttaccctgttaaaacgtcccttcggggtgccgaggaagacaaaacgccggacaaccagtccactgctggtcaggactagttcatgcccccgcgccgacgacctcctccagcgggggctcgaacagaccttccaccgctgaaaatcatccgcaagatcatcctcctccaggccgcctactatgtcaccgctacggccctgatcttgttcactacgctggtctacggcaccgctttctcgctagaccttgttttcagttggaatgcgttgagaggggacacaacgctagggtggatgctaggccttgtgtggatgttgaatagttttctatggtgagcccctcccctttcattgaatgcaattccattcgctaataagtcgttttgtagtgtgatatttctccttctcctcgtctctcggtcaaaactcattcccgactttgctctcactatccatttcatacactttatcacgacgacgttctacactcattctcttccgtcgaatctgctttggtgggctttgcaatgcgccagcgccgcgtttatggtttttctgggcatgtgggcttgtcagtggcgggaactgcaaccgattagctttggtgctcttgctagcagtagctcaagacaaggccccggtgagtcgtcacaggcaggtgaaagcagcaatgggctcctctcgggaggggcacgtagcggcggcggcgagtacgagatgatgaacatgaagggagaaggcgcagtatagcctttccagcttttatttttatgtcttattcttatgttgttgctcggcagctgttacggtacggggctaccgatcacttcgtttctcactgtatatttagtgtatgtataccctagctggcatgataatctagagcaggcgttttgggttcgaatgtcatattgtttattggatagaacacgcccagctccggttcattaactgcagtatgaatgatgtatcctacctaacaaacccaatggcttctccctgctcaaaggctgtgacgagccatatctaaaccaatagatttcgcataatcgaacgccttcaaacaacatgcgccttccgacaacaagctgcaccaccgcatatctccaactcaactccaacagatgaagtggggtggagataagactgcaaagttaaaaggatgattgcccctgccgtttaggctcccatctaattaaacatcctttgtatctcatttatccataccttatatctgtcatcccattctcagttgccggcctactgacaagcgaatctcaatgtccaccaccaccgcgacactgacaaacccctcccccgcacaggtggcagtagcacccaatcccgagctctcgaacgagaacagtacaatcaagaacattcccccagctgccacagacaaagtcttccaagccaccgcgcgcggcaaccgcgccggaaccctcaagccacgcggcatcccgaccttcagcgatccctatgccgagcgccaatggataaaggagcacatggccgcggcattccgcgtcttcgggaagcagggattcaacgaggggatcagtgggcatatttctgttcgcggtaaagtccctgcatttcctcctatttttatcttcgagaaccatgttttttgctaagacgttgtgcagaccctgtgctcaaagaccacttctggatcaacccattcgggaaacacttctctgccatgaaagcgtcagaccttgtcctcgttgatgcggaagggtacgtgactgagggaggagcgcagcaagctatcaatgaagccgggttcatgatccactcggagattcataaggctcgtccggatgttatggctgcggcacatacgcacgggatttatgggaagacgtggagtatctttggcaagcccattgagatgcttacacagggtatcactcgtccgaccctttgggggttttgccagggttatgcttacaagataatacagatgcatgcaacttctacggcaaacttgctgtgtatgaagaccacggtggcgtcgccctagcccaggacgaaggacgggccattgccaaagcgttgggcaaggagaatattgcttgtatcctgcagaaccatgggtgagccaccttgccctctgcgctacataatggttacctaatatgtctccagcctcctaacagtaggctcgaccgtggacgaagccgcctggctcttcgtcagtctcgattctgcctgccacgcgcagctgatggcggaggctgcggcggcgaacggcatcccgaaaaggatcattccggacgaagtcgcacaatatacggctgatgcggcgcagaatgcggtgcgttatacctatccgcatattttggttatggcttcttcggcttcgaaggggttttgaggccaaatacttgctacagtagtatactaatgggtgcagcattacttttatcacgaattccagccggagttcgatcttgtcgtcgaggagagtaacggacgggttttgcagtgattatttgagctaacgtttgttgtatggaagaaaatggacgtagactaaataaacgatgcgtctcgtggccatggggctcgcagatttagggctttaggtgcgcaaatgagaaatattaacttgacaacacgacggaccttatcaacctcacaaaacaccctgggtttaactgttaattgtgtctctcttcagctcaggggtatacggtgattatcgacagccaggttgacaaccgctggaaaagaaatgaagataaaaagaaatcataatacttccgatgcggggaatcgaaccccgagctgccgtgtgagagacggcgatgttaaccattacaccacatcggattgttggtatgcatttctttaatgaggatataactccatctatccagtgaacattttggccgttacaccaggctgctcctttggtttgatcacatactacctgagtttttttttttttctataaaaaaataaaggcgcttgcaggaagctagataatccatatccgtgcgcgtcggcgctcttcgggacatccgaaaatgaaacctcgataccgtgatgtatatagtattgccttataatagaaggaacggcgaaagcatttgctacacatttaaccttttaaaaatctccctcatcgacgcaacgagatctggcatagctcacttcttctggggccgccgatgtaagaaagttgatacccaagtcctagtcctgagcgtatatttctaggatgtgagcttaattgtcggatttagtgatggccttccttactccagaaataactcgtatattccgagccaacaacagagcaacagaaaccctaacacaagggatttcattaattctaagtataaggattgtacagccgcccgcctagtatttatacaagctattccttacggagccgcataagtttcaacgataccctctccttctctccgcaagccctcccatcttcatccccataatcccgatcccaatgctattgccaccctgtccagacacaccgccactacccccaccacttgactttcgcgccggctgagtcaattcgctccatacttgcgcgagcgagggccggacatcaggaagcatactgtattgcatactatagagactgcgacgatggatagggggcacgaagcggccggtaaagaggcagaagatgacttgcggagagaggtagtgtttccggaggcggtgggcaagttggaagtattggtcgaacatggcacggagagttagggggatggacttgtttatacaattaacttagtccagattttgaagaagagagagaccgggcttacctcaaggtggatgtactgtatcgttgagtctactgaattaggtagagtatcgtgctcttcgcggagttcaaagcggatgccgcctgcggatgatcagttaatatgaagataccaccccccataaagtgtactaacctggtagtctcctcgaatccttgacgcgcaacatcagcgcaaagagaggaaaatgattcaagaaagccagccaagtgtcaagtgctgctttcaaggagattattaacatccgcgcggacgtgaacgcgagatagaatacaatgactgtagggaggaggaaaaagagaacagtaaaaagaatggtcccgaggaggagctggtcaaggtcatagtcacaagaatctatacggttgcggaggacgttccgcttcttcccgcggaagaggtggaagagcgaaatgatgatcgtaagttgccaattgaagatccgcgctgatgcaatgtagaaagagtatatgtgcactgtcaggatggaaatgagatccgagaaaagggcgatgggcatgctggcacctgcgaagcttgcgcagccgataacgtatatgatatgaggaagatagggttggagattcgcgatgcacgctgaccagttagcaccagacacacttgagagagaatcaatcttacctgcccagttctcgataacccacaagaaaagatcacccagaaatgccgcaagctcattattcagcttcagcccagctggccagtccatcagccaggaaatcgtccgctggagaccctcaacagtccaaccactgaggatataattgatttggtaagccacccagttggcattatcaataatgtacgaccctagagcgatcccgataataacatcgtttgccacaagccacagactgttgtagaaccggatatagtgggcatgataggttgtcacactttcccagtcatcctttctctgccgcaacttgacatactgcgtaggccagtagcagaactgctgaaggcgaatgtccacctgctgtgccgtcgcagagatatccttcaacgccgcggcgtctggccgagctcgccactccaacacctgcagaacaaagtctgctataacgcggtggaagaccagccctataacgaatatccgggtaatgaccggccatatccactgccaaaagacataggacactccgagaacgaacaagtcccacaccgtcgtagccgactcaaccacccgctccgaaacactcatgctcctcttcacgcggatcccaataaggctgctgttcttttctatcagcttccccatttcgtatgcgcaattgatctggttgatgatgaatggaagcgccaactctttgtgtgatggaagatgcttgacaaccgtatggagcctgagcttatccactaatcgttgcgcgcgagccttctgcgctccctcctcggtttctatcgtatccaataccccgtccgacttatccgcagcaagcatcttgtcctccaaagcaagcgaaatggggttcagcgacatatactccatcctggttggatccggtcggtgaaacataataacctgaatcgagaggcctgtctcgggcggacagtatatcttcgggaccttgcacgagggacgagtagtaacaatcaaatgcgaggcattgaacgccgtcggcggatctcgcatattcgtcgatcccaatacatgcattgacgaccgaccgcacagactaaaaatgcgcggaactgggtgaggactgttgcgaaataagatacccgcgcggagagcattgtcgacattccgcggctgcaggcgagagagttagcaaccttttctcaaacactcgccaaccgcgcgtacctcaacatcctctaacacggcaagcacaaataaatcgagctccgaattcctccatccaacaattacacctggcgccgacgaccgggggaggtcgtatggccaaaatacccgtagcaatccatcgctcatctgcatggtgtcaaaatgtcatcctttaaaacgagccgcgacggcgtagttgttcgcgagcggaaacaccgagatggacaggtcgagggtgctggagcaacggtcattagtatcgcccaaactctttaactatcagattgccagcctacctgaatactctccttttgcgccagatggtttatcggtacgacaagcaagaaaaagaaaaaggagaggaagacaaatccctttgctgtcctagtctgagcccgccgttagcgaacggagccctttcaagagtagcgcgacgcttgaaagatagcttaaaggaacgcaccaccacgccgtgatcccaagcaaatatggccaattcgtatagccgtgtgacgagatcccacctcgcggtgatgtagcccgctacgaagatgccgagagtgaggatggaaaaggggtgcatgaattagactattgcaaatgcgatgtggacggtccagcttcgagtcaattagactgtacgcacatcacggacgggcactgtaaagagggacgtaacgagggacaagtcgggttcgattactgtatccagcagtaaaaaggcagaggtatttggcgctttgagcttaaaactaagctgcacaggccacaaccaagaggcatagacgaccctcagagtagcggtgagtgttgtttgtaggtttctcaaatttggtacttacttcgactgcgcgggcgggactctaaacctgggcacgtgatttcatactatacaggtagcgcagaaagtagtatggcaatatatgactggttgatttcgaaaaacatattaaatacttcatagatgtatatcagatccattacctggcagttgaatgacctatacaaccttgcgtagaatctacccgaacgccataactacctaccaccattgcagacagaagcatagataacccgaaaccgaagaccagaaacaactctggatgatggctcacagcgcctgaatcccctggaagactctattcgcctgcaacttctcgtccccttttaccaaatccctcataacctgcctcttctcctcaagcgtcagctctctccccggctcctcaattgcactcttccacttcaccagcagcgctttcaacagcgcactcccttcttcgacttcctcctgcgagtacttatcaatcgtcgctgacgcagcatttccagcggaatcagcggacgtaaaatcctccagctcctcggccttctgccgcgccatgttgactaccttctctgggaagcggacgagctcagcgacgtggatgccgaaagactggtcgcagatgcctggttcaacgcggtagagcaatgttaccttctgccgggtctttctcttctctttttcgtcttcttcgttcgctgttgttccgtcgccgatgaatgcaacgacgtgcaggttcttgacagacttggggtatcgatctgcaagtgtcgtgagttcgtggaagtgtgtcgcgaatagtccaaagcagcggatttcggtcacaatgtgctctgaaatcgcccaggcgagaccgaatccgtcgtaagtgctagtgccgcggcccaattcatcaatgatgatcaaggactcagaggtcgctgacttgaggatgtttgacgtttcgagcatctccgccatgaacgtagaaacgcctttaagctgcgaatcgctcgcaccaacacgggcaaggatgcagtcaaagatcgtcaactctgcttcggtgcagggcacgaagcagcctatctgcgccatgagcgctataacgccaatcatgcggatgtaggtcgatttaccgcccatattggggccagtgatgataaggaatgaggactcgtcgcggataagggagacatcattagttatgaaggagatgtcgtcctgcatctccatgcaggggtggcgtgcttctttaaggactgtattgcccgtgccgcgcgggtggatcttgggtttcgtataggctgttgctcgtgacagaggcctgcgcaagctcacatgacatccgggagcagaccgcgctagttgtcaggaccgacagacgatgtgcacgttgcacctcgaacaagtccgctggtgcgctggattgagagagtgtcatgtcccgggtgagatgatcccatgtgtaagtcacacgtctt

SEQ ID NO: 5742 - DNA, 10390 bp, Emericella nidulans
ggccacacaacaggctttctccaggcaaagagaaggcgagaaggattcacggatagctgggggattgctgcagaagccgcggctgcccttaccatgataaacaagctactttcacaggcggttttgcaaacttctttcggggtttggagtcgatagactttgtaccggggactgctgaggtgccataaaccatgatgaattaaaataaaattcatcagtcaaagtcctaaaaggaggtgtatgttattgtgcatcactccgagcggggacagtagtagtgcagtggcatacaatccccccgacggtttagccacggggcaacccgatactaaagaacgaaatcgaggcccgaacgactaatctcagtggtttgaaagtggtctgatattggggcgtggattagccagccgattaatgcagactactactactagtagaggaacgaacggggctgtcccaggatcaaatcccgaactgtgagatgtcagtccacaggttggtcactatttggacagggtattaccttccatagagataagctggaatggtcacaggtaatgagattcaggctaatgccggcgggttgtattggctgtgggtgggcactttccctgtattaatagacgtcgtcctgtttcctgaaactcccggggtttggtccttgaataaattgcagtgcaaacttggcaaaagtgaagtggtggcaatatgcttgtatgcatctcatctctgttttaagggtctccaagcagcacggaaaacaaaatagaagccaaggatgggtatgaagcacaccatcgtccggagactggttgaattgccattttttaccctgttccagtctatcaagatcacgtgcgccggccctttctcggcaatggctgtcccttctcatataataattagagaatggtcgatgggttcgaaaagtggatagtatgtggagaagcaccggcatctacatccggccgtatagatcttcggccgatatctttcatgttcgtcatacagtacgatgtgctgataaaaggacttttttcgttcattttcggggtgagcgtggtggggatgggaaaccaatattatttgaagctgatttcagtgcggagtatacttctcgtaattcattcattgtccatcacgcaaagcttgggagtatgattttcctgtgcttgaataacccacgcgaaggtccgtggatgtaggattaggtacgctgcacgacagacaaagtacaagtatatacccgcatctttctaacggttccaccagcggttcatcttccgcatacggctcgtcagatgggagtacctgagcggaatgtttgaagcctttaacctggatcgagttcttctaacagcacgggctgagatcaatgaatggtttcaaagccaggaattgttgggttctctagcgcagcctaggctaccgcatttggtggtatagaagcaatcgcagaatagcaaccggacaaagggggtgctcccagggtcgagagaatgagaaagcgtatttatctttggaataggatcatggacagatgcggctatagaaccctaggctgggagctgcccgtagttgggctggcgcagcagatctccacaagctccgcggctttgatgccggtagtgggccacagctgttgggcaaccctggcatgcatgagattctctcccactataggctttcctcagatccagcttcatatgaacatacctgagaagctgctttggaactgttttcgcggaaccaatttataatcgagccagcaactggtcgaggaaccgttcgttgcaaagggaatactgggagttttctctgatggcgctgtcaatgcgtgttcccgtgccaggttgcttcttggggcctttccatacgcttaacgactgtatgtgcttagtacacctaatttctcaagtcatagaggaaaccattattcaatcgtcttgcggtggtgccagggtgtcaacatcaattccatcacacacgccgctgaggcagttgaggccgtcatggattaagtaagaggtttccatttacctgctggtttcgccggccaatgccaataaaatattcgaatctcacaggcacaatgatatcaatagcgtggatatctgctcggaactcaatccattgctcaattcgttgtctttgagccattgcaaaaggttgtaccaggcttgggggatgaaccacagtggccagctgcaaagcccggaattggcgattagtagcagcacaaaactaggaggcaatgaaactctgcacctaggtagattatttctgaagaagctgtgaggttggtgagcgagattgggaagagggagaagatggatgatgggaagagaacactgaaggtggaggtactgttgaggaaggagctgccacagggttttgcctccttggtccgttgtatagtgctcgaccacctccttccggtctagtcctgtctggtagcaatagatctgaccttttacgctacgcgactgaggagtcaatattccgccaagaatcgtaatggttgacactgtttagaccgtgacccggttggctgcaaggtcgaattctattctttactctccatccattccagggttgcccaaatccttactctagtgcaatatgaagatctaatgcttggtattatacggttcaagagaaatgccaggaacacgcgtaacgctggcccacacgctttcagaaactacggccggaagcttgtgtcctctcagttgctggtcaatcagccacatccccacgacaaactcggctcgagtgagcagaccgatcttctgcccatccacgaggttccagatctgctcgaggacgtgattcggtagacgactccttgaccagatatctcgaaccacaaggttgacgaccatgtccagcgcggccggaggatacattcaggtggtatcttatctggctcgagattttcgtctagtacttggctgggatgtatgagcaggcctttgtttgcagcccatacgccctcgtatctcttccgctctttctctgtaatctcacttctccatctcctgcgctctccttcattgtgcttatgcgggtgcttgttgataatgtggcttttgtgctgacggcgacgctgctcatcttcgtcgtctgatctggcctgtggtcgaagcgtctctcgcaaaccgcccgggctaggattgggcgtacggtcctttttatgttggacgtgcaataaggagcgagatcgtgatcggcgcctgcgttgcggtggaggtggtggcggcgactttcttgcctgcagtgctctgttcgacgccgttgacgaggctgcgactgcgtccgagggcgcgtctcggctcgcaacggtgtgaacgcttgtgcgactggcgttgtgcgccgggctgtacaaggacacaacgctcgggctggacgacagccccgctggagactcggcgcgtcctggggtagattggtttatgtacagatcatgcgcggttgcggctcgtcgtggtggaagtgttggcggccgctcttcagacaacgtcgctgcagaagctttggagcgaagaggcagaggcggttttcgagcttcatcacgccgcagtccgttctcgaagcgatggctagctgacttcgacgccggttcgcttagggcgggggacggtttccgcggtatagggggcggcacgggacgcggcttccttatgggcggccggggcgacgctgaagatttggaagacacgggcctttgatcagaacccggtttcggcggcgagtgctctggagtctcatcctgatacgggtctagcaatcgcgggtttataactggcttccgaaccgggatcggcgaggacaggtctcgactcggtactgctccatttcgttgcagccgggtcctttgcacgtcatcactcgtagtcttgccgcccgggccttgtacgcttccggtagcgatctcagctgcaagcaactgcggtgatttctggcgagcaatctccggcacactttcatgggcagatcgtggccggtcgctgggtgcggtcgcggtggagtttgcactaaacagggcgattttgcccttgatcgaaccgggctctggcagttctgaaggaggatcgggatcggaatcgagcagtgacactggtggacgatctgccatcatcggggactgcggtttgggaggcaccgcatggctgaaagcgagtaaagctccctgtaaggcggcagccgaagcgggcgggttcaccgtactattatttagagagcggggaagcacgactcgacgggaaggcgtcgaaggtttggccattcgtgggacagtctagctctggaccatggtcgcgacgcaggtatcgagcttcggcttcgtgatcgttgaatgatcgttgaagctttggcgggtcgataatgatagcagatcgcggtaaataggagaaacgggacgcctcatatcggctaagatgaggctggtgtcagctcgggtgcacgttgcgcccaagagccacaaatgacacatgccgcgccccagttataatattaaatgtttcaactcgttgttcacggctgcggttatgtattttaattattgattatttgatatttgcttatttgattatttgattatttcaactattttaattatttcagattggtttataagattattttgaacagcttattattttattcgttgaccaaagtgcaattatgccggtcccagccaactggccgaatctattccccaattcgaaagttctatgaccccgggccattaggccattattcacggctggctggcagcgcagggcttccccgcatccccggcctttaattctgggctaatatcgagcgacttctgccaaagggttgaacgtgtgatcggcccacattattcctaaggctagctctgatcgggagaaactcgtctctttcgtgatgtgccaggactctcaggctccttcccatgccttccgtatcccaataccctgcgatacaatgccactcttttgacgatcttgactgagcgttgcgcgctgaggtccgcctatgagacgctatgacggaggaaaagagcgatatcggccaaggtacggagtccttacccagcgctttcgtctccgcatccccgcactgtgtcggtcagtgacaggacaggaaataaccgttgaagcacagaaggttcagaccctcaggaaattgactccacgtctaaaagtgaaggcgccagccatgatcgcgaggtggaagagacctcgtccgctacgggccagaccaaatgctctatttgccagagtacgttcaggcgacccgagcacctcaaacgccattttcgcagccataccaaggagaaaccgttcgagtgcacacaatgcggacgtcatttctccagaacgtatgttataacgatcctcgcttttcatcgtcttctttacagcgttcttgggccatccagctaatgaattgtccagtgataccctccatcgtcatgagttgagtcatcacaccatcggcgccgatggagggaaagaccgcacgcacagaatcaccgtcaagacgttccgtgcttgctataagtgcgcgctcgcgagggtacgttgtagcggtggcatgccgtgtacgcggtgcgagacgaggtccctcgaatgccagtatccgaccgagcgacgctcgaaggccaaaatccgaaaaggtgtgacccagcccatgttgctggacgaccgcgatccgttctctggacagtcttcgcataccttctccgtacagggccccgaaacgtcccgaaacgaaggcagcgggaatcctgacatccagcctggatatcagatcagccaattccagctgcgagtacgcgcatcccagaatccttccacatcgtccccaggcggtacagcggcgcccgaaatgcatgcccgttcacagaatccgttggaaaatagagaagaatcgcatctcgtcgcgagcccgtccctagttcgaccggatgttactgctgtatcagaggcagtgccacggacgtttcctccgcttgccggtgttaacggacagttttatactccggcgcaagttcagaatgctataccaattgagcaaagacggttcagccacccagtgggaagtcggcaacatgaaattcctggacctggtactgctgtttctggaattccgggctcgggcgatcagaatgcacagttggacttctcgcagtcatttctaggccaatccacagtttctccattaaactggctttccagtgacctgtttcttgaatcggcttctgaccatggcttgccatccggaccccttccgcagcccttccaaactggtgtattcgacagttcattgggccaaacgacatggttgcctccagtcatcaatgcggagcctaacggctcgtcaatatctggaagtatttctcatacaacaccgtctgcaactacctcgcttggcgatgtggaaagcccaggtaacctcgttcgaggaccacggcaatcttcacaatctggaccatccaagcgcccaaccgattacaatatcgacgaaccggttgagcgacttaataaacaaaggaagcagtcaacatggcccactcaattcgcggagcccctcgacatctttctgaagtttcaaaacgtcaattcgaagccccgatttgcgttccctccgccaagcgaagggcaaacgaacaccatacccgatacacaagtcaattgcaagcttgaagatttgacgtacgaccagatacatgacgcattcacccggttatgctgtacgcagaatttcctattctccgaatttgaaacgagcagttttcctagtgcacaagccctgtcgaactttcttcaccactattttagcttctctcatcccctatatccgataattcataccaaaacattcaacccaaacaaatgccattggatagtcacgctagcattagcagcaatgggcagtcattctgcgaacctttgtgaacaaaacggaactgctacagcttttcatgaatttctccgtcgggctctttgcgttgaggtgagatccactagctatcaaatcgtttgtcgccataactaactgagggcatggttctagaaagaaaaacggcaaccggagtatctgcagctctggctgattcaggcactgttgctgagctgtatcggcagactccacgggaatagtgaaagtggtaaactctcagcacttgctgactttggtgatcttgtcaaccttgcaaaccgccagaggctactatctcgctcggaaaatccaaatacttcaacagatcaatcgtcgccagagcagcaatggcttctatgggttgaagaagaggccagacggcgaactggatatgtgatatgggtatgcgatacggaggtcctattgttctccaacaatgctgactgtggcctagctcgtggactgtacagtggcatatgaatttgatacgaaaccctacttttgcctcgatgacggccaagcgcctcttccatgcaacgaaaatatctggcacgcagcctcatcccgtatctggaaagggctccgcgaagaaatatcaggtattgccagctgacattgttacatagcatcttggctaacttagccatttagagcaagagaagatctccctatatgacgctgtgttgattctatacattgagaaaaggcttgtacctgaaataggggaactgagtcacatcttgctcatacatgccctataccatcggatgtgggaggtgggcgactattttcgccgtccgctttcattctggaacccgacggcgaagaagcagtcccgaaaattggcgattccatcagggtctgtctggctgccaggaattccgtcctactccaaatggcgcaacagcgcgtgcgactgtttggatatcctccactggacggcaaatggcaccatagccaaagcaaatggccacgagcatcccacaattctgcaccttcatacagctcgtattatcctcctcgcgccgttccgcgagattcggctcctagtgaatcttctggccacacaaaaggtcaattgggaggaccgccagaaagtcattgaatggcattacatactacgctggattaaacacgaccaatacaaagcgcgtctggcggtcattcatgcaggatcggtattgtatcatgttcgcaagtactctacaaacgccttccacgagccagtcgctacgtatcttgcgattctcacactctgggcgtatggcctgtgctacaagcaagcatctccggatgtcacggccactcggcacgattcatctgtcgggcctagcgttataaacctcgaccagccatgctcagatgagctcgtgcagtctttcgttcgcgaagggcaaaagatgaaaggaatgttgacgaacgtaggtgatatctgtgcgccgcacgggcctgagcagatcttcgagtggggtgcgaaaccctcgccggtctcggtccgtggggtatagcaaaggagttcatggtaactctgatgaggctcgctgaattggtatgataaagttctactttacgctgggataatgggcacacacatagccatccggagttcctatctgtacattaagatatttcttcatcacatacctcaattatatcccacgatagttttcagcgtacctgtgaacatacgtagggctgcaggcgtagtcctggaccctaactatgatgtcacatgcaacgttatcgataaggaggtctggatggagctgtagcctaggaagctagaacgctgcctggatttctccaacttctgccctgtacgaagctcagatgcgggaaaaaaattcatatttaaagctttccccgatagtgagccgcaatttctcactttttggacgaagtgatcgcacgagaataggttgcaacaatggaaactgaccaggacatgcatgatcaagccatggctggggaagagacagacctcgatgaaaagtagactgatcctttacttttcgttttaagttacaaataaagctgacaattttttttttctggctacaggtaccccaatcgcccccaaaacaaagctccgaccctgccgttccacgatctctacgaaacgcttttccgtccgctcagggagataaagaagaagcccgttggaccagcaggaaacaggagaaaggccggaccacatggcctgtcagctgcgaacctgaatcctatcgaaaggcgacgcgatataatagagcgcttcatttcaagatggaggaaagaggtcggcgatgacatatatccagcgttccgcttaattctcccggacaaagatcgagatcgggcaatgtatggaatgaaagagaagataatagggaaaatgctggtcaatattatgaagatcgacaaaaactccgaagacggtttcaatctcttgaactggaaactccccggtcaatctgctacctcgagcatggcaggcgactttgcgggcagatgttacgatgtcgtctcgaagcggccgatgcgcacggaattcgggaatatgctgattgaagaggttaatgagaagcttgaccaactgtcgagtgcgtccaaagaggaggagcagttacccattcttgcggaattctaccggcgcatgaaccccgaagagctagcatggttgatcaggatcattctccggcaaatgaagcttggggcgacggagcggacctttttcgatgtctggcatccagatgcggaaaatctatacagcatctcgagtagtcttcgtcgtgtctgttgggagctacatgatcccaatatccgactcgacgcggaggatcgaggcgtgtcgctgatgcaatgcttccaaccgcaacttgctcagttccagatgcagtcactagatcgtatgatagctcgcatgaggccaactgaggacgatcctgttttctggattgaagaaaagctcgatggagagcgtatgcagttgcatatggtgtcggatgcttctgcgccagggggtagaaggtttcgattttggtcgaggaaggccaaagactatacatatctgtacggaaacggtatatacgacgaggctggatctttgacccgtcaccttaaagatgcgtttgcagacggagtagataacctcatattggatggagagatgattacgtggaataccgaacaagatgcacctgagccctttggtacacttaagacggctgctttatccgaacagagaaacccttttcgacaaggtattcatccactattcagagtctttgacattctttatctcaacggccgagacctgacacggtacacactccgagatcgtcgaaatgccctgcagaaagtcataaagcccgtacatcgccgcttcgaagtgcactcctatgaagaggcaacaaccaaagctgaggttgaagcttctctcagaaaggcagttgcagaagcttctagggctggtcct

SEQ ID NO: 5743 - DNA, 4282 bp, Emericella nidulans
tggccttccattcggggaataaagcgtcctggaggaggttgtcgtgaacttgagcggaatcagtgggtgactcgagcgagaagtcgtcggacagctgcggaggtgcagcgaaacggcgggagggccggttggcattgcgggcgacggacgagcgatcagggtcggcgaaatcatgcgaggtgggaaaagcggcagacgttgtgtcggtcgcacacggccagaaccacccccgagagtcaacccagacatgaccgtgggctggagatctcgtgggctcctctaattggaaggccacgaggcagaagaaaagaatagataaggggagaggccaggaaaggaagcgagatagataggacagggaaggggatggtggtagataagagcgacgagaggagtgagatggaaggaatggagggggaatggaaccacagtaattggcccctttgcggaggaaagtcagcctggacagctcggacagcctggagaggaataaattcagcttacccgccgttgacgaccagaaggccggctccaagcgttgcaaggtcgaggatgcagggaagaagcgaagaaggtgcaggagcggaacgtaggatcgggtctgagatcacgatgattaatattaatacggccggataacaaccctttcagaaaggatgcataccccagttctggtccagcagcacggtgagtttgggataattctggtcgtatatctcggcagttgcttcagctcggggcctctgatcagcttatgatatgtgcctatctaatcttttttattctttcttggtgggggggttgcagggatgggatcgagctccagctctggcgttggttgtgccgggaccgcgaacaaggctcctgtagatacagacgaagcgcattgggcttgcgatgtatttgaatcaaccgatcgcaatttgcgcgaggcagcaagacgggacaagaatgagagaggggtagtctatactacggggtgaagggaacaagggaattaggaagcaagtcagaggatggatgatgcagtggtgagtggttgatcaacggccagccagagaggatcacattcagatgataaacagatgaattatggattcaggtaatagacaaaataatagaaaaagacccatgtcagtactagcagctggttgcattactggactccggattcttctcttgtccagacggtctttttttttttttgcttcccgccgtaagaaatcgaaattcgtcagtgccgcaccgacaccaagctaatgctgaagcagacgcttgattttgtccttaatagatccatcgatgaacttgtctgtctctacatatcgagtacacatttaccctttttctcgcgaagattgtgaagactgaaaccactgaagtgacctcaatacatcattgacaaaatatatccgtgtgaaacatgtaagtgtaatacaaataccgcggtcgcgaccgggaacgctgtaaggttccgtcccggatggagaggactcgagtggacgccttagggttcgattccactttaatgcgagcttattatatacccagaccgtctccaattggagaccggatatagtctaggtcgtctaaatcgtctaggtcgttggcaactcgcagtaccttgtgcttgtatctgggtccgttctccgcacatctgtactccgtagccgtacacgaccatcttggtgttctggtgttccgctgtcgattcaaagtaccagaaagtacccagccttacccctgctagtggtggtaccaacgggcgatggcccaccaatggcgttagactatcccaaaagcaaatcgctgcctctggcactcaagcagatccaagcctctgcagttgcatgtcggctacggtaattcaggctagcgcattgacagttagctgtcgactgactcggtttgtgactcgtgcgattgagccgtcaatgcttggtccattagccgcaattttgccgtattacttccattggctccgaccctgagttagtgcacacatttcccttggaaacccaaggccctagagtctagacaagccggcaatctgggtgaaactcggatgcacgaggaagcggcacttctctggaggcatttctctgaaatatattggctgtcactacaagtacctacaagtagtactgagtagaacagagctaggcacgcagagtaggtaagcagagcacgcggtctcggagtcaagcagcgccccagcttcccgatataggacggcagaatccacacggcacatggcttcgagaactcttgacgcagcggggccgacgatatcggggcagtccggctggtcccgaggcatgccgagatggacagggctagtgttgatgcccgaacgctccagcagcgacactgtaaaccgggagtctcgaaatcgggcggagctaggcaggacgacgccttgatgacacgcgcaacggcgatttcgcggagacggtacggagtctgatcgctggtcccttgattcgcgggcaacatcatcatcgatccaaagttttttcaaggatgttctggtgttcgaaggcgaagaggcttgccagagattgggttctgatggagttggtagtgaggtcggttcctatcttacccgagatctgtacgaaaccgtaatgaagtgcagaaacaacggttctgtcagtccgtttcagcaaccaacacaaccttgagcttagcctggacagtccacatcttcatccgtattccaacaaggctgacagtagtccgtattggattgcggtatcggatgcgggtgccttgtcagcctgagtagtgaactgatggcttcaacagtctcaagccttgttccaaccctgttccaactttgttccagccttgttccatcttttcttgggtacgtttagcagcgtttgtcagccgtaccgggttcagtaatccggtcgtatcaggacgactgcttcagtgtccatccataccgaaccagcgatttccactcctctttcgtctcgaggaaactgagccggtgaggatcacgtccgcgtcaggtagagcctccccagacttccccaggcagccggctcctgctgtggccacgtgacaaggtccaatgaacgagcgcacaataagatcgccaaggcccagtgcaggttggccaggaagcatcaggcccacgacgagccactaaagtacgaaatggacctgtgcaataagtcggagacagtccgtgctgacagtgctagagccgtttcgatattattatcctgcgacacaaacttggtggcgagccgcgcgtgaagcactgcagtccaggacaagttagcctcggaagaacaatttgataaagccgtctttgactccaaaaatcgcagtttgggaactttggcggccccgcttaatacacactctaaagccaggcatggagccaggcatgaggtccacagacacaatccacactcgaccattcgtcaggcaaccttatcccacgcggttacaaaggcggttccactgtggttctgataagctgataggaaaagaacctcggcgttattacgcttggtcaacgactcatacaccatccagcgaaggagaccagatggtgcagctgatcaaggcggggactgagtccaccgctacgaatagcagctgtcaagagccggacggggtagcatgacagacatcctctgagggacgcgtcacatattgaatgatgttcggcaatatttcattttgcaggcttccggtggcaaatagacgcagtccgcgcacttgataagacgttccaagttggataaggtggcggtcgcgatcgcccatatcagccggggggatcaagtacttcgccaaatccgggcattaagatcaagcggtacgattcaggcttgaccgcggcccttttcctttgatgaccgtcccccgccgcacgacggcgccccatggtaccttcacgacccgtctcctgattcagggaccaggattctggtcgacattaccttccccagctgaacgctgatcttgctttccaaagtttcaagaacgaggccgaccgaaaaaagcagttgtgcgcatgcctgaaacttcgccagacaggcttcgccggagtaaatccctcctgctatgcggcgaagttgtcccaccatgaaaaagcatctttaagtggtggactcgcaaggacttgtccgcctcgctgtgtcgcctgcaagttgagcggacaccatccgcaaccaacgccctcagaatacccatagggaggttcagaccaccataaatcatagacaatacctggagaggttgtccggcgcgtccccgc

SEQ ID NO: 5744 - DNA, 7151 bp, Emericella nidulans
agagtaagatctgagtttgatgataccgtctagttgaagctcatattggcaccacccaataatcgtcttgcgacttttcacgagtatgtcgaagtcaactgtactggcctttatgtttccatcaatgtggatggataatcatggatgatcaggggctcggctagcccaccctgtagcaagtcgtccagtttcttgtctgtaacgattatcccgcctttgccgccggccaaccgtgacttacatcatcacacgggtgcaagtatatgcgttgctgagggcgagtgctgcaaggagtagcgcggaaaccaatatgcgcgcaatatgcatggccgaggcaatcataatcgtggggaagagtacggcgagctagaaattgcaaggactgaatggatattgcccaaagagctgcgaaagacagatcttatgtgtatatatgctgacagatctcgaattcggtctttgtcgtgctgactgatgattaccccagaatgagttcccggcgagtatattatgggattatacctccaatccccagtggtaaccctgatcataacactgccagaaacagtggggaagacactctgcctccggcttataggctcttggcctgctatccgagacttgatttagcctacgtccacaaaggcggggcatcccacagactttggtacatccagcaattgtttcaagcatgcctttggattcccaggctcgtcagatatacatgctttgcaatgtcaaccctagaccacagcagatcacgtgtggaaataagggccggccagatggagggccacaacagctaaactagactccttcctctcgggaatatcgtgtataatctctcctgtgaagtcatcgaacactttgcgggggacataagcgttgtcgaagtaagtagatcgaaatacgaagggggctcagggaaccaagggaaaactagacgttcatggcatcaagaaatcatgtctcgaacttacattgaagccgcctgagctatagattaatcctgtattgcccgttcagtcctcgtgacttatggttcattctatccgtacatatctatgtcatatgcacaccacgtgcgcaggggaacctgttaagcttattattctagtaacttgactagggcaatgcttcaacctctgaaccatactgcccttggttcccaattggcagacacccgctagaaggaagtagctggcccacacgattacatagcgtggtaacgtccggccacgcgagccagaggaggccaagccaagagactccagtgtcaaaacggtgggagagccgcaacggtcgtgaccagatgaagatggtgatacccgcagataacgccataggcaagcacgagcatgagaagccatgtatataccaggtgcatgttgaataacgcatgtgtggataatatgagccattctagaggaggatacaagagcacacaattccattgcgctgtgccttggatgaagcagagcctactactcatatgcgtggtacagggtgctgtggtgtgaattaaacatgtggggaaagaaatagagtccctcttgggacgtaatactggaggacaagctatatgtcaggttcatacaaaaggagatgttaagcaccaatgcaagggaaagaaagtgagaagcagtccaaatcgccgaggatatacaatgggagtcaatatgtgacgggcacggaggatggatggtcgattaggtacggtagagaatcaccagggaatcgaaggttgtcaatagtctgaagctatctgtctcctattgactagactaactcttagccatcctcttacgaggttggctggtatattatatacacgatatcaggagtcatgacatcattctcttctgacagattgatgatgtggtcggtaaccgtctggttctgggttcgatcccgcgctcggaccgaaccagtgacacaatacaccaactactaggacatccaggcaagacaggtttgccataatccagcgaatgaggcttggggcaaccaggagagatgaagtagttaaataatgtaagatatgtatccgggaagtcagaagactcatactaatgtaatagctccccaggcatggacgcccttgaagcaagcctaaatgggactttcagaatcaatacaagcgcatggagaataggttgggagtaatctatcgttggcagatggacgcttggaatagtaatgcagacgtctagtaaggataaagtgaccatgatccagagctaccatacagaaagaggtaacagaatcacgcatgagaggaagttaaatctgtatgtcatacgaaataagcaaggcaattcaaagcccctaaagtgtcgtaatatgccctgggcgatcgtgacggacctgcccaagcaagtccagccagaaatattatgatggcgaaccactttcggtccaaagcatgcagtttaggatatcaaaaagacagaactgggactttagtaggagcaccatagcaggcaccccatacctcgaaatccatttgcacacttgcagagtttggttcaatttcaagatgactgattagctgaagccacaagttgtttgagtattcatgagataggatagaacccgaagcattcgtagactaaggaggagatagaaatctctcgtggtaaggaccctacattttgggaataagataggccttcttaggagtgaccagagtgccgggagaaacacctgcgaaattgtctggtaattgctaggatcagttttaggctcagagccttctaatgtgatgcaggcagtgaggctacaggggtactgataccagcaggtcaagagataggcccgaaacaccccttactgactttgaaaataattgagtacatagggaaaccgtcataacaggacatccaagtgctcacaatctaacggcttgagccaaaagacctactccttagtgttacgatttctggtggctctgttcaaggacacccagcagtattccaacacacgcagacggccatcggatattatgggacagagaccttgcggcgaagacataagctccaagccatttaaatgcaggggaggagacatgtagaacttctctacgctatcccgttgttcatgtcctttcgggagcaaaaattgcaatatatgagcgaagccgtcagtcagcttggtgtggaacgcaatattgactactaccatgcttcatggccaatttttgataaggaataccttgagcggatttcaatcgcattgactttgctttgtggcagcaacgatcctatacgggaatcaaaatgaagagggagagtcagggttgagctggacagcttagcctggtttgaaacctgatcatatctttcaagacataaagacgaaatagaactaaacgggtcttaagtatataaaactcagtcgacagactccaagcttgacaggttgcgaggcttcgctttcaggttctatatggttattaattgcccgcggtataaatgcccacccccgcacagcacacgctatattagatcgggtgccgacaaacaaaagcacatgggagatcacttgaagtaggccaatcctaaaagcaaggattcaaattaactctgtggaatccaaaaacttcttatggactatgacgactttgcagacctttagaaaccagaataaagaagtccgtcacgttcattgaataccgatcaagcgtttaggtcctgaagtccttattaatgactgcgaagtcaatagtattatagaatgcgatgcgccacgtcgagattccagaggggttgctttggtgactgtagtaatgttctgacagtgtgcctgcgttgcctacttctacatatatacgtctttagcgaaggattaaaagggactaagctgagctgagctgagtgaagtttgcaaggtaagcgaattgaccggcgcactgagactgatcccacctcccgtgtattcatgtctgtacggatcgctacactggaatctctcagcgccgtgccacgtcatgctgtgggggaaaaaaaacccttcatgtgaacgatgtcacacttaccgagttctgcgaaattataactccactatagagactactgcgcctcttcgccccagaggaaatgccgttgggacgaagagcggacaacacacaacgaacgggcgtgctggctataggtctgtaatctagaactggttgccaagtggacagaacggagccgagcctattagcgcagacgacgggcggccgaaaatctcatcatcctacattggttagtctacatatatagtaccaaacgtaacgtgctcttgtgcatggtactagcgggcgctatggcgggcgctagggcagctactgcaagatgggcccgaagatcaccatgtattctagaggagcaattgatacatactcacaatacatatactgaaaaaagtgtattacagctccccacttgaaacagcagcgtacggcatactgttcgaacaaaagggcaaaaacgtatttaaccatgtaacgagtttgtacactgcttattcaaccgcttgctttaaaaaaggtcaggagatttctccttgtatttcttatttcttttaacttcttaccttcatacaaagctttcagaatgcctcggccgtcaataaatcttgagccatacaaggatgaaatttctaccctgtataaatcaggcaaatctcctcctactattgctatgctactagggaatcaatatgatattcaggttagtgagcatatgattaagacccgccttagtatatgggggatcataagacaaattatacagcctcaaaagacacagttcttcatgcttgaatcaaagttcttctatatcaagttggcctctcagagaacaagatcctacatgttctccagcttgaaggctggaatattcagcctagaacattgaaatatgttcggcatcaaaaagggctcttgcaatgtatagtaaatctaattgctgattaagctgaagttgaaagggtcctgaatcaactttgtacagaccttgctactggtcaaattgaaggatatggtataggaatgctttatcagtactttaagaaccaaggattttaaattggcaggtatgctatacaggaatatttcttcttttaagcaaactggctgactttgtacaagggactgcttgttctctatgtataaagagcttactccagctgctgtacatcaacactggcaagatctttaacactattaaggagcttatattactccaggacctaattttatctggttaatagatagctatcttaagctagctctgtacagcatcgaaatatatgcagcaattgatatatattcttgatatattatttagatttatgttggtatcagctcctgtatagctgttagtgtcctttgacagtttcttgacactgttaatattgctcaacagtagccttgctttgtatgattagactgtggtacagagacagtcttactggctgaagcttaatataagcttcagcagtctcttcatccagagattgatattagggactgctacttatatagaacaagcacttctaactaaagaattgaggcgtggtggcttcaattaacccgtggtatagtgttttgatatagagtaagtgcttatatactatatactactttgtacaaacagctaattaagagtcaggagtactttcatagcctttaagaggaaggtatattctctatagatcagttaagtgatcggattgctttatatataatctatatacctcttctccgggtccaaattccatcattcatacaaacatggaaccatcattaaattcagaaccagccaaatcatccatatctggtacctggcaagccttatatgaattataacttcctagctactagtattgagaaccagggaatcaagtttaatatagaaatattcaagtacttgcaagaagatgtccaagactagggtgagttcctaactagacttgttaaacccaacccacgaaacccgccccaacccgccccgacccgccaagaaatgggttgggttaggccttctaattatctattgggttttggatatttttggctgccccaaagcccggcggagcaatccgctgggttgccaagatatctgaataggtatattactgtatttagattatattttcttacttagatagttataatacagtatttaaatacagtattttattaactatgtagatcactgcttattagagtaatgatatgcataactgggttattttgggttatttaggttgggttagaattatctgccaaacccatgggcgatttactgtgaaggtaacccaccccaaaacccgcgtgggcggatcagctaggcctgaaaacccgccccaacccgtggtttaacaagtctacaccaagccctctaaaagctacccatgtcttcattactccgcccaagggacaatttagctattatagtgggaaagcagaggaatactgacagtcttctattacttatataaggagtctctagacaggcaaggctatatagatgcctctgtacttctatttattgaagcagaagcagatagatagtataccacagacattatcctgccacctgttaagtataatcaacccttatacttaatctttattaatctaatctctaaccttatctagagagtatatgtgcctatatttatcctgcagcagttcaattgtacaagtactttatagaagtataccttctaaaagagctaagtttgtatgagccccaggagtcagatactttttaacttgccttccaagtacagggaataaacctagtctatcttcctgacttgtacaacaggccacagtcaaccaacaatatcctatagtactttgaagggaaaaatagcaagggaatctttgttattattaccagaactgtctctgaaccctctgctgcacctgatacagaactaaaggcaaaacagataaaaagaacaaccaagtattaatcttctgtacaagtatctaaggttaaacaggagcctgaggtcaagcaagaacctgaggtgaagcaggagcttaaacaggatataactgtataagataataatcttgaagttgttcctgggcctgctatatggaagaaatacttatttttaattgcattaaaggagaaggagccagagag

SEQ ID NO: 5745 - DNA, 5478 bp, Emericella nidulans
ggccaaaaaaaaaacacttcgcttaaacaaaagggaaaggcgtttgaaaaaagtagccacaaaattccccgcaataaagtcacgaaggccgtccaaacacagcaggggaggtacccaatcgtcgaggttcaccacaaaatggtcttcctcaaagcgcgcccagggagttttgggcccatgaggggcccctggtttgaccgggcagaaaacggtccctcatggagacggcaccattatctcgtagcgcatccaaaaaatatctgccggaaccgcacaatcgcgcacataaagctaagtgtaccactgggcacacaagcaggtcagcaattggctctagccggcttgggagagcgggaatcagggcggattcaggtctataacctgacattcgagactgacctgggctgggacacgatggaaccgatcgcatacctggcatctctatcgacgcttatgggaggttatctttggttcctctaccacaaccgcgaaatttcgtatcgttcagcgctggattttacgatcaatgcgcgtcagaaaaagctgtatcagctaaaaggggtggatctacaactctgggagaatctgatttatgaggggaatgcgctgcggcgggaaatcaagaccatttccgcagactatgacacagaatgggatgagaagctggacgagcgggatgagcgtgtcgtcgaggctctgaagaaagagagagaccaccagaggcgcaagggtgaagatccagacaaggagggacgggaccttgataaatgatactgctgtctatctttactctttgtttccctttgtgttttggatgcctagatggtatatagcacctgtacatatgtctactttgcgttgaagccataatacatggctggttagcgaatattgatactcacactgcttccttataaggaagacagctatcaatgtgtttgctgagggctgcattttgccttcttatctcactcttcaccattctctgcatccctatccccctacccatctgctttatcttcatcgcgcttccctactccacattatggtttccggttacccacctcttcatagagcgtattcatagaggggacctgaacacttccttctcggaaacagagatgagtgtttgtccatgcagtcagatatccagcagtaagcacgtagttgtatgaataatctcagaagaacagaagacgagaagtgactttgcgctccataccgtggaaacgcaacccaattgtaaaccgactagatctgcagcgatactggaagcccatagacgggcaatccttggcccagaaataatccactagagctgataagctctagagccagcttcgacattcagaacccagtctgcagcaatccccattgggaagtgcttcccatgtccataatgcgaattaaaagtcgcgcgcataggttcgacatgccctaacccgtccttttgaattctgaggagctgttgacctgcggcaagatctgagattcaacggaggtctatagacttgtcctgctaagtcagatactggccaaggtctattgttaaccctagctctacatctaccaagagcctagagaagacctgatagtgatcgcggttgacagaaatgtcagcccaagggaagacggagaagccatgcatgctaccttttaatagtgcgtccttgctggattctacaaattggatcacggcagctcaggttgtatttccgctccttgtacaactaggctgagcaacttatcgactctcagcgtacgaagctagggttcaagagcttggataataggactacgttgtgtagatattgatgttgacaccagtgccgacatcgggccgtgtctgcacgcctcatgtattggaaattcctgaagtttaacggcttcaatgcgtttcgatatccatatgcatatgcttttggcgcaaatcggctacggcttccccaatgctgggaagtcccagctcatgaaacggctaagtgacccctaagcatctctgccctacagtaatttccattttttgtaggatgactttacgcacaaccggccgtcagcgacgtaagatagtttgctgaatttgttttcaagactactgacgctgaatacacttctactccacacatattgaagcatcgtcaatccattctcttttgacgtttctttctgggaggctgggaaaatcctatataaggatattaaaacaaatcgataaccatcgctgcctgcgctatgctatgccctaagccaaatacactttcaatctcaattttagttcagagtcattttcatgccaacctcaaccctttcaaacgtaactccagtacagtccagtcaaccaactctcacccattcctcacaggatcatagtactccttcttcacctgcccctgacccgtgtcagacgcccttgcctgcccgccggcctgactctgatttccactctgcccgcctgaattatcctcacctcttcttctatttcgattattcctgacgtcccgacttcgaaacacactgtatagcagccacccagccacccaattcggtccgtactcgccgctcgtctcacctgaggcaaacagcgccttcgtgcgtggtgtcgcattgcgcgcaatctcccgtatggcccattgctggcgctcaggtttaatgtggtgccagaagtaaggtggcttcggcttgtcagatgtattggtcagagtgtcgaggagattggagggggaagtgttgagaaggttgtatattaatattgtttcgtcctggtaaaagaggttagttaactgaattgctaccaaaggaaagagtaggtagagacgtactcgcattgcccgatagtattgctcgtgctgaggatcgtgggaattaaggccgagagcggccataaactcctctttggatgcgcgtggccctactgggggcattttcgttgtttcaaggttgactgtaaggaagatggatgttgatatggtttggctgttctcgcagctatctggtaggtgtggttgaggcagctctggaagacaacagcagcagcatggcaagtttaaggaagccaaacttaaatacctacacgaccgatcaaagaaaggaacacacaaccgtggcccagtcaaagacatgcgccgggatgctgcttacttcccaatggggcaactaaacgtcgcacaaacggcctcgatgcgcaggaggaaaggatggaaacaaaaaagtggctccataggtggactgatctccctcttccttgccaatagtaagttacccagggcttgttcatccccatcgatcgatgggatcggggatgcggtttggcaggcaatcgcaatggcaatggtaacgacgatcatcaatcagccaatgcgcaacccagcagttgctggtcaaggatgcttcgattcgctttgcttcgaggacgggagagagccgtcactgagttcgttgcgtttgtgactgggatgcatgcatgcagcgccgttgttgtccttccctgccctgcccggcgacgatcgtagacacgacaaccaggcaccgtgcaagctgcgggtctgattagggctgcttggatagaagcagccttcgaccctacccagtgcggtccaaggaggtaagactaggtactgaattcagcacttcagccagtggcccttcttcccatcgtctcatcctgtcgctatccgagacgaaaaagaagatgggcctgaccctgatcaacgtggaagagaacacaacataacgcacgcacgcccctctggatacacacatccatatctcgccattaccactgaaaaaaaggcgctgtaaatatcaagccgatggagaagataattgtagcgagctgcgactcgggagttccctgtcgatcgcctcccgcttgagcgtctgctgtgcgacatccaaccctcaacatcccgcacagacggagcgactgagtgcagacgaaacgcagtctctgttctgcgccgtcggcgttgtgctgctcggcaaacaccgtggctcgattcggaatattcgtgtctggacctggatctgcgtgtaatcaatcaacatggggaaagcgaagaagagaatgcagagctcgtgtggccagatcggacgacgacaagagaacctaatattctgacgaggcgaggcatccaattggagcccagactattctacgtaagcgagggaggtggccatggtgggaaagaacggggtgaagcgggtgtgaaaggaggttgtacagacggagttgtctcacaggatgtccaccagcaaaaacaccgcattaccgtcatctgcactggtgcgttttgcccataaatagatagagaccagtctcaacaactactgattgtatcggcttcgcttaccagcctgccacaaggcagtgtgcatgagatatatcatcgttcataaagcacaggcctaacatctaccacaaacatcatggcaacgccttgggttcatataatactctaacggagcgaaacactcgaacgcactgtcccgtgcctggacagctggagtgtaggtcctccaagtcgaattttgtcgtaccttgtgtgaaagaatatcgatttcattgatcaggttgaaatggagtacgcgagcgttgtgtatgggaagagggagggcgtggcgtggcgctgtccactgccacccctctcgtggtatatccagttaacaagacagtagtaacggcttccttctacctcgtccatccaaatcctccaaaaaaggtatcttatgctttggcgtcttttttggattcttcaggggacgagggtgtctcctcatcacgatagtattcccgccggaagaaattctctacctctttgtaatccttcttagcagtcgccagcgttttttcaatcttctccagtgacaccttctcatctggctcgtcgttggttcccgattcatcctttcctgctccgtagtgctggattttctcgcaggcatccttgaccttggtgagcccgatagtagccgacgagcctttcaaaaagtggcccagcgacgagagctcgctgagcttcttgtcttcgctgcagttgtcatcagtatgggctccattaagccagacgcaagggcactcacagggctttctccattttatcaaaggtggactcggcctggtcaaagaagccgtacacgataccctgactgaattcgtgctcgtcctcgtcatccatctcaaggatctgttcgaatgtggcttggtcgatgctgtctgccatgtccgccagggttctcggcttggactgtcccaatatcagtcaaaggtcaaagattcaaacaccagaaaacacgcacctgcaccggctgctcttccttgaccgtcttggtggttgtagttgacgccatggttatgatgaatgatattatgcggactctcaagctatgctgactggctgatgatagacggttgtccaagaagttacccaacgggcacgaatactgagattactttgagggtctgctggttcaaatgcatgt

SEQ ID NO: 5746 - DNA, 4389 bp, Emericella nidulans
  unsure (1)..(4389): unsure at all n locations
ttaagctaagagcgggatttacgaccttgctggcaacaaaccctcgaaggtaggaagagcgctggtgacggcattctgcgttaattgactgattatgcaacatttatcattcattgtcgcccagtaggtgtcccgggtaaagcatcataaagctcatattaagggaaccctcgtgcgctgtgctcagtggccagtgaaatcattcatcagctatgctgcgccgctatcgcttcgagagctaagtctcatgattaagtccatgacttgcgaaggataagggtgtatcatgagagacgacacaatggatggtacagtcttttgccatctgtacgtggtcaggttagtagtctcgccacattgagggaagagaatgtgaagtggctatgcagccataaacgatgacctggagagttaataactctctagcatacatgttattgcattgtgcccatattcaaatccaccccgggggaccgtaatctcggtcaatggctggcttaccgttactcccatcttccgctgcattggtgatgtctaatgggccaaaagtggagagaaagaatgtccttttgggaacataagcttatagccgatagtaaaagagcattcatcggcaagaattagataaatcagagcctataaatagaaatagagccctcacaagcggcagagctcggaaacagcctctgtcagatcgaagcgagaccaggaaaagatgtaagaccgatgtatgtagaccaggccctcaatccgtcaaaaaggatataatcggagcgctacaggcgtccgcgaaacggggnggacgtgccggggaagtcacaaaattacgcagccgcgaaaacttgaaagctatgcttttggaaaatgggtagagtctgagataggatcattcctgtaagatattgttggtatttgactatggcacctattggcctttttgatattgagtgatggtcaattccatctgcgatggtgcttatatttgttgttattgttgaagcaaataaacatgacaaccaccaatcagctcgcatagctcagttggtagagcgcgtgactagtaatcacgaggtcagcggttcaagtccgcttgtgagcataccttttctcaatcggttcttttcttttatgccgattgctcaatttttacaattttgttccggctcgcgaagcattaatatcttaacttagatttagtgcatggagctgaaaaagggcaaaagatgctcagcggactcaggctgctgactcctccccacgaatgtaaatggtcattcctcgtgtgggcatactaaaatggcagatgtgcccgcagaactcttgaagttctgggcttaagggtgtaatactaaggatacatgccaggatggatgtacctattggtactcctctgcttagcctttaccgaaaacaagtgagactagtttagtaacccggcgctcggctcaaagatatatatttaacattagcttcaaatacgcaagcggcgtaacaaactaaggtagatattttagagttcgaggactcgtcaagccatcagtttactagtatatgagaatcattcatcaggtccggccctgtcgttagggtgcgccagagtcgccgcggtaaacgagtaactagtccggcggtggtcaacacccgcattggtactgtcaatgctagtctcgagctctgagggacccttctcgactgttagtataataccagatactggataagcactctattattgctaagacctccggtaaagaatcatgaaagaagcaagcaaacaggaggattccgaatcaggcgaaacgaccaaccttgctaaaatcatcccccacattagcaccagagctgccggtcccaacggcaggaccacgtgaagcgggagcagtgccggcctgcgcctcattctgcgcatcggcttgagcctgagctagattctgaccgtaggtctgggtctcggattgacccataccggtcgtatcatcctggccctggcccattttacttcgggtatagtcgacgtttgcgttgaattggtcggtgaaactgctgttgccggtgcggccagtattgaggtttggatttcggttcattattcgcgttgagtaggctggacggataggtcgcaatagatattccaagatgtagtggtgagacactgaaattggatgtgaaaattgggagagaatgaggctcctcttatattaaggtggtatgacggaatgaggtcatgactatgcggggagggcacgttcgtggaagagtcgacgaaccgtggtcgaatcagacccgaatgttcatggagctgtcctagtgtcaactggccatctaggacaagtaatccttcctgtttatgggctattggttgctggactgaggggacttgttccgtactgatatccccgcatcagtggaagattctgtgcaggatgaagtcatagagtatggatggttttgctgcgattggatatggcggtagtgtgctctaaatagtggcgaatttgggcaattaactggagagtgctgaccattttttctttcattcatagatagccgtcctgctctaagttgaaatacaaacttgcagtgaacgtgtttacgtaaatatgtacgcggacgacctacatatgtcctgactgcatctactcttatgctgtccgccaagtaatgttcccttactctataagcccagccgtgctcgtccatactgcacccattcgtcgtcgagctgcagacctaagacagcggcatgggcgccgtaatatcgaagtcgatattctctttcgccgactcgatccgatcgtgacaggtaccaaataagcggtcccacaggcgtgtctgtttgccatagttgtagctctttctgtagcccttgcgatggtgcaagtcatggtcctcaatgacaatgtccgccttaaagaagtctagcaaccatcctagagtagaaggggccgtcccatgtatgcgaaggccactgtgtcccaagacctcagtgaaggcgatgtattcatggcagatccaccattcataaaaccccattggcaacccaaacgcctttagagtcatgtaggtgaaaaagggaaccccaaccatgtcaaagaactcctgctcatggtccgcgtaggccgaaagcaggggattggggtgtttggtcagatggtgggtacgatgaaacttccaaagaaagtccacatcgtgcatcgccctgtgataccagtagaaccaaaagtcaagaacaatgccataaagaccaatctcgagagggagccatgcccagttcatttgcgcgggcagacagtcggcgctgtaggaaaagtagatcgacatggctagacgcgagccagtggttttgtagagagactggacaacctttgcaatgcccacatcgggaataccgtcacgctcgtgcttgtcgccatccagaaagccccacttgtggcccagtctgcggagaatatgcacttcatagatgataatcgcattgaaagcgaagagatagaaattgaaggcggcgaaaggaccgagggtgtaaccagtataagatgaaaagacctgatgtatgaggagaggaaccgccgaatagatgagcacaaagcggtgtagagaccactgaggtacgtagggtatcttatcgtcctttgagtgcaccggcacctcgcgatcacggtcgacgtggtagacatttaggaagtcgatgatatggtgatagaagttccattcatcccggttgccatcacgccatgtggatttcatggagtctttgggattcactgtagccatggcgtggagaattgctctgttggtatctgatgtttactccccgtgaggaggggatctagtaatccttatatccatagtggtttagtggatatctgacgctcggagacgcgatctggtcgtagcaagcatgtgatggaaacttcagtcttgacgatctaacctgtgatctatcttgcgtttgcagatctcttgtcccaacaaatccagacgcccagtccatcagggtccattagacatcagttgaatggcccttaccgtatcgggtatctaccgcgattaagtaataactcccccacatgaaaacggttgctcgctggatgagccccgcaaataatgaataatgcgtcgggagcgtggattagctcgcaagaatgtcatttttgggatagcaggctcggctgttggaaaagtaaatgatcggtcttggtctcgttaagccgtctgagttgcatcaggtgtaatcgccaatatcgctgtatgtgaacggtaatgaaaatgctagagcgttcaactatttgcgaaaatctagagctggaccaaaggtcatgtctgagctgagagacacggaagcctgagaaatattcaagaccgcggcgtagcactaccatggagcca

SEQ ID NO: 5747 - DNA, 5922 bp, Emericella nidulans
  unsure (1)..(5922): unsure at all n locations
ccggtgacgatgccgaactttccttccaatgggcgagacttatgaatgattctcaaatgtgaacacttgagggctgttgagtacataaatagagggagaaggcggttaaataattctggttgttacttcatggtatgtcccactgctatctctagtccccaccatcgggaatttacccgtttgagaccccccgggcgatcgaatcagggctatatgttcggggttacggttaaatagtttcaatcaagcttttcttgctcacatgaaccttacaatttacagtttactcactagggacttaaaactacgcccgaggaataacgtcaaagttcagtgcatgttcattatattgtatgtataatatatgtgggaccccatctaccgtagaaagtatggcactgttgaatgcaaaactccactagaccggccgttgaacccaaaacactacccagaaaccccgtgtatgccacttttatgccgttgaaggacaatgcttttgagctccatgttgatgaagaaccccatatgttagtcgtaacatcgtgatcatgttgaaaaaagtctactcagggtatcggaaaattaaagaaaaaacttagtagcggtagtggtcagccttgtaagggcccttagcatccaggccaaggtactcagcctggacaggagtgagagtagagagcttggcgttgacgtgggagaggtggaggtaggcaacctgctcgtcgagaatcttgggcaggacgtagacgccaacgggcttcttgccggaggtaccgaactcggggtacttctggccgaagtccttgtcctcggccttgaacagagcaatctgagcaaggacctggttggagaaagagcaggacatgacgaaggaagagtggccggtagcacagccaaggttgacaagacgaccctcagcgaggaggataatgtgacggccgttgggcatcaggtagcggtcgacttggggcttgatgttctgaacggacttggcgttggccttgagccaagcaacatcgatctcaatgtcgaagtggccgatgtctaaacgtttagctacatctttatcagtgtggttgaagggtgcttactgcaaacaatggcatcgttgcgcatgacctcgaagtgcttgccaaccagaatgtcacggcaaccggtggtggtgacgaagatctgaccgagaggagcagcctcctccatggtgacgacctcgtagccctggacagcggcctggagggcgttgatggggtcgatctcagtaacgaggacgcgagcacccatggtgtgcagggcctgggcacaacccttaccgacgtcaccgaaaccggcaacgacagcgaccttaccggcaatcatgacatcggtagcacgcttaataccgtcgataagagactcacggcagccgtacaggttgtcgaacttggacttggtaacggagtcgttgacgttgatggcgggaacgaggagcttgccctccttgagcatgcggtagaggtggtggacaccggtagtggtctcctcagaaagaccgtagcagccctggagctgttcggggtacttggtgtggacaagggaggtcaggtcaccaccgtcgtcgagaatgaggttgagcttctggccatccttgaaggcggagagctgctgctccaagcaccagttgtactcttcctcggtctcacccttccaggcgaagctgctcatattagcttagttgaccaataagattgagaatcgacatacacagggacaccggcggcagcgatggcagcagcggcgtggtcctgggtggagaagatgttgcaggaagtccaggtgacctcagcaccgagagcagtgagagtctcaatgaggacggcagtctgaatggctggggaaaggtcagttcgttccacaatcattccggtatgcggaacgtactcatgtgaagacaaccggcaatgcgggcacccttcagaggctgggcgggaccgtacttggcacggatagccatgagaccgggcatctcaatttcagcgagctcaatctcacggcgccgaaggcggccagagactattcaagttagacgtgatattccccttcaacaagctgggttgaaagacgtacgatgtcggcgaccttgaatttctgagcgggggcagccatggctattatggtgaggatgaaaaggaggagaaaaaactgaagtatctgttagcaattactgctccgaatgagagtgcagtggataaactcacataaagggatgggagaggatgagaggaggatggggagagaatctgagaggaagagaaaagggagaagaaaaggattaggaagaagaggggcagcgggtcggagttcagttgttacggcggggctggccaaatggggcggtcaagtcttactcagcccctaaccatttctacagttaagtcaatattattcccttttcggtgggttatcgagaagagtagatggtattgagtaccgttctatcttgcttgaaaaagagtagagagttttttaggttgtgttggacagattgttattctctatgaagtaagacatagtagacaagtaggtgggtttaccgttgtcactactggggcagtatagatctctacaaaactttacgctacgtaggcgaaccaaagcaggccatctcactccgaaagggactgctaacagttactagagcatcgtactggaactaacaccccggcaaatggatggagttacggccaagatactccggtacagccatattcggggcattccaatactgctaaattcagccccacatttgtcctgtcagcactcagcatgcagagaccagagccatagcgggcagcctctgtgagccacggctagctgagggacaacgacacagaggactgtatggagccggacatactggactgaaggcaagcgagtcagcccaatctgatgtgcaagccgcattattgccactgtagctgagctacctacctgcattgaaggcacggagtttgcaacagaataatgcatgtcagacggactcgaataatatcgccggacttgttccataatggcgctaaatcaaaatgtcttcaacactacgttagtacttacagcaggtaaggaaggtcagacaaacttctcaattttcatcatggtcgccgagtttcttggatacaatctgaggttcgacggtttgtcctccagagtataagacaaaggaatcgccaataagatgactcatattaatcacaatgcaagcctgacattctgcagtaagcctggcttatgtcctacaagctgactatgtagtccttcacttagacaccgtccccaaaccgatacggattcatccatctctgtaaaaatttagaaccaaggcatttgcagcgaagtctattcgacataccttatcataaggcttcgatgagtcacagaagcgcagatccgtagctaagcggataacaccctcggggtctttattgatggtcgatgcatggatctagattcatcagtcattagagtcaagtacaatgagaacattgcacaaagcatactgcatgaggcttgtgcaagacaacatctccggcttcataggcagagaccagccagcgccggttatgctgctttgcgaactcaactgggaattcggatagcaagcccgtcgccatcatattcgaattgaatgccgagcgggcttcctcctgtgtcaagccggcatttatggcttttgttgtgaactcttcttcgatcatgagaccgacggggtcacctagaacctactatcagcataccatccttcgagaatcaggatatcggggcataccgtcttcgagatagatcagtccaccgccattcaacttcacgtccccaatgggcacccaagctgtcacgctcgtaggttccccatgcctcaaaaaaatctgatcataatggacaccaatgggctttgtcccaggcgtgttattcctcaagagtgtgcgctggaacgtcaacgtattctttccccacccactgaacctcgccacaaagtcatacagcaccggatgatgacacagcttctcaacataccagtccttgtagtgcgcctctacagccctgtccacgaactcatcagcgtccgncccttccggccgcccgttcccgccaacagcacctgcgccgatccctgggtagtgctcggggttcttggttgggttgaagataccttccacagggtcggtgccttccttgaggacgccggttggggataagtaggagaagtactggcggcgagtctcgaggacgtcgtcacgggggagcagacccttgaggaaaagatatccatctgcttcgtagcgtgctcgaagctcttcaatggggagactggggtctgaggggcgaaggagggcagcgttttcggaggtaagagggccgtcgttgacggcgagggtttccgttaggacacctggcatggtgagttcgattttatccaaagcaaaacgagatagataacccaccctgtagttgagcggtttggctggttatatcgttgtgtatgtctacgggtatagctacttcttgcatctaagctaccccgcctactccaaccccaagctctgcgctggacccattggattgactccgttattgtgggtgaaacgcaaagcgcgcccactgtgagtggcggagtattcaaccttcttcgtgaaaagcttccaattgaagaacgggtgcggagaatgatgcccatcaaggtcatggcctaaatatcataccctatttaggaaattccaaccatgcaagtttaatagactattaccgaagataatatatatacagctcaatatgcatgccagtccacaattcatcaatgatgcgaaacgccttactcccgtaaccccacgccatcatccaatccatcaatgcttccactctcgaaactcccattccccagctttttcacccacaacaagctccaatgttgtaaactcaatcttctcatacatctccctcgcagctgcacgcgcctgcgcatgccaggggccagtaccgcctgctcttgcgtcttctcgatttctccataaacctagcgaaagatcgtcagcaaaactcactctaccgaaaaaagcacagaaaaaggagacgtgaaagcatacaagtagcaagattctccctcctcccattcttgaccccaaaccaatacttcagaagcccgccactactcacagcttccgcatgggatcgctcatccagcaaaagtaggcgatccccatctgcattcgcttgaagtacggaccggaacacgacgacatagaaactctgccgcgacaacgaatagccctcttttgcagcgaggctgtaaaatttcagaaaaacgaagtcccaattgaaggattccgtgtatggcgctgtggcgtagtccgggcgcactggggtgagcgttgttagggcttgcgcgaggaggcggttctgtgtgtcgagagttgaaaggtccaggaggtgctcgcgggttatgtagggggaatctatgaggagattccctttggctttgctggttcgcttctaaggggtgagaccgggcggactggacttgacgtgaaacctgtaggccctacggttgtggcatagccggggtttgtatagaataactagcttgggcgggtggccccattttggcctaggagttgcgtacaagcgcggatttaacggtttaatattctaataacctttcaatgacgaagataggttaaacgccctttacctatgcccccaagaagagcctatttgccacctacaaaaaaacctttcccccctggtcacctttaccaaaggtccacccgacaatctggatgtctttttatggcctctatttatttctcatattttcttttattgaataattatattaatacttttcatcaaacattaacgttattatattatctctattatattccttctcat

SEQ ID NO: 5748 - DNA, 3305 bp, Emericella nidulans
ccaggcgtgcatattggacattgagttgtaaatgctcctttctagtttgggtattcacactcgaaaactagagggcgtgtggtttaaagctcttaatcctcctaggtgcctgcgtagttcgctaatggctgctattagcatcggggccctctctacaacagggacgaaacagggtttccatcgcaaaagtattcactacgatgagctaagaagatgctaatactcactcttagtagcatgctcaataacatccgtcaaagtatattttgaagaatttggcgatgtactgagtccatatgtaaagcgatcctatcgaacttcccactcggccaaaaagggctaaccccctctggagagttaggtaatgactaatatactggttgtcaggtccctacggcggcagggaagcacgtgatgacaagcgctatgactaaatcaatgccaccacacggcgctgacgacacacaaccctgacgaaacaagcaaaaaccacgacgaggggagaacagggccccctactgctctaataactgatctcttacgctttgctcatcgatcattccctccaccccatggaggtggatgactcccccccaggcggagcccgtccggggactccgctcctgggtgaaaactctgaacccccctcaggacctaccaccccgacccccctaccccggaactccctgaagagaagggccttattctccccacagaagactcccactgcagctccggtccctgtatcccattttccgcaagccccatcgatctgcgagcaggtcagcatggtagcagatgaccagctagtccttcttaatgattggaaactagcaatgacctctcttgccaaagctctagatctaactgtctcctctctacagggccgcccaagagacctggcccgggggcttgcagccagatttgtttccctagcaaaacaggactcccctcagcagattcctctgataacagcagttgcacccccacagccatccaggcagatggaacagccaaaccaacctcccactcctgaagcttgcgaaggccccctgaagaggcaaacctcgcagcctacaacctgggcatccctgacagccccaagagctggtcaggggaactggcaaactattgccccagaacaccgcacgcaagccaagcaaccagcacaacgaaagctgaagcagccaaacaagactaaccaccacatcttcctccgcctcctggcctcctctagcctccgggctattggaccacatggcatctgggtcacccttgcagggaaagttccggacaggattgcacaggtgcaagtgatatcaacaggatacacaatcactacaactgaacaaggcaaggtcttcttactatcagagaaggctgcaagcctagctggggatggatactttgaaataccaacagagtattaccaggttattgtcccccggatcccgaaacaactctggttcctggatggatggatagatactataattacagatatcagcaatgaagcagagtgcattactggtattaaactactcatggccaaactctcaaagcacccagtagagagggactctatcacagcagtcatagcctttccaaaaaggctacaacaccccttgcaactctttggcctgtccggcctatcaaggcccacccgccccaagcaaaggcctttgcaatgcacccgatgccaccgcttctatgatacacgagcctgccgctccagcgaacgctgtatctcctgcggatcctcaaaacaggaacataactgccgtgtgcagtgtattaactgctgcggcccgcatgcagcagacttccaaaaatacccagccagaccccacatccagaggaacactgtcacccgcctctcaaaagatgctctagctgctatctgcaaggcaggctggcttgccttctaacaggagcagaagaaagcagaagaaagctctaaacaacaaacagataatacccatactataaaccagcctacaagacagctcacccaggagctcttaaactaaaccctgacctcccctgaactatgaaaatactacaagctaatgtaggaagggggggcgctgtacatgacctgctactctcctttgaagcagatattattcttatccaagaaccttggacaaatacagcaaagcacctaaccaagacccacccacgatatcagctgttcagtcccctgacccgatggactgccagacccaggactctaacatatgtacaaagggatctcccagcccattccctcctggaaccaatctcaccagacatcaccacaatctacacggcaggccttactatcatcaatgtctaccgcccccctaatgacccagttgcccctgctggtgctggctcaacaccctctacactttccacactcctaggatatgcacccccagagaacaccatcctagcaggagacttcaatacccggcacccattctggcagccagatactgagtcttatgctgtcacacctggcacaacaggattattagactggcttgatgcccatgagctggaacttcgcctcgagccaggcacccccacccatggaccaaacaccctagaccttgtcttctctaacctactactaagggccctagtagaagaccatctaaagactccaagtgaccatgcaacaattggaataatactggaacaagaagagcccccgcctatatacaagcttagatctaccaactgggagaaagccagagccctggcaagcccgcctgacccaaccctaccaattgacctactagccaaacaactggtccagacatcccagcttgtaatacaaggcgcatcaagatacaatactcgcagactccccaggaccccatggtggactccagaactaacagacatactacaccaaacaagacagcaacaaaaccccgactataaacagctccggaaggctattatacaggcaaaggctgaatactggaagcagtgaattgaacaagccatagcacctatagatgcattcaaacttgctaaatagatacaacatccagaccagcttgctgctcctcccctgaatatacaaagggcacaggttactactccacagggcaaggcagacgccttccttaactacttcttagagaagggggccctgcttccaaatcagacagaagagggacccccaaacaagcccctgggctcactacacctgccaacaaaagagcactgctgggctgctctctgtgccccactcctgtctgcccccggggaggatggacttgtcaccactgcttggagggagctctggc

SEQ ID NO: 5749 - DNA, 11367 bp, Emericella nidulans
tcgctggtgccttggcacgagcattgagtgctgtggagagcagactaacaggttgcaccgtactgatcggtcgaggaggtggtaaatcctgcagttctggcgccggtggttttggtttccggggcgatgctgtctgcgagctcggtccatggggcagcttgtgcatcaacgcaatcggtgacgacgagtttagacctccagttataccaacagctcctagaagtgacgcagagccagctgtcgcatcaaattctgatgagagagcactttcgactgaccccgcgtccgagtcttcctcctgttcgtccagctgctcgagtccgtcactgctggcttttcctagatctatcacttggtcatgaccggagaagtgaatctggcgcctcctgtatcccggcgcggacatatcaatctcatgatccgaagacatgtcactactggttgtagtggttgtcgtgtcccgccgtgggcgttcactgacgcttggggcggtcccaagagagcccgtgcgataatggctattcatcgatgtatgcgaaggatgtgtgaccataacctgaggtctttcctgccgatcagttgccctgatgggtgacgagcctgctctgatccgaacaggcacttttggaaacttgatctcttcgctagccctctgcaggggttccccatcatcgtcactttcgtcgctcaggtcactgctgtcatcttcttcgacgtctcttgccttctgctgttccctttgctggcgttctttccgatgtgcgcgcttctcattccgtaaaggattccggcgcccgatcccatctattgtagatttcccgtcaccatgcccccttcgtcatcctcgccgtcttgtccaaatccagatctctgcgaatcattcaaatccctagcgcctaactggtaatattcggacgagaccgctgtggccgtaggtataggaggagaatatgtccgttttatactggcagcaagttgtgatgggtggttggcggaggctgctggccagcctgcggcgcggaatccgggtgtattgagaacagaatgattgacattaatgagtctgtcgccaatgccatccttgattgtggagaggtaagaagtgcgtagctgccaaattgtaaagctgcacccaattagcatagagaaactgaaggggaggggatttaaaacgtactcttcgttatgaaagagagacatcttccatacacttggtagggaataagaagtgagacaggaagatatattggctatttcgatctaggaaaaatatgtgcagctgtttaacagggctatcgtacgtcctgtgctctcattgcggactgaaggtggatgcgctgagtgtgccgaacgcagagaacacagccggcaggaccagcctgtccgaagcacaggaaaaagaaagaagagaagttaacagagatgctgctcctggacgcgctccagggtggcgtacggtgtaaatgctgcgctgtatagctaaggaaggttgaaggaggggagaggaggccgcaagcgcaactccaccctatctccgccgccggcagccagccaagactagagcgaagcacgtccttacgagccaggcaccaggtccaacagtatttgtatctacgatttgcctcgtgctacaaaggcagctcaaagagaaaatcatcccctattcgttgaatatcacgatgagccgtgatacatgtaattatacaactaacatacattcagtccatgtcgcactctcgctcaagttgcggccatgatatcccccaaatcaaatatcaaaaacatgggaataatagaggcctgatattgccaatcaagttatgacttggcttttttgcctcgcgctttctttggcttcggcgcatcgtcgtcctcgtcgtcgatgaaatcgtccgcgcttgtcttcttggattttcctttgcctttcgctgatgtgctgctctttgaacttttcttagcggtagacttcttaggcacacgaataagtttgtccttcttgagatcaatctcgtcgctatcttcgtcatctttagtgtcgtccacaaggacgtcatcctcgtccgactcgtcgatggcatcctcaatgtcgggtttttccttcggcgccttcttcggcgcaagaacattgctagccttcatatatggaagcgggtgtgagcgttggttgtaaacacgcgtgaaggcggctttggtctgcgtctccagcttgactttagactcatccataggcccaagtccgagctcgacaagagcatcccagtcatccctggtaagaaaataactgtccataaaatcaacaacgtcttcaacactatctttgccgtctaccatcagccgcttaacgagtctgtcccataatagtggtatgtattgctgtcggacctcgtggcgatctccagaggcgcgaacgcgcatgcgtccttggatttccttcacatatctcgagagttttcctgcgtgtacaacatcagcctcgcgtgcaattactccaaagacgatgatcaaaccttgtttactattttgcccgagccagctggtgaaggcaggccgctccatcatattaccaaacataaaactagccggacgcacaaaactgaaaatagcatgcgttggcatcaaactccattgctgctggctgccatgaatcattctgtcgacgagatctccatcgcttatgctcgaggcagcattatctgctaattccagcagctttaacttacgctctttgccctcatagttattggcacgtgtcggtttcgtcctaaggtagttctcctggagcataagatagctgaactcgtggtcattgaaatacagctcacttttatcgttgagcgtagccgtcgagctttgactgaacatttgtggattcaaaatttttccaacaatgtcccatggcttcaggatgatatgcttctcccatgctttcgacatctgctttccctggtcataatcgagagaataatcctggccggtttggtcgccctgctcgctccgatccaatctgactgctgagagcatattgatcacctgtcgaatatctgcgtgtgttccctcgatcagactatccaggacttgcggtggtattttcattttctctcgaaagcagatggtcagaaggcgggctcgaacctgctcgacagttggccttctgaacggaatttcgaatgtgacgtgatcaaagggcttcatttttgggaggcgtcgctcattgcagatgagaatgagaggaatttgtgtcttcttcgcaatcgcagccatcgctccgacacctcctcgatctccagcagacataccatccacctcgtccatgattagcacaaggttctttttgccactttcaacctttttgtttgaagtcgagaaatacccctgcagtgaagtcgtatccaggacacctagaagaccactctcgacgagttttttactcctggtgtcactggcattcgattccacaacatcgtaaccttcaagttttgccacaaggtgcgccgcggtagttttaccaattccaggagggccatgtatcatcacagagcgatatagcccagatccgtccttgcccggttttgtaaagttcgcctttgcgctttttcgccagttcctgagccaagcttgaagtttctcaaccgctcctttattgccgcatatcatattcagagatgtaggtgcatactttgaggtccagagttggtcatcggcgttattttcctttttgtccttgacatcctgagtggtttggccgcttttgacttctttccgtctctcagcttcattacgtttctcttccgcatcaatctcagcggccatcttccgaatcttctcatcttcttcctttttcttcgcttcatacttttcagcagctttcccatcgccgccgtttgcgggaagacgacgaatgagttcaaataggccttcttcgctaattgttttcagtttgtgtttcgagattgtggcaagctttgatggcccagcatcgcttccgaggacaacaaagcttgtcttaccgctgggtgctgttgtgactttaccgccatacctcttgactaaagcctggccctcttcgcggcctagggtgtcaagaacacctgtgaaaacgaacgttagacctgcaagacaattttccgctccaacaggtagttcggcgcccccagaaacagggtctcgcgatttccctcctccgaaaacgaacttcttcttctcgtcagaaccttgtggaggcgggggcgacggagcttttattgtcgggatgctgtcgaagatatcttgaatctctttgctatctgactgatcttgtttggcggttaacgcctttggctttttggatcttgctccagtaccgacactctttgaggtggcctggatatcatcgtcatccttatcaactgcttcagactttcgtttcctttgcgtttgagaggttgcaggtttggctgcgctcgccggtcgccggggggcatcttccataatcacgtcttcatcgtcttcaccaagtgcagaacgctttttggacactggcctgccccgagcaccatttactggtttcgccaagggatcaaaatcatcgctgtcatcgtcatcttcttcctctttataatcgtcgttccctttgcccgccttgccatactcggtcgcaaaaatgtcgtcatcacccagcttttcgtcgtcaagacgcacagtagccttgttcgtgtcacggcgagacccagctctggttgcgtctttctgctccgcagtccccacggtagcttctggactctccgtcttcgtagcgctacttttggatggtttgttattggtatctgcgttactggatttagttcgtcctttcttcttgctagatgcgaaatagtccgaggccgtcgtaggttcgccttctggcactgcaggcttccttcggtcatgcgttagtggacgaagctgtaattcgactaaaagagccttacgacttgctcgaaggcttagctctggagaccggggcatcggtcaccacgacatcatcgtcatcctcgctgtcattgacaaccttcctgccacctgtaactttgtcaatgcaatggtccatgtgctatagatttccgcgaatcgtacgcttattgcgggctggggtctgtttctatagcgaagttaacagccatccatcagactaagcaggagcaaaatactgggcataaattaagcattggcgatcatacacatacctctttttttgcaggcggtttcgtaggagacgaggcggagccttggctcgacttgccaccaaagaaactcctgatatcagccggcatgatattcacatgaaaagaagaagtttcaggaggtgaagcctgcagatttctgaatttggagccaggccggctggtctttacacaagacagtctcaatttatgacagcctcgggcctcagcgtagcagttaggcaacgcgacgcgcctacctgcctagagctgtgacgcgattaaattagcttatgtaatcaacttatctgagttacacgtgactggcctctattcggcgcggaacggaaaaacgctcaagagggagtgccgagaatcagaaagtctgcggtttctcggtgttgctccattccgctgaaggcaagcgtcgtgaattacaatggggtcgcatctcaaatatcttgcacggccgcaatttgcgtgccttcagccaacatgtatggaccatccaaagaattctgccgctaaactgatgcatcttccagcactaggtctgcgaacatctgtacccttccttccgctgtcacgatgcttctctacgacttcgccggctctcgactggcttactcccaagatggcggaaacctcaaagtcgcccaagggtcgtccacatgtcccgaccggaggatcatcacgaggcacaacagtagtgtggggagattatggactacggatgaaagaccacgaccgccggttgccggctgcttccctcaagattgcagaagaaaccatcaagagacgtttgcgaggaatgaattacactctgtacaagcgcgtgagtgccaacattggtgtctacaccaagggtaatgagcagcgtatgggtaaaggaaagggtaaattcgactactggactgcgaaggttgctgtcagcaggattgtcttcgagctcaagggcgatattcacgagaaagttgcaagggaagcgttccgtcttgcaggtcacaagctacccggtatgttttagagttgcattaaaaaaaaaagtgagcgcaagtcattgatttatatacaggtctctgggaatttgtgaataaaggtgatccaccagttgttggccttacgaagctcggcaatggtgtcacattggagagcttgaagcgagctcgaagaaacccacctctaggaacggacaaattgtctaaacccccgaagtccacgtcctcaagcccatcggcatcgcaatagacccgatatatcattcaaactattaactttccctggttcaagcatctacgcaccaatcccagagccaggcccatacccttgttctctcctagacttggcggcatcatgttcggtttcgtcctagtatcatgtatattaccattagcttcgcgcactcttgttttatcgccaactacgaagatgtcatataaaggagtttataggaaagggaatataccgaactctcgttggtatatccagttatgccagaggtgcgctctccaagctcgagcttgtgcgccaatttagaatcctcccttttcgcctttgcctcgctatgatcgccggcgagtgtagttctcgtttgacttttggtgtgtgggaggttgtctagaaacgatcaggagcggggttttgcgtagataaaggacagtgagacctacaacctagctgtccagtctgtttctctggtgtcttgctaaactgccggaccccttcatacctatatagtttttaatgaatgtccaatagcttctgaagtcttgtcaaactcactgtgtttgttcgccgccagcctcgatatccataagtttagtgtcggtcattatgaattgctatatcacaagtagatccaggagtcagatggattgaatgagccttgattgtgagcgattgtaaactgttcttcaatggcctgagcgaggttgaggacgaggtgctcctgatatacgtacttcgaaattatgacgtagacacttctactcagcctttctctacctgacctacctcgctttcccaaatgtgagatctgaaatatttctttactactcactgcactcttcactcatcgatgccatcatgcaaactagaactgaggttcactatttttgtatttttgtattcagtgatcagagaccttaaacgtcacgtcacaaagtttctgctcaatgagcacaaaacaccatttacggcatgcccacttcgttgagcaggcgagtttgaatcagagcttagattaaataatgcgcttgagtttccacatgctatacctaaggcccacaacacttaaatgagtgcttcagattcgcacttggttagcacaactttctgcttgaataggttacgttccagacttgcctaggctgtcatatgtcagtctggagccatggagcgtacctgagatgaaacatttggcaaaatgttcttcgatttttccgtactgaatatggacgcatggatatgtcgaattgtcatagccctcttcttaaatcatggacaccgaaatactcactttgcggtactctgcttgtggcttctcctgcagaataacagcaatcgggttttaggcgcctacagcgcgtagttgaaagcatggggccgtagtggatagctcagtagcaacgcaagagtctcaattaatgtacaagactattaaaatcagagcttttccggcttgtctcttgtttattcatcgacttggcataacgatagaagatgtaagtccctatgagttaagttgacgtattgtactgaagcagtagagtatattgagagcgactccccttatgccacgctttgactgttgctgagttgatttggggggaaatgtaaggcatgtatgtctccgggaatttgagtcggttgtagatatgacaggattgtacagaagcaagaggttcatagaatattagtatatcattaatcttctcatagtccgtttgatcattttaaaagtccatgcccataaggtaactgcgtggagtaagttagataatgttcactctagaaacgtaagtacaaacctttcatatatacgcatgaacttggcaacaaaagcctcgagatgaaatattactttctgttctgagtcagctttgacatcatcaacaactcaatggaacccttacactaccctgagtgattctgtgctcgtaaaaagcagaccacttgattacttcaggtttcagggtgtcgtcaatcttggcgatcaatttgaatgtcagtgtctagacatggttagtagattcgccgttttccataatcagctaacagaccttgaggatcgtcgtagccggtatacagtgggttaacagatcatataacctggcacggacttgtaacagtctagccggtgacctctccgcaagaatctcttccgcgatcaccgagataagagcttcccagtcaggtggtggaatgggtgtatcatccgatactttctcactacggagaaccttattagctccacagagcagagggagtcaagaagcatacctctgagcataaatagcctcgaacataagcagcgcacgacggagatttcgcccactctccttcgctatccgtttattaagctccggggcctcattccaaccttccctcttcgccgatgtgctcaaaatggtacagatatcttcttcactcggtgccgcaactctgaccaacagagttctcgagcggatcggagcaatgatgttagacgtgctatttgccaggaggatcagtcgcatattgggactgtacttctccattgtccgtcgaagggccgcttgcgcatctcgtgttagatggtccgcctcgttgatgaccacgaccttgaaccgctgtttcgcggacagatcgacttgttgcgtctgcgcaatttctttgagcagttcctggacaacaacgcgatcataggtgccgacatcggagggcgttatttcaagatggtagacagaagagacgatattaaattccagcttgcggttgcttgttgtttggaatactcggttgtcgattttgatcttttcgacgcccgggccgtagagttctttaagggtagctatcgtgcgggttttcttgccagcgccggatgggccgtacatgagaaggtgagggaagtcgccactttgggcctgaaaaagatattagagcttgagcttctttaaaatagctggtgatttccataccaaagaccttaatcgggcggagagctcatggtgatatgagagcgtgtcgagggatctcggacggtgcttgtcgactaagagagccatgttgtgtatagaactattatagctcggcaataatcgagcaattgagcttgtattgttgagtggagagctcttgtatccaaaagctcacgaaatcacgaaagttggagttgcagacgcgtcgtgacgcgagcttaattgatatttatgcatatgactaatgactctacataactagcataccacgatttatacaccacatggaaagatatgaacttgaggaatccacgttctagagttcaacattaacaagccgataattgtccctcactctgtctttaataaaagagggtttattttctctgtaccattaacattttcatcttgtctctccacaatcacgcacggttgcccgatcgacaatctcacgaagccaagaaccacgataagctataactactgtacacaacacagactggcctaaccctaatttctgcggtggcttatttcccagtcgcttgttatcaatgactggcaatcaataactcgccatcctgtggccgctgatgataacgccatgatgctgttgcttgctgacattcttgggccttgctcaagcgaaggcgcaagagccgattggtagaggatcactttcgcttggaacataatcagttccaatttgccgccattgccaatgatactacctctagtgatctgagccaatcagtaattagtgaattgaccaaaacgcactgttagactggccgaaagacggcggcgagttgtacacaaaggaagcatcagacatggttctgcagttcagatcgcagcatcattttggttcgccaacaatgggtccttgacttaaggaacgagaagactctctgacgctcagtctaggactttcgtctacgattgtctagagactatctgatataggtcacgagcgtactgaggacgctgtagaccagatcgcagtgggtccccagcctcctcaaaagcgtcaactctcaaattaacccacgatacagtcatctccacgtcttagcttcttcccctgaatcctttgtttcgatctttatttcatctcttggactccgtcattctcttcgctctccctccatctgttagattcttgtcggcattccagagcgccagcgattcgcccgcccgcattcctagccgccgtcaaccgccgtcctcctccactccgatttcagcttcatcgtgtcgaccgtcgatctcatggcctagaactatatatataccacttttccaacttttcgcctcgaagccgcttactgtacatctcatagtggtcgatgatactgcgggcagtgccatggatctctcccctcgttctggcatcagttccggcggtgaccgtcccccagcgtacaaagcgattggaatatcactagccgtcgcctctggcgtctttattggggtttcattcgtactgaaaaaagttggtctcctgcgggcgaatgtcaaatacaatgaggaagctggcgaaggatatggctacctcaagaatctgtggtggtggtcgggcatgacgctcatgatcattggcgagatctgcaattttgtggcatatgcttttgttgacgccatcctggtgacgcctctaggcgctctctcggtagtgatcacaacaattttgtccgccatctttctcaaggagcgcctgagtttcgtggggaaagtgggctgtttttcctgtattctgggctcagtagtcattgcgttgaatgcgcctgagcaggacgcggttgcggacattcaggatatgaagaagtatgttatagcgccggggtttctgtcgtacgccggagtcatcattgtgggcgtgcgccataacagctatatgggcagggcccgcgtacggcaagcggagcatgttcgtctacatcagcatctggagtctattggaagcttagtgtagaaccacttagggcttgggactgccttctagttaaataacg

SEQ ID NO: 5750 - DNA, 4170 bp, Emericella nidulans
tgtccagcatgatcgaggaagtcaacaacgcctcgtcgacgctcagcaaaacaaacaaggctgacgaaccggtaagaaagcctggcttgactgcttccttccggagccttatgaatcaatacttacttgagccatgtagatttcccaaattgttcgcatcctcaattcgcatctctctcagttgcagaccatcgatatgggcaccactgaactccagacaaaggtcgccgcggcgcagaaggctgggcagagcatgtcagcgcgcttcgggcatggactcagtatgtcaggggctggaagtgcaaatgctgcggatgacttttaccgttcttacatgggacgtcggtaaaagcttgggtctacatgagtctttcgttttctttaatcaagattattgagttttaggatgccgataggatggtacttattaggtaaatgatggacattgcaataggcccgtctttcacttacgtacttggcgtacctttggggcttactgtctattacagcttgttcaatacgtttcaatgcctacttacggaaggaatcaagtgaacaggtagtcttcgtaatcctgctttcaaacggagagcacataattacgagctattattgagctgagaagggttgtcaattaaggtacattgagccaaatacatcagcgctggatgatgcggatgatatgtgctgcgcgaaatggcgggatatccttcgccatgaagtaacatgtccgacgagcaccactttcagaatagctttaataaatcaagttcatttcttcccgttctgggtgaattggtcactggtagtggaatcacgttagctgaaagttccacccggcacgaaatcgcaggggaccaccaaggggtggaggaattaaagcatacagctttttgtctagctcattcaggtgctcacgttgctcttgaatcttcttcttcagagcctcaagcctatgaaattggattctgaggtcagtaagatgtccaagagcggtcaccggtcgttgcaggcactgcgaggtaggagtattacttttccttctctctttcgtacatgtagaggttctcctgagcggtttctcgcttctgccacacatcactgaattgcgagatcaagatgttagctgtctggcctgagaactgaatgggatggtgttgtctaaagcttggacgaggatatgacatcatccgatcaaagtgcatgaaaacgcagtgagatggagcaaggaacgtagtttgctcaagtctcagagtagtgagaagcaaaagcattctgtatacgcacctctgcgcagcaccgccaggccggggagcaccggtatcgccttcacccattcttggagcaattgcggagaaagggcgggtgaagatagcacgggatgtcgtggagagaggacgagtaatggattggcgaagcatagtgattgtagattgtggtactctgtagatggaagtgagaagttttgaaatcgttgatgtgagagaagataaatggatgaaaagagaggaagagggggtggtctgactggtgagcaacagtagtaccttatttgttgccttgaaaaaatggcagtggctgaggatatacttggcgttggctggacccagctgacgtcactaagtcatgtgattcaaaatgagtcagccgttcccagtgagatcatgtgatatttaatgatcagcctgaaataatgaattgtacaggggtgaatttagggaaagtctctagctctgcctgctgtggtcgtatgaagtctataagatatctacaaagttacccccacctcgtactttcaagagagttgatgaggcaggaaaggaagtacagtagctgcggaatcagaggcagaggagaccgcacaggaactgaagcttcggcggctgtacatagaactcgatggaagaacacccacgagccgaacaactatgcatcaccaactcacccatcgtaataaagctcttgcctatggtacctgtaagcgcgaaaccactagcagcgaggctcattcaataatgcgggaatcatctggcgattggcggaggagaaatagggatgacgccggagtggcccactgctgaaccacacacaccacactcaacagaaggggggagtagaatcacctcgttatagaggtagagggttgaatatacaatcaaacagatcaaaatagtcaaaaagattgataggacaaagtaatagtagacaagtagcgtgcctcgcaggttatcggcagagacaagtgggtggttaacggtgaggcagccagagccccccagcaaatggcaggaagaagactcccctcccacctctgagcaggtctccccctctcccaacttcgacttcctctcctccttttgcgatttcgctccgtcactatttcatttcccccttcacttttcaacctcctaccacttttaacactaaattccctcccacttctttccttcttcctaatcacaaactctctcaacaactgaatcctcttttgtcgttgccatcgcacaggtgagtgaaactcccctccgtttcctcccagtctccccctccctcgctcttacccttcgcctcaacgcacccatctgtgtattccacgcgttcatcgatagttttacttgctcccctctgctggtatctgtcgaatcgctccagctctctacaaatgtggtcttgggtcgaactgcatgcctggagttcaagccgcccccggctacgctggactctataaccgcgatgctgtttactcgctaccagccgagtggaggactggcggaacaacaagctgctcgacgtctatacggctaatagaatttgcgattcagccaacttttcgcgagatcgtcagttattctcttgacttgaaaacgtggtctgccgttgggttatggagtgtatcgtgctatcaaccgtgtgacagctgggccccctagtgcagggcagaccagggcagccttcactcacagcctcactttccatcaacccgtgatacttgcaccctaccccacgcatgtttcttacagtctaggccttgtcattccaattttttttttttgcacgagtttcgtttttggttttgtattttttttatatccccaagttgctgtgaatttcgcaacactcgagtccttgccaacgaatgtgcatacttggtgacagccgctaactttcgtctaatactggttagattatcaaaatgggtcacgaagatgctgtttacctggccaagctcgccgagcaggctgaacgctatgagggttcgttctccttgtttctaggtcgttgctggaactcgtggcctcgatattgacggagttccatctagaaatggttgagaacatgaaggttgtcgccgcctctgacgtagagctcactgtggaagagcggaatctgctttctgttgcctacaagaacgtcatcggcgcccgccgtgcgtcctggagaattgttacctccatcgaacaaaaagaggagtccaagggcaacgagtcccaagttgctctcattaaggagtaccgccagaagattgagggcgagctcgccaaaatctgccaggacatcctggacgttctcgaccagcacctgatcaagtccgctcagagcggcgagtccaaggtcttctaccacaagatgtatgtttctgtagttgttcatctatgccacccatcttaacatatctctacgccaacaggaagggtgactaccaccgttaccttgccgagttcgctgttggcgacaaccgcaaggctgcggccgacgcctccctggaggcctacaagtctgccaccgaagtcgctcagaccgaccttgcccctactcaccccatccgtctcggcttggcccttaacttctctgtcttctactacgagattctcaactctcccgaccaggcttgccacctcgccaagcttgctttcgacgatgctattgccggtatgtagcgcattaatgtcagatctaggcgctcgactaactttcgttgcagagcttgacaccctgagcgaagagagctacaaggactccactcttattatgcagcttctcagggataacctggttagttaaattcacgcgatgctcggaacagttcttctgacatgatttagactctctggacctcctctgaggccgaacccgctgcagagaatgcccccgccgaaaagaaggaggaag

SEQ ID NO: 5751 - DNA, 3483 bp, Emericella nidulans
tccctgcgatgcctcgagttcctgataaatgcgacgcccaaaccatttctccctcgccaatggcagcttagcagctgcttgagccatcgtctagccatgtcgcagacatggtcaccccaaaccactcattccccgagttctgaccttttctcaacccgacggttgtggagatgccgctgtaggcttcgcagagaggcagcttttcatgtcgttccggctacgagaaacgactcctctgcaatgacatatttttcggcctggcagtttcgactaccaagcgtgagttatgaggacagactgcaattattcactgatctacttgaagatctgatccgattcagagtccaacctgacaggcgactgcacaatgtcttagcgtccgaatcgctgtgcaacggctatcgctcctaatttcgcgaacttcatgccaattccttggcccaattcaacatcccgagcgttgcgtgatattctccgcttcactgatcaatatcgtcgctctaggaacagctcgcggctcccccgagcaaatcgagcagatcgactaaatcccaaggccgtagagtatttgatctcgaattgcagaaacacatcatcgtcattgccgtatattctaacaccaaatatccttatacgctggtatagtatcgaggagttcatatggtgcgggacgtttcgaggctcggggagccgcgtctgcctgtttaagcgggtattcgacaatcggggggtaagcttcggaacccggtcgtacgagtgcgaggacaaggacgaggacgaggacgaggtacagaggctcagaaaaggtatggtcgttcctgatttcctgggttcgtcaaaatatccgctggccaacgactctgagcgcgctcaacaccggcagcattggtccctgcacagcaagatgctgtgaaacaaatattactcacctccacccacaagagccctcagctcgtggcctgggggtaagttcagataaagaaagacacagtcaacgagcgacagctcgattccacggcgacgcttgaaccacgacacctcgctgtcgactgtgcccaggcgttgaatggcagaaacagtatgtcattgggtgagaaagtggtggacaaggtttactggcgaagaaagtagtttggttcgtcgaatgtctggtgggcttggggacacagcacaggtaacttggtcaatcctgtgacagcgcggtggcctgagctgtaacctggtcaatcatcacgcatcgcatacgaggtcacgtgtgcatgtgaccaggtgccgagcgccaagcccgaaatcgtcactaggacagaaaaacggctttcgccccgatccatccctgaccgggagtggacggggggggacagcatacggagtggcacgataattattctgataattactctgcataagagaaaagaataaatgtattggttctcagtcgtgttcaagacattattggctactgcaaggcttagacttgttagaacactccctggtcagacacgccaatattcctcactacttcgcactagtcggtagctagccattcgagccccgccgccacatgggagccagcattagtgagtgggcgaggatgctggagaacgctgcgactcgctcgataaccagcaagtttttgcgacacgattacgctccgagtcgttttctggcggcggtttgaaacctcccaagaatatcaggctgcattagcgagcgattcggcgcaagagatagtgaggggcatttgccagcgaattgactagagtacattgcctctcttgcctctcttcgaggcagagcatcccgagtcgagtacaatccggtcggctggaaaaaaagtacgatccaacctgattcatactttagcacgcgtaagtacgcatctcgatctggacgcagagtcgtgttcaatatgcggggtgattgagattcagcgtggcgaactctggagtctcgagtctggtgagtaagtgatgtgtcagttctgtcccgctcccacagccattcttgccgagccagcgcttggtgcaaccgagggatccgcgctggttggagattcggagcgacggctccaatagccaatgtagattcagaaaagactgacactcttggagatgcgaaaggaactgaagtacgggggtattgctttggcagaaggaaccgtaccacggtcgaggatctcaggcgggccgaacggcgactcagatccgctctgccagtgacaggtgggttcatatcttaatagaattcgatcttcgctcaatgcgtgcaggctgaagaaccagtctacttataattcgtacggatactgcagagcatagccctttctttgagacggaagtgccggaaactgcaggctgctgcagagctgctgcagtacgctcccgtgcgaggaactcgactcttcaaccacccactgtaaaggatcgacggacggcacagacagaagaaactgcattttccagccgtcttggaagcacactagagactgaaacccccagcacagttagcacaaaatagctttgtgctagctgggctgctagtgcgtactcccttccctaatggccgtcctgcataggctgactggattgcactggacttcttaattcttaaggcaagcctgcagcctcggccttgcattttctcgttttctcccgttctctcgcctcacctcagctccctacgggccgtttcgtcccaattatcgctccctccacattttcttagtaaagagaccggttttgatcgtcgtttcttttggtcttttgattttactattttgtcggtcgcaatggcggacacggagcacggcgagttcgagccccagcagctcattgagcccgatgttggtccccttttcgaactctgtctacaggcatcgacatttaacttctgaaacgcagaccttcgatgaccaggattccacctaccagagctcgtaagtcgaccgtcggccgtcggctgtctaccacccgcgctgccgacgttcgctaactatcgcaggctgggcgacgccagctacacaaccagcatcacgtccagtgccatgaactatacgtatgtcctgctctccattgacttatatcctcactgacccacccagatatgaggtaaattcgttaatctaccctgtccggcaataattgacatccctagaacggtcgccgatatcactcgtaccacgaaggagaatatgtcttggtacgcatcgcatcgcatcatctcgtggggaagttcaacctgtctaataaccaattagcccaacgatgagcaagagcaggaccgtcttgacctggttagtgcggcttcaacggacgtcactagttttggggcggccaaagattgaccacaacagagccaccacatctaccgtatgctcctaaagggcgagctgcaccgggcgcccgtcaagaacccagcgcgggtactggatatcggaacaggaacggggatttgggcgattgatttcgcagagtgagcgaccag

SEQ ID NO: 5752 - DNA, 8580 bp, Emericella nidulans
  unsure (1)..(8580): unsure at all n locations
catcccaattgacccagtagcatccactgcctggcctgccaccgctcaccggggatacgtcttcctggtcgccgtcagtgcctttacccctggcagcacagggaaacttcctactcgtcgcggcgaacagatgtctctccccgctttcttcgagtggcaccatgaacggcttcaggagcacgctcaggaagcttctggcgatctgtccaccgggcaaaccgcgcaaaatcccggtattcaccccagagggatacgcgtgcacaaacgacgtatttttgtatcgccgtgccatctcctccaagtagaaattggtcatgagcgaggcatggtggccgcactttaatgaggctgaaggtatcctttagactgagatccttatagtccagaagggcggaacccagtcccaagggacggacagagacgtgcgggtccagcacagagacgacacgcgagatgaagatccctggtcgacggccgttagctccaggccggtcagcttcagcttgaatcccaggcccaaaatcagactgaggaaaagacttgtccgcagcagattcaagaagcgggagtaaccggttgacgaagcgcatgcgcgcatagtaatgaagcgcaaatttccgatccagcccttcagtcgtctcatctctgcccctgagggtcaagtaaccgggcgtcatgaagacgatgttgacatatcttcccctagattctatctgcttacagatctgatccacgttcttcatcagcgaaatgtctgatagcaggaagatcgcctcagcggacggattcagcgctctgatcgagcgaaccgcgctctcagcggcttgtctgctctgtccgatcaagtagatcgtgggggagacggtgtggcgcgcgagggaaagggctgtggagagagatatgccggatgttccgccaccatgnccacgttttgcatgttagattcaataccacatggagcccaggaatttggatacctggactgtattctgagggtctggtaggtttggtttaccaaatacggcgacgagattcgccccaagggatttcagggacgcgttgtgggcgcgcactgctcggagagagaccatagtcgctgttggtttggagattagatcgagagattggcagatatattaatggtgcagtcactttaaaaaagaagacaatatggaggtagctatatagttcactcaatggctgatgtgatgtggctgacgagagccactgagagatagaatatgcaggattcacactcctgcttagacggtcgtccaataactaatgattcaaatataataataacagaaataaaacaagaataaatgaaaatagaaaatattctagataatgagctgagggctgcccgctcaggcgcgatccaacccacaaacctaaacactccctttctccaactcgcgatactggattaacggtgtcagcgtcagctactgcccacttctatgtgtgttgccgtagctgtgaccgacataccataggaagtgtggccgtcctctcatacggaggaggcgcctcagaatgcaagggcacagcttctaccggcaaatgagcctcgcccagctctctcctcgacttctttcgctcgtgccagtatgtccggcttaggatgtttctttttgatgcagacgcaggctctgtggtaacgggctctgtacctgcttctgcatctgtaaactgggatttatcccgctgctttgccttttcgtgctcgtcggcgtacttgacggcaatgaggattgcaccgatgaggaggagggatgccattggtgacttgacttgggcgagccgagacgtctaagaggttgaatagtagaaagacattgcgggggagttggaggttgttatattgactctggattaaaatattctttactcttgattgctccggggcgtccccggttatatgctttactgggattccctaagctgtcacaaatcacggcgcagtgaaggcgcagcacaaaggttccaaatatcaaaatcacctatactcacacaaatagtgcttgtatccaatccagacctacgctggctccagatcgcaacgcaatcctgtatgaggcagtgccaggcgggtcagcgtaagcgtaagcgtattcggctaagaagccccgaatacgctgcagggctgagcgaatgtatatagctggagggttcgcgaattgtttctagaaagatatcagattctcagcctccttgctgcatgctcagaggctagatttatcgagcgctagacttcaagctttttctagccgcccggcgtcatagtgccattgctacccaggtaccattgttatattgccagccagtagaactcagtaaattccgcgttctgcaggctcttgagacgggattttgtcatgttagccatgcaattgtcggacgattaagcttagcgcgcatgaacacatgactataagcatctccaaggtttttatcaatatcagagtgagatctttctcctaaagaaagcaaagatcaaactcattagtgtcatgatcaaggttaaaccaaagccggccagtaagacagcaagaagaaggcaggacacgcaaggcgagagaatccatttttgattagtggagagttcgccatgtcctaagattacacgcatcctcctaaaatgccagtctaacttctgatccgtaggcgtctatcctcttactctttctggtcagtaggcttcggcgcctccaaaggcttggtgagaccaacgcggtccatggtgctggtatatttgatacctccgtttatgcggtcctcagagacaacaaggtccttgcggttaccgtcaacgaggaggcggatgaggtcggggcgcatgtagtgcccgccctgcattattcattaatttccatttgtattcgtagtagggtgaagatttggaggcacgtacaaagtcagcaagggacttggtaaggtgaatttcgtcaagatcgatctggacttgttagcatgaaatgtctcagtgagagaagggtgaatcaggtttataggcgtacatccacgtagagaagaccctgaaagtctttggcagggtgaggaacgagattccggccgtccggggcaaatatccggccgtgtccgttgtagatgttgggatcctcgagcggcttgcctgggggcgtgttgagcttgatgccctcctcagtaatagtttgccatggggcaagggtgtaggtgccagtctcgatcgcgtaggcgggtgtgacaagctggggcaactcattagcaagcgcctgcaaaggtcaggcagcagcttgttggttggggggacacatacatcgcagttcgcctcggcgacattagtataggggtcagggtacttcagcgtctccttgccgggatacaacggccacgcggcaacgtgcacctgctcaccaagcgaggccgcgtagctcttcatgaacgggttcatgttctcccagcagttgaggtgtccgacccggccgatctcagtctggacaacagactcagtagtatcgccggtgccgtctccaaacacgagacgctcaacgtgcgtggcgcggatcttgcggcggtggttgaggatattcccagccggtgagatgagcacctgagtggtgtacaggctcgcgagatcgacctcggagtagccgagagacacgtagatcttgttggcccgcgcggcttctctgatacgtcgcatctcctccgagtcggagagaaggctgttctcgcgatactttttcaatagcgggagagattcctggtagttgactttccacatccaatagggataaccggggatccagagctcagggaaggcaatcagtttgcagcgattccggccggcctcgttgatccagtgaatggtccggcgaacggactcttcaaggtcgaaccagccgggttcagcgttgacggcggcggctttgtacttcttgaggactggggacattgtgagatgattgtagaaacagaacagattcttattgagataaggtgtctagctggataagttgaagacgaagcgaatgagggagtcagtaactggcagaacatcgaagacaatcatgccttcttatacttccagtcactataccatatcatatccttcaaaggccatccaagaggcacatggctcggcctttgcattcggcgtctggagaatggcgtgaggtgcccgggatctggagtatggggctttgatatcctgagcctctgtccgccagtttcactgcagaagccggtcctgtttatttacgccctagcagcgcttaattccgagccctcactgcctgcctaggttccgggccggtccgctgcgccaggcagagtgtcaaccgttgatcgctgagcacgtcagtcgggatttgctgacccgtccactccacagacggcaagcatgggatccagacacgagtttcagagctacaccgagactgagtgaccggaacactgctgttgacgctgtgcaatggtcttacatggcctgtccctacatttggctgtatcagaccccgggttgttatcttcaaacaccgggactcgtctgttggccagtcacagaaccgcagcgaatgcagaaaccattatgaaccgtccggactcggcgaattccagtcgtatacagattagacacgtaccttggttacgctgcaacccagtctcagtgctcgacgcccgtccatgttacgcagagggggttaatatgccctggagacccattggctcacgacattgagggagttggagttgacttcagaaagtcgattactgcattcgccctcaggaagacctgttactttactatcaatcggcagcgagggtttaactctgtcgtgacccttcgcaatatgggtgacacgggtccaacaagcccgcttttctcctttgacactatttctattgtctttctctgacatggacacctgcgagacgcagtgaagcataatgccgacaccctgaaacgtttttactccaagtatcttgtcggagtgtatatagttgtcctggcaggtaagcatgctttgcagcttgaaaacttgcttgaactgggtgatttctttatgatgcgatgtgctttgaagaccttccctgtaaaggagaaaagtaccgtctcaaatataaaccagaggtcccctgcgctccatgatgctctgatatcaagagagcactacactatagcgccgagatatacttcctcacatacgacaaccaagatccaaaggactagctaatctgactatatgtgcttctgattcttactcaatctctacgcctccgaccatcaccgttaccgatggctgccacacggctgaagcatttagtccacttgataccatcttttaggacctagcaccactgtgcaagcaccgcagagagtccttctttagaccctggtgtgaggaaatgtaagagacagatcaatggccttgctgtcgagtatccatgcagtggatcaatctaaaatacacaaaatggtaagttgcaagactcctaatggacattttctcatctcttccttccagtccaagttttaaaactcgcacagaaagtaccagattcttcttgacctcgaaggccattagactagtatgcactaagtgatggttctatattaggatgaagcagcacaagcgtcgcgcatattggtgatcaacgaggtgaataaatagaggaagtctgtcttaaggaaataacgcctaccagtatcgcatcgtccaagagttcaacatctttttgcctgcgggtcattaaagtaaacttttatattcgagcagtcttatggcctcatgcactgtattttgtttcaaataacgctaataatagcttttggtctctgagccttcagtctgggatctctatgtgactcatacttacgaaacagtcagtctctgggatacaaaatagaacatctaaccgggaattacaagcctcttaagcacagtctagggaagtctgaggaataaaaatagcacagccactgacaagggctagactctgaagggcaattcgacgattactcagtgctcacctcatcttgtctcactgcggctgagcttccgcccagaaggagaaactgtgcccaacgtgcacggctgagaactgctctcctcccagatattttctttcttttctttctagcacgagaatggataagctcaaatcatttacaaataggtggtcgacaaaaggtattatctatccgtttccatctcattcccctaaccaaacccacccttcccggtaaaaggactaataggctacagagaacgccagtgagcccactgatccaggtctaagacgaaaagaacaggtccgacgtgcacagcagtacgctctattctcatttcggtcttccttggtgtagctaaacacaagcagaacctaccggctccgcaaggaaagctacatcaagtctcttgagcgcgagatcctgcaccttcgcactgctaagtccgatttaacaggggaaaccagaaagcttagggcagaggtacggcggttgcgccaagtgattgagcagcatggtatagtccttccgtttacgccgccatctcttgattccgacatcacatccccaagacaggagaatagtccgcagggagcaatggcgacgctctgcatagatagagaccatctgaacaataaacgtctggctgtctttgacgacgctctgacttacgggacgagccctgggtcggttcaaactgcgactgaaggtgttcacctcccggacggttcctttacgggccagtcggaagttgtagcagccatgaatttcatcctcaggtatgtctggtctcctctccatcaaatatagtccagcaagtagtggttgagagttcagcctcgaggcgccctgtctagaccacgtccgcgccgcactaggcgccccctctgcgcaaagcgaaatgggccacggccatgccctaaccctaactgcttctgtctttcgcctttacagcgacacctcactcttaccagaggaggatgagctccttcatgtgtcgaagcagacattaagccgactgctagagctttctgtgcaggttaccacggccgaggagctcacgccgacccaggtgtgggcgttccttcaccaaagccctgcgtttgcagacccgaagacacgacaagagaagatcatgaatgttgcgcaggagttggcaaggtatatgaagtgtcatgggtaggattccatctgtgataatatgcacctttcttactaatgggaccaggtatggagcggttattccaagagatgtggttacgagggttgtctctcaggttatccctccacaagggtcatggcaggtgtgacttgggcaaagccatctaccttttcgaggcctttctagactcttattacatggtctcatgccgggagaaaggttctagaattgcaaaatcatccgacagcagtaccgcaaactgctgctgagcctggcttctgccctttcagatctccacgtataactcaaaaacattgataactttagccttgcaaataccatgctagcagatgcattcccttctgacaggcagtttgtgcaatgaaaggttatttatatggcggctgatatcatctacaaaagtagccagttttagcaattgtgatagtaacatctagttatagagaagagaaaactgttggcaaaccaacatgtacctgtcgttagctttggcttcagcatatatgattacttttgctggctctcgaaggataccaaataccggaactgctcacgggagattatcaataacggtatcgtttctgttcttctagaacgagtgcgaaggggacggcgacctgggaggtatctctttgcagcggaactcataagcttgagacttaagcaagagtcttcgacggcaggcacggggacgagcactggtaattgttcgttcaatagtgaattcatacgctgtcttttatggatctagatcgtattttttattttgtcgtagtcttgggctcctatttgttaattaggcgggagtgctcgacaaggctttatctgagctggattggttctcatccgcgttctttaattcttcattcctggtttgagggctttcattaggggagctgtagagccattgctgcgatagtgctgccggatgttcagatgatattggtatcctgccgaggaggcggcaatatttgaggctgtcgatgtagaacgctgaagaagatatcaaattcggaagaagtagcctgctgcctgcggctaacagggtttgagttcaggatataagcaaggtaacctttggtggctgtgttcttttagggcgtgaaaatgataggctgtttcctgctgggtcccatatgtaccatcccagttcgaaacctccgctatcaccaccatattgactttgatacgcagcgagtcgaacgcattgcggacgtcgtgggacgtatgagagacattctccagcgctgagcgcgtgaacagtgctctctgcctcgggatagaatgcatctcaaattcaacgacgccgatcctagtgacttacatgaaccagcagccaggcatactatatccttggctgtcttgccagtatggcaatatgcgaaaacaactacac

SEQ ID NO: 5753 - DNA, 10155 bp, Emericella nidulans
ttggagttgcagcctcttcatcagggcgaaaaaaaaggcgggaaaaacttgggttgcaagagagaggatagagtttaaagatagcgcacactcaagatgccaggcgcggaagtgatagaaaggggcctctcgtgctgtttgctatacaaactttggacaacgagaaaaagcttccggaagaagtcaaaccgagttccggagagatccaatcacgtgaccaactagacccattattcgggatgagacaacacctccaaagtcaaagcaaactatcgacactctcatcctttgaaccccccaaatccttacaatcgcaatgggtggaggcggaaagatcccgtatgttgtctataccattttccaaccttcgctatgttccgggcttaccgatttgcttttaggtaccccaaggaagtctggtctcccgccggaggctggtacgctcggcccgcgaactggaaggccaataccgctattatcggcgcggcgatgcttggaatagtcgctgcagtctggagcatcagtgcagaacgcgaataccgggacaggatgccagagccgggcaggttcttcccaagtcgatagtcagtcatccttgcaatgctgcccaccgagtcgggaactatcttatactaacacactttcaatatgcgcagctggagcaagcagattatcgaacacgagaggcaacaggccgccaaaaacgaatcataagaacgtgcgggaagactaagaaaaccgcagggaaagctatggtatggcaaggtctatgttctataattatgcgggctgtacgacaatagaaaggcgttatcaataggtcagttgatctgcaggtgattttgaggagattcttcgagtgtccgacaaaatttgtgggtgtaaaggcggactcgttccgtaaattcaataccgttccaaagttcctttccctcatgagatgtagactggcgaggcacgccaatctgttcgacgacgaaacttgcagcaacggtggcgagaattagagcgggtggaatgctgtgatactttccgcagcttgcgggtgctttttgccagtttgcggactccgcaagaatcgaactgataactctagtcgcatctctaccctcgctcaccatcccctgcgctagcgcgcctaagaaggagtttccagctcccgttggatcaacgacgggtgagcttcctgaggcagtcggctgatgataagcgggtaaccagagccttagacctcgagaataagcgtaactgccatccttccctgctcggataaccaagtacccttcaccccgagatccgatccctgaatcaagaatctggttcactgtttccttgccttcagcgcttccttcattccagcacgggtgtccgaacatcatgcctagctctaagtcattagggcttacaacgtcaacctcacggcacgcctccaagaacttcagctgttcctcaggcgtgcacatatctggtacaggttcccagacaaagattggcctctcgttggacccaccggccagggcctcccgacgttgaagaatgtgccgcactatggatacgcaacgagacgaggaacaaaccatatgaaacgtttttgacagcacttgggagtccgaaagcatgtatggctctagtcgtagctttggggtcaagtatttaaaggctatcttcattaatttgccggtagcacatcgcggagcatctgggcactcaccccgtttctcattcggtccgtaaccattccatgccctggtggtgagtcttccggggtccctcctgatcacgcagttcgtatcccatgccgtaattacatccaggacttctggtggaaagtctgagccaacgtcgacaatccaactgaccgacctggagtactctttccccgctgccagacgggcgccgatgaccgcaaacgaagccgcaccaccaagaacatttttgacgctgggtcgggaaccctcgaagtcgatatcatctgttattgtacccgattggaggtaagcgattgtgctgtagttatccagcagctaggtgcgcgtaccgagaataaacatgcccagagtacaaaactcgactctggacatttttccctctcccgcaatgctactttctcgggacatgttgagtcaagcagcgttcaatcactgattaaacgtagcggaagctagcttttggcgatgttttatcttcgactcttatcgcgaaacatgcaggaacataattactgtatgatacatacaacgtcatcggagctggcgtctggcctaattaatctagtgtataatgagtaatgtacggtaagacccactgcggcctcagcagaggctcaggagtagtgtatccccgttgtcagttgatcatcgacaccgtagcaacaattgttcttactccttcaccatttgcccttccttctgaagacactgctccctatctgctattcggccgggcaccgagataattgactcacgtctcgatccggtctaataggcctactttttatttatttcagcccctagctccgttgcccgcagcctctgctgcccagaaagccgacaagatggcggcaaccagccatatgcataacttgacgaccctcatcaagcggtacgaccttgcttcgaccttctatttctcatatattcctgcaaacagcaatgtcttcaattcgaacccttcatcttcccaagactaatgacatgcatatatgtacagactagaagccgcgacttcccgcctggaggacatggcgatgtcgttagatgaacacgatgcccagaagaagaccgctgacaactcggccgcgctggagccgcaagcctctgagcgacctacaccaaccgcccctgccgcccccgcagctgctcctcttccaccccagatcgaagacttcgatacattgattagcaaggacgttgggaatttcgtgcaactgggacagaagattggaggtctcgtcgcagagcaggtatgatgccaggtgtcataatagttgctgaatgccttgctcatttgtttttaagtccaacgctgtccttgaagccttcaaggcggagcgcacttacctctatgtctcgaccaaggcgaagaagccagaaatccagcctccggagcttatgaccggactccacacggcatccgatgccatcaacaatcttcgggagtctaacagggcatcgcctcttattgaccatctgagtgccgttgccgaaggtatcgttgccctgggctggttttttgatcccaaacctgccgatttcgtcagcgagatgctcggaggtattcagtactacggtaacaaggtgctgaaggaatacaaagagaagtatgcgttttgcaccggaggtcatgttgcaccgtggtttactgacagacttgcagggatcgtacccattatgactacatccaagcgtactaccaaatcttcaaatctctttcatcctaccttcgcaagcattacccaaagggcctgacatggaatgacaaggatggaatagatgcacaggaggcactcagacaggtcaaaaacagctccgactctgctgctggcggtgcaggaactccccctccgcctcctccagtgccgactttgaatatacctggtggtggcgcgccaccaccaccaccaccccctcctcctccccccatgatctccgaacagcagagttctggcgcctcatctgatatgtcggctgtgttcgctcagctgaaccagggagacgctgtcacacaaggcctgcgcaaggttgacaagtcccagatgacgcacaaaaacccaagcctccgagctagctctaccgttcctggaagccctagctctagttcccgctccaagtctccagcccctagcaaaaaaccaaagccagagagcatgcgtagccggaaaccgccccgcaaggatctcgaaggcaccaagtggttcatcgagaacttcgataaccccggagacattgtcgaaatccccgccaagcagaaccaatcaatcctcatttctcgatgcaacaagactatcatcaaagtgtccagcaaggccaatgcgattgccatcgataattgccatggcttgtccattatcgtcgactcgctcgttagcagccttgatgttgtcaagtgctccaagttcgctcttcaaattgacggcgttgctcctacactgcttatggaccaggtcgatggcgcaactgtttatctgtcgtcccagagcctaggtacggagctcttctctagcaaatgcaccgctgtcaatgtgatgcttcctccaaaggaaggcaccgatgaagatacaaaggaatgtccggtcccggagcagataaagacctccgtcaaggatggtgttcttgtcagcgaaattgtcgagcatgcgggctgaaaacacaggcgttaactttgggcctgtcctatgaaatatcatgtatctagaaaaggtagggattgagagtttgctcggcgccttgatattgactcccgcaatcttcgagcaatcgttctccattgtagatagatggccatagtatacacaatcttactactctaaaagaccatcggtaatttagtatcgtctattctttgagctaaattggaagcaccatgctatgcaaatatacataaacgtaagaagaaataataaccattatacagcgggtatcatgcttgcaagctcgatctctttttgcttcagactgtctgttttcatgcggtctcccccaccatcctttggattcggctaagcaacaccttactctccctccccaaccttctcttcccattctgatccggtcgctttgctcgagccatcgcctctctatccttggctctaagctctcgcagctccctcttcttctcagccgcttgcctcctcttctctgcaatctccagttcttttgcgaacgcaccccgctttggtttttggattcttcgatctcctggtttcctatccgcctgctcaggttccgcatcgcgagtattcagcatagcctggcgctccgggtggagctccaggcttgccgggggctccgtagtctgctcgttgtttccctcatgtccttcttgttcacgttgaagatagttcggcttcggttggggcgcagcgagctcggcggcttttatttttgcataggccttcttgaccttagctttctgaatgaggtcggctttgattttttgagctaacgtagaaagtcagcatctctatgctagtatgaggcaacgagtaatagttgaggataagtacttttacgacgataagttccgtcaggcaggtttgcagggccgacggagaaacctttgcgcttcttattggcttggccgtctgtttgcggatttttgctaggggacgtgccatcgacagatcgttttgatgtcattttgacaagatcctccgacactttttaaacgagtgttcagtttgtttaatgggtgttggtataatgtgctagacctggggaaaatcttcatcgataagaaaagtcgcgaccggctatcagtgatgctccaattgccaccatttctaattcggactagtgcatattcctagtcttgtcaactgggagcttggtcttaaaacatccatgtttgggcacgggcataatgagagtctttgcacctgaatccttcaaatcatggcacatttaatacgggaacatactcacaacgacccgaatcattgtcggtggcttgaggacatcgcaacaagttaccgcgtttgaggatcttacaggacttgcggtcagaatgaccgtattcttcggacgccgaacgtttcaaccgaaacgaaatcgtgtttgcaaaggcgacatggtctatgctattttaaagtgtgaaattcgtcgtgataaggactaaccaactggctgttaactatttgacgacccctgcactctgaaacctgccctagttcatggatgcgcttgtcaaggtacttcggacagtcaactgaccagcacatcggtcctgcctcctatcttctgaggggtagaggtatttggttcccagtcatggtcttaaccccaaaggtgggcaccatcttacagcagtaggatgaagagccaacgtttattgtcgcccgcgataagcgtactatatccaccatactagggggcctcgctcctcgccaacaagaaaatagagttctcaccgacggtaaaagcatcaaggacatatcaacctactaggttgtacgatagccaagtaggactaaaatgacaaaatagtactcaaactatgacgctatctgcaccgtttctggccggactagcacccatcctacagcgggaacgtgagggatgcgagtggggaaggcaatgactctgatggccaaagccgctttgctccgcccatttaatgttcatgcctcacctctctttgttccaggtagatgagaagtcttcagtctctcgacacttcctcagtgctacgtctgggtcccctcaccgttagagtcttatactgtcgttattcttccgcagttgaccttcttttctccgtctttatctacgccagtcctcgccgccaccgccgagtacatcctcccgacctccgtgtatagcggatcactccactcaccccatcgcctcatcagacaacatttcctgcctcactcagtctcaggctctcccgctgcgatggtggttctctttatgagactctcctgcctcctcattccccgctgacaatgcccatctttcaagattccgaaagccggcagttctacgacctctggtctgatgacccgcgaatgactcaggacgactctcacctcaaacccagctggccggattcccatgatgtttacgcaggatcatcagatcagaggaccagcgtcttctacggacgtcatccaagaagccccagcccgacgagactgaatgcgcatgatcgagaggaattgatacattatataaaagctgcggaaactacaaaatggtcgcagtattgctcggtcagttcacccgcaagacttttgaacttactctgtgcttcctattctctgtctagcgagcccgcgtgtttctcgatggttcatgctaacgtcagttcttgtatagttaggagaccgggttggtcaccacgtgcttcattctcacgaggttccggtgacgagggaacagagtaccggaaacagcctatatcaagatttccgggaccacgattcggagcttgcgtcaccagcggaaatagagcgtcctcgttcggccctccactccggcgactttcgggagggaacgcctcaactagagcggcagcagcattcaccgcaatcaccaatacctgaccggggcattaacaatgggctacccttcttctcctcgtctcctacatctccgtggttcgccgctccctcctttccgccgcgcacccaaacggccccgctacaagcactcgaagcgagagtaaccgaggcgaatcgtacacctgcgccgtcgcttgcgccgttctcatccagctatgtcctgaaggcgccgacaagccctctagtccatcaggcgaataacacagacttggacttctctactcggacagattccaataatcgactaaccttgtttgacaagacgaaccgtcggcggacccttccgccggactcattcagagacctgcagacagactctgcagattccggggcgaattgtccgatacgctgggactccttgtccagcaactcacagtgctctcgtcggtctttggcttcctcgtacagccttcagcttgcctcatcagttcagggccattatacgaagtctcggaggccgtcgatatcggccgagttgatttccaggactcatgccccgatggttgggtcgtatgaggagtctatcctccgtgggaggatgtcaacttgcccgtccaaacccctggatttcaccgcacaaattggtgttttgggcaagggcaagaccaagggaagcctcaaatgtcctccgcacgttacggttcggttccctgcggtcttctacagctaccctacgtctggaaatgggcgcacgatctctgatgatagtcccagcccttatgtgggaatgatcgaccttgagaactcgctgccgaaggatacttcgtgccacagtcggcgccgtaggcgccatcaagatccagtcgagatttcaagctctcacaataatgacgaatcgatgcggaccaagcacaatgatcgggaagctatacgccgaagagataagaggcacagaagggcagagtccccgaaagctcctgcaggtggttgctatcggatcccgcagcagggccaattgcaggtcatgatcaagaacccgaacaagactgccgttaagctattccttgttccgtacgatttgagcgatatggaacccgggacaaagacattcatccgacaaaggagttactcggctggtccgattatagacatgccattgtctgctcgatcaaattacggtactgatcgtcctgaggcatcgttgacgaactccgacgacccgaatgaaaaaccggtcttgcgatatttaatccatctcaatatttgttgcccatcaagaggccgttactatcttcactctagcatccgtgttgtattcgctaaccgggtgcccgatggcaaagagaagcttcgaaatgagattcagcaccccgaaccacgttattcaccatacaaaccgtctcgtgagcctacctcgctacgcgtaagtacaaaattcagcgcagacaaaggtgaacagagaccgtcacctcggcccccaagctatcgtgcaactgatgattgcccacctcacccgttccggcctatcccctcgatccgcgctgatgtcgtcggactcgagaatctggtcccagctcaaacatcctctcctggaccggagctttacaataaacttggcagaggggatgcagaatatggcgggtatcaagtaggatccattgcgagccctgaaggcgaaagcctgctagccaggaagcttcgagggctcgatgttcaaaagtcagactcttcttgagaggcatctatcgtaaagaaatcatcagaccagcttgcctcctgatcgaaagcctccctccggagttaacccggtaaatctcggcctgtcgctgctgcttaacttcgcttggacagaactgtaacaaaacaactatttattgttgagccagactaacatatgatccaaaggttcgctatgcgggtcgcacaacgcaacatgttctcctcagtttagtgcctatatggcacagtcgagattgaatcaggcatttattactgtctgtactcgttcttggagccgtctcactcgtgttgtaagggtttcggattattcaattcctgatagttacacatcactgtttcgttgtttcaataggtagtcggcctatgaagtacatatatattggataggtacaaccattagagcagtgcttaagggataaattttgcacccgttacgttgaataatatgacttatggatatcatatagcctaaactgctggggaatcaagacttacgcggcgccgcttttctgcgaagttccacttctgggcttcctaaagcaggcaaactcacccttcgtccgttctctcagacgcttcaggatacccctcatttcacctaactcagactggagacgcgcccttgcctcatgtgtagtcctctgatccaactccacataaatctggctctgaacagccgaggcttcctcggacgaatactgagacatcgtctgcgcgatgaactcagtgtcgagagtagcttggatcaacgcgttaagggaatacgaagcccgtaggttgaaggcgttcacaagggcagtgcaaacttgtgtcaagagatgtgttaggacgattgtgaggaggggcgattggccggaagctgatgaagcggcagaccggcttgaagtggaagatgatgttgaggggatggttgttgagatttcggtgtgaacgaggacgagagcgagcaatgcgttgtacacgtatggccggacttgttcggggcgggatgttgtaggttcccaggttggcgatgtgacgccttcggtgattatggtctttaggttggtgattgttggttccgtgtatgatcggaatagccgctgctcgacctcgtcgagaacttgcctgatgagcttggcttcgtcggttaacgttactgagaacgaggcttcgaagttggcgataagttggggaactaggtccatttggaa

SEQ ID NO: 5754 - DNA, 2676 bp, Emericella nidulans
  unsure (1)..(2676): unsure at all n locations
agtagagaaaaaagatatataaagtggaaagaacagagagatgtggagagtaaaacaaagaaaacacgagtatgagtaagattagttatgaggaggatagagataaacaccattagggcataaagtggagcgcgagaaatgaaggttgtaaacaaaaagacctcggcggtggaaggaagacttgtcaaaaaagaacagtattagaagtatagattttggggaagaaagcagtccgggggggacccttccggggcagctctttatagcgtggcaagctaagggcagaatcgtaggctttaccacaatgaagggcaagttttgaatccttacgaagggccagttagaggccaagggcgaaaaacgcactgttgccaccggacgttattccagtcgttgttagccccctggaggcccagatacttgaaaatcaatggccagtagccctgtttaaataaaatggactgcccgtacaaggccccggccggccggcgcccctctggacggctcgagaaggcccaagatacctttcgaagcatctacaatgattttcttcgcttgttgagcttctcagcaagactcgaagagccggtcgacgaactggagatggtgcagatcgttgaacaggtaatggcacgcaaacagcaggtgcagacggatctcgacgcctggtcgctcgagttcgaccatttcctcgcccacatcttccattggggcaaccaggcgtcgcagcaatcggtccgaatgctccagctctggcgcaccatgctgaccatggtgctgcacatggggtggcctccccaagacactgcttgggggagtcgcataaaataactcacgctcactcttgatccaagcgcccatattctcaggatctatgaacctctggaactagacatgtacatcggagcgcccttcagggtccatggaggcctcgtcgcgcccagcatgcccgctttcaggtttcggcatttcgcataccgttcacgtgctggatcgcgctcgcgatgacgctccaacgccaactgcgacgggtgcaacgacagctgcatatcgagtcagtgggggacctgacctgcaagacaactacatccgaagacgttacggtccatgacactcatcagcctcacgatttaccttggccctcgggatcctcccagccctttggacaatcggaacccaatgccgcgactctagcggacgctacacgccctatagacctgatcggacgcagcaagcgccgcgaaggcgtctgggactcagacctgcactttcgtttggcactgcagcttgctcgccatgaagagcaagcggcggggctggacgccggcgcggagtacacccacgcacgtatcccgcctgaggcgcgggtgacgctaaatggaagattcgatgagggacggaaggctaagattagctatattcgagagaatgttagggtcggggaggagatttttcactggtaacttagtacaagaacaaaagaataataggattttttgtgctctcccgcaggagtgagaaataaaaaaggggtccttgcgctgagcctcggttcggagtggtcggtaccgcaggctatcacaacactgtaatcctcaaaatgtagttaagccccaatactactgcgagggaaatatagattaatgtttactgttacaggcgacccgctatttcacccggcagatcaggccatcggtcagatcatgaccactggtccagttgggagtatgattgctttggcacgtgctcttagtagactggttaaatcttacttgcgaacgcgccaagacatagtttgattgtacttatcagcgcataccacgttttagggtacagcaggctccttaagattgttatgggatgctcccataacacgcaccgcgtagcgtacgcggctgtggtcacgtggctccacatccattcccaatctctgatctgtcctgtcccgctttctcttcttcagcgattccttcatgtacatacggcacgcttagataggaagatccgtctatatacgtcccttaacaaagatctatataacctgccaatttagattcttaggttatatggtcatttcagttacatgtcaattctaaactttcagttcctgtgcttttatatattttcggacttaggcctgatcgcaaggtaaaaatatttaaaaagagagaccgcagctgtccacttgcttccttgcatgcggccagtacctaatgttaccaaacatcacttcgtcataattatctacggaaatttgggcagttcctcttcagcctggcgctggagtctgccggccgactgatcagcangtcttctaccataacgcccagattaacatactatacgaactttaccctctgacttcaccgcagtcacgtgtgatccactaaatgtggaaagggatggacgattgtcattattggatggccaacgtggccgcctatctatacctagcttactaaatgatgactaagcgagctcgacccctaggggcaggcggtgcataggacagtatgccccgacatctgtcggcgatactgtcctatggcatcgcctgcccccatctcacgacgaggggaaaacagcaccctttactgctctaataactaatctcttacacttggctcattgctcatcccctcctccccatggaggtggatatctccccccaggcgg

SEQ ID NO: 5755 - DNA, 8276 bp, Emericella nidulans
gcaggaagtagtaggttttgccggcgcttgaggcaacgggcaacccagcacaaaatgaggtgagctcttgtgttccttctcggatacaagaataagatgagcgaaatgtgatgagaaacaagagcgcttgtggtaatcgaagtaaagcattgccttgagagcactctttctaccttggaccgagtttggcgagcgcgcgtgctccttgttcctcccactcttgcttggtaacccacatgtcttccttgtctgcgatctgtttcatgatacggtaagtaaagggatgagctcggcagtagaaagggaaccatgaacgtaccagattggcgagcacagctcctcctaaaaataccatgtgcctccgtcggggtgggtcctcgatgcggactttgaatttctgttgtgtcgagtcagcacgagcttagatgactgagcagttagtgtgatagatgacgtacgctcagccgttctggatcgcctttgagtactcgtgtcaaccacagctgcttcaattccttctccagccgtgtcggtagaccagggtacatgctgctccctccgctgagcacgatggctttatatagactagagcggacgtcgacatcggtgccttggatggtgttgaaaagcaactcagccataccaggctggtcaacatccaccaggtgcggctggaaaagacattcaggggcttcaaaccgctcgctaccgactcggatgacacggccgtctgggagagtgtaggattcaactaatacagtggtctcctcggagagtttcctatcgagttcgaggtcgcaggacacataggcgagcttctccttcatctggcgcacggtctcgaagtcggctgtacggttcagcgcataaccgcggcggagtagcagcgcgatgaggttccgagtgacatcacgacctgcgacgtccagtcggcggatgtggtgatttagaacggtagattcataaacaggaatgatgtggtgacaccgtcaccagagtccacgacaactccgctgctgagacctagagtccgccagatcagcaactgagtaattttcggttgcctctgcactgaccttgagcatatagtgcaaggaccgcttggatagcaacatatactccgccgaagttatagtgttccagcatgatctccgccatctgttcgcggttcttcagcgggttcataggcggctcagtgaggaggatcttgcggccggtaggatctatcttcatcttatcgtagaaagtgtagttccatagatgttgcatgtcatcccatttcttgacgataccattttccatctacatagcggtcataggaatcagccccagagtgtaaacacactaccattgggaatctggggagcggaactcgcgagcattccatggcgaggtgtagaacgagcgggatgtggacatacagggtagctgatctggagcatcgatctggcggcagcggcttcatctccgcacatgatatccttgacaacaatatcgccagcctgttcctccgttcgcaagatgggccgccccactatcgaagggaactggtgctcggggaagttctgtaaaataagagtaaagtcattacggagccctagactgagaagagaaactcgaggacttgacagacgtacctgcgcagcatatccgactttgaggaaacccgttcctccgtcgagcactgcgagctgttagtgacgctgcttgggacaggcatacatagcagtagaaacaggggtcagagcttaccaatgggcatgttcgccatgatgaatataggaactgctaagttgaagatatgtcaatcaattcgagagagagagacaaaagagatcatgaatatgaggtccagccgtggggagagctggtgattatgagggggagggagagcaagttggcggtgccgctgcttgctgctgactgacgacgtttatgccttgttgcctcaggcactattaaccaggcagccccaacctcattagtttacgttttcgttctggaagacaaattttgctctcgaagttgaagggattaagagctaaattgagatttacgttaaagtgatcggactggacatctggttctgtttctcgaccgagaccggagccgcttatcgataccatataagtccgagctatttaaccaaggtacaaagtatatctccaacagcacttcttcgcgtgactttacactgcacctgaactcattctcttataccatagagcacaatgagtcgaatcggctgggtaagtaattactggaaaagagcatagcccatattaacccctataacagtatggcctcggctcaatgggcctcgcaatggccacaaacctccaaaaacacctagctaccaagagcacgctgaacagcctcctctattccaatcggacaatgtcccgcggcgaatccctcaaggcactaggcgccaagccggagacgaacttctccaagcttgtctcgcaatgcggcattatcttcactatggtatctcctatccaactactctgttctttttttcttgtataccatgcggatagactaacaaagacaaggtttccaatgatgacgtcctgcgaagtctcatctccagcgtcacagaagacccaacccagtctctcaaggataagatcttcgttgactgctcgaccgtccacccgcagacagtgggccttacagtcgcaaagttgaaggagaagcaagccgatttcctagcagctcctgtattcggcggtaaccctatcgccgtagatggaaagctagtatttgccattgcaggcccgaaacgtgcttctgacattgttaagccgctgattcaggatataatggggcggaaggtgatcgactgtggagaggatgctacgaagtcttccatgctgaagatagcggggtgagtataccttcgccatttagataccaaatagatgcgaaatccactcgctaaccgcgttgcgcgccctgggcttaatagcaacataataactatcaaccttatggaggctgtcggcgaggcccaggtctttgctgagcgtacaggtctcggatcagatgttatggagaaactcatcggggaggcttttggtccggttgctggagggtattcgaagcggtacagcctctacctgactcctaatattacggcatagagctattgtactgtactgacgctttacccagtctcactaccggagcctacgcaccaccactcgactcccgtcctggatttggcgtctccctcgccattaaagatgcgaagcatgcatttgatatcgcgaaggagaacaatgtcaaacttcctggcttggaggtcgctacgaagaatatggtttctgctcgtgaatacgccggccaatgtctagacagtagttctatgtatggcgtcttgcggcagaaggcagggatggagttttggaacgaaaaaagtaggaaaggttgaatgttgtacaattaaggactttgtgcgctgcatagacgactatatatatgggacattttaagtgttagaacattcgcattcacagagcatacagttgtgattcttgaattatgtctgatgtgttatgggtatggtcttcatcccttgtattatcctatccagtaccatttataagccccgtggaatctttgaccaatgtttcaacgccgcaaaaaaggatgcccgtcacctccgctttgcacagtatattaaatccattcaagccagctgtcatgttgaccaggatccgaatatgaaaaatcagatccatgacaaaacgttgccgcttatattttgtaaagtgtagatacagttgaaggaagacaagctaattatgcaggctttatcttggtagtttcgaccagttgcggaaatgcctccgcgaacgctggtccaagagtccagttattaatatccgcaaagtgtctctcaaaaactgggttgatgatcagttcgtcagtttcgccagtggagagaagacagtccgtgggctcataaggccaattaacagagagagttcttgtaaagggaatgaaccagttatcaaatgggtactcatggtatgacatgacaagccgatcacgcatccgtggccagggaagataatcgatccatgcaggatgcggcgtgagcagttgcgatggacgaggagtcagccagtccggtagccggtgatagttttcagctgtcggatatatttgccaccgcatgaggaggaacatggaataaagtacagcaacttgttcggggagtgaggagatatctggaaatgtacggaggatatccgtgaatactttcgagagaggatgagagtagacactcttctctgggttgagcaaggaggagacgctcggataggctggcccaacgagtttctgcttcggaaccccttttgcggcctccctttgccggttgtggaggaaatcgagcagaatcgcatctaaagtacaggttggcgcgatattccggactggagtcatgtaggctggcagtggctggtctgtcacggtgccaactggtggaagaggagtactgtaagccgacgaaatgctcgattgagatctagtaacctctgaaggacgccgaaagccttccatcttgggtacttgttgcgaaggttcaagtaagaagccgaaacccattctttcgtcacccccgaaatcgagaccatgaagcaagttgtgtcgttggtaatcgaatgcgagccgcaaagacgcattattccccgctgcactgtcgcgccgggagcccagtgtcggcgccgaatgagttgacgaaggtgtctctacgcttgcgacggactcggtataggagcgatctactgtcgcagacctgtgaggatttggcggcaaagtatggacctctagaggtggagatgctgagggtataagtggcacagtcggcctagccgtggtaggagctgttaccggaggcactaaagcgtgacgttagttattggtattaaaagcccaagaactccaaagaaagcaaagcagacacaatcaactcacttattgaatcctgctttcctagcagtggttgaatagtgtctacgattgctctcagccctcgccgaagctccctattctcggcaagaatagcttcattttgcttcagcgcagcctgaagatctaggaaaggtttttgcgaagaaagctcgcgaacccgttgctccagattttcaatatgtgtcttcgttctctctctgattgcccgttgagcttggcgatcgtttgcccgcttcttagcaagctggtcgggcgtgaggttagcaaccccgcgggcggaggtactgttgagcttgcgttttcggcccgcggcggcatttcccaccgggctggggctattgttggaattaccgacagcagggttggagcatagagcatcagctgaggtcgatgttaccgcaacgggagtaggagagtcctccagcttcacgggtcctgagtcattcgcagctgtcgcattggtggtcggggggcgttggatgacaggcagcgaggaagacgagagttctagagccgacgagggcgccacatcagaaaggggaggcaggcgggtggccattgcctactcgcggcaagatatcgaattgtaattgccattcaagtttgcagcacgagggtaaggaagaggctgagggtggacgcggatggcccacgggcgggatctccttgatcagcggaagaagcttagcggcattggggagcttgattcaaaatagaagatcaagagacaatgacgagcaagatcaggaaagactcaggtcgagatgatatgagagcattaaaataagagctcggattgatgatggcctattgcttgcaacagaaaaggatgacgaattggcgataggtaccggcccggaggggtgggcaagataatgtggtccttgccccggcttggacgtctcaattcatatgtaatatgcaaccaaccgattgagtccaatttcgtctagactgcagtcctggataggtatattccagattatgtcctagaggaaaactgccatgactactaggtggtgctatcattgtgttttaaaatgcaatctagtataccaaagacaccatacttcacataaaaaccccaagaactccaagcatagattatttattttcgcttgcgagtacaaaaagtacgaaacatttggggctcaatcaatcctgggtcatggcagtgggctgatatgccaattcgtctctcagaaaaaaaaaaaaaaaataagaaacaaaatagtcgccaaaaccaatcagagcccgaatgaatagacaatatcgctgtgtcatgtacaaggggaatcatctccatcgtatctttatgttgtatcattccataatgcccaaccaaaggccgagaagagaaagaatagacaatctagggtctaatcattgaatcatatggcccatattagaaatctgtgtccaagaagtcagagtcagctcagtcttcaatgtttcaacaggtagctagccgttcaagatatatgtaaacttgcctttgttcgtaaatagccttcgacttccgagctcttaatgcccatcttaccgccagtctgccacgccaaaggcaccatcggaacacgatccttaacaattacctcacgcccaggtccttcaattgctctaactttatcgggattgtttgtaagtaggcgaatcccgtgcggattcgcatctttgcccaaacccagatcaacaagcatcgctgtagcgagtccatagcttcgagcatcggcgggatgtcgcagcaaaaggttggcttcaacagtatcagagcccaaatcttgaaggttgtacgctttcagtttctcccccaaacctatacctcggccttcttgacgaaggtagataatgacaccaccagatacatttgacggcacagatcgagactgctgggaagctatctcgttcagtgtttccatgggcagcgacattagcctagctgcctcgtcgagctgctctccacaatcacaccgagccgaccaagctgtctcccccgtatagcactcggaatggatccgtactagtggggcttcgttcagtcgttcctgcatagattctgtattgtgcacagcacccccctcagatccttcaattgacctatctgtagcactcccctgagtcgaatcatgccaactgctcacgcgtccaggatgcagtttgccaatataagctccacgaatcattcgatccatttccgtttctcctggtttcaccctgtcaagacttcggctccgaatggtgttcccaaacacaatagcaagatgttctttgttgtctatgtcattatggtacaggtgtagaaacatctcagcgccggtcgttgtgggaatgcgggcgcggacaatgcactccacgttggggaggcgagggaggagctttggaggttttgcatgggagacaggttgtggcgagatttgttgaagtaaccgttctgtgttcaatgtgccgcccggtgtggctgggggtgtgaatgaaggagaaagaagcgaagcaggcacaccaggtgtcaaatcgccgggcgtgctacccatggcaccgacttcgggaaggtttcccaacgtgaattcattcggttgaacactcgtagacgatgtttgctgttctgatgtgagtgatatgtcgtcgactggcggtgcgatcgaggctgactgcgcgccaaaatttggagaggcatgagacggtaaattcgccatcgtgatgtgaggattctagagcgatatacaaccgaattccaccaacgctggatcagtgcgcatatcaagcctagttccagtaattgaataaagggagatcgggctcggacagcaatagaatgcagccgacttaacttgcattgacttgcaaatggttttgttatcaggcaagctgtcgtcggaccgaatggtggatttagagccgcgggatgtacggcgggatcgggcggggagcgctgagtcagcactggatgacaacagcttaacgtggttggtaagcgagctgcgcatgtaagcgagctgcgcacccaaccacttttttacatgctgacgcggtcatctatcttccaacagccaccatgccccgagttcgcgttagttcaagccaaaattgccatgagaaggaaggtcggctcctactggctgtacaggctattaaaaaaaaggagattacatcaatacgcgaggcagcacgtcgcttcaatgtgcctgaatctacactacgtacgcgactacgcgggactacaaatcgcgccgaatctcgcgcaaatggccataaattgactgagattgaagaggaagtgcttaagcagtgga

SEQ ID NO: 5756 - DNA, 6444 bp, Emericella nidulans
ccacctacccacgatatcagctgttcagtccccctacccgatggactgtatttcccagaactctaacatatatacaaagggatcttccagcccattccctcctggaacctatctctccagacattactataatctacacagcaggccttactattattaatgtctatcagcctcctaatgacccagttgcccctgctagtgctggctcaacaccctctatactttctatacttctaggatatactctgccagagaatactatcctagcaggagactttaatacccggcacctattctggcagctagatactaagtctcatgctgtcatacctggtacaacaggactattagactggcttaatgcccacgagctggaactttgcctcaagccaggcacccccacctgtggaccaaacaccctagaccttgtcttctctaacctaccactaagggccctagtggaagaccatctgaagactctaagtgaccatgtaataattagaataatactggaacaggaagagcccctgcctatatacaagcttggctctactaactaggagaaagccagagcactagcaagcctgcctgacccaaccctactaattgacctactagctgagcaactggtctagatatcccaacttgtaatataaggtatattaagatataatacttgcagactccccaggaccccatggtagactccagaactaacagtcatactatactaaacaagacagcaacaaaaccctgactataaacagctctggaaggctattgtacaggcaaaggctgaatactggaagcagcagattaaacaagccacagcacctacagatgcatttaaacttgctaagtagattagacatccagaccagcttgctgcccctcccctaaatatacaaggggctcaggttactaccccacagggcaaagcaaacgccttccttagtcacctcctagagaagggggccctgcttccaaatcagatagaagagggaccccctaataagcccctaggccccctgcacctgccaataaaagagcactactaggctgccctctgtgccctacccccctctacccctggggaggatgggcttgctactactgcttagagggagctctggcctgtcctaggagatataatcacacaactatactacaggtatatagaggaaggctgctttctactgagcctaaagtcagcaaagataataatattaccaaaaccagggaagagggactatacccaactcaatgcctggcagctaattagcctcctctctaccctaggcaaaggcctagagcgcctcctagcacagcagatagctgtaagagtaatttaggcagatatactagccccctgctactttggggccctgccaggatgctctgctattgacctggtccaggttcttgttcatagggtagaggaggccttctaacagggaaaagatgcttcactactcctactagatataaaaggggtatttgatgctgtaatatactaacagctcctttcttacttatacctacaaggatggtataaagacttactccagctacttaaggactggcttactggctgctttgtatctgttaatatcaaagaaggcactgctacagcactaattaaaggaggactcccctagggatcccctttatccctaatactcttcctgctatatatagcaagaatagtctctaccttagagggctccttctactatgcagataatatgggcatattattaactgggaataccctggaagagagcttataataactggtaggggcctataagcaaattactgccctagggacagagacaggcctccctttcttaatagagaaaatagagatataatacttctctagaaagcagcagcagcatctccctatagttactctacctggtatagaggagattatactattcctatatatatattggttaggagttcttctggatacaaagcttacttttaaagcctatattaatttggtcttcagctgtgggaaacaacttgcccagcacctaaagagacttagcaatacccagtatagctgcccagtggcctccatgcaggcagcagttatatagtatattctcctaacagctctgtacagtacagaagtcttctatacaggcaaaagacaaaaaggggtagttaactccctgctttctctcttctgcacagcagccctggctattatcccagcctacaagactacccctactgcagtacttctccgcgaagcagacctactagacccagaagctctactcaacagcatcctccagagggcagcagtgagatatataagccttgatactaaacacctaattgcccaaatagctgcagagactaccatgggcaggcccaaaaccaggcttaaaaagatcctacagctcctcctcagccccctgccagagcacgctataatagagctgcctctccctctattatacatgctcccaacagataacaaagactatagccctgccctattacagatatcagtatacttggacagcttgcaaactggccaaggggcaggatttggctatacagtctactttggccctatcctggtaaccaagggacatggccccgcgggccccaggacagaggtctatgatgcagaaattataggtgctgtagaaggcctacgcgcagccctgggacaaccatgtatgggttactctacacagctagttatcctcctagacaacctagcagcagcctccctgctagcaagctataggcccactctgcataggcacagactgtcagagtcctttggccagcttgctacccagtagttggaagctccctcaatcctaaccaggccatggaagccccttcaagtctgctggatcccaggccattccgggattgctgggaacaagctggcagacaagcttgcgaacgttgggtcctctatatacagccctaacatccccccatcccctgcatacctacaacgggagacaaaacagcagcttcgtacagagacatatacagcatatgctagtaaggcaccacaagcctacaagaccctggatatcagaccccatacaaaggaaagccgcacccgcgagcacaagcttccccgttgggtacttggccgactcgtcgccgcccgtacaggccacggagactttacggcataccaccagcgcttcaaccactcagactacctggagagctgctcttgtggtaggaccaagaccccagtgcacttcttcttctgcccatacaccagaaagcgctggaaagatagatggagatatataagggacggcccatcaaaaacaatagactggctcttaagtacagctgccggggctgaagaattcagccacatcgtgcaagaatcatccttcttcaaggatatatgcccgaactgggcccgccggagcgcttgatagtgcgacagtccacacatctacctggataaagggtccggtccctccccccaatctataggtagtcgaaacgggcatctgccctcgaagacctggccagggcagcgccgggtgcttcttccactcatttccaacatatattgtccatagttgctgcttcaaacctgtatctagctagctcctaggcagttctgtttaggtagcacgtccagatgccccctgggaggccgcagatcacgtgggccccgtgatccgccgagtgacgttaaataataaaaccaaaaccaaactccaacccggtgataacgctaatggctggggtaaccaatgccaagtcagcataaggccaaggtagctcagctagaatcagagctgctgcccagtctaaggcgagattcaaggagctctcgggtcgcggtctggtagttcaagtatgcgccatgtcacgccaacgaggacggctctgaaaggcactgaaggggcctcacggagtgcaggcttaggatcgctttcccgcttcatcagtacggtgtcggcaacgacaaggcttggacgactgatggattgagcccggaaggtgtgttggatgtagaggctaattggccggctcatcaagactaatataacaacatcgcacgggcgacctggagagtctggaaatcataagacgcgtggaaacatatcagtggaataagcgagggcataatcttccaattatcgcgccaatgacggttgtgagtactgcagcatgcgatggatccgcacaacctgctggacgtccaccgatgctgggaatctggcattgggggccgagcgatctggaacgcctgccgctgtgggctttgtttacaaggtatgtaggggatattgctattgcaacctgaccagctatttatgagtcaggggcaatcaatagggcgcaagccagccctgctcttgagactcgtcctcatcgctccctcgccatctctattccacaccaccgccacgctatgaaaccaacctcccccaattcctctgtctgtgcacgccgcactcactgttcttagcaagctcatccaggcgcagcaacaagtgctcgtcggcgaagacattatggcccagcaaggcagcaaggttcccagcaaacaacgatgccgtctacgccgtcgtatcagaggaagaccagcttttcagggttgaattcctcgaggttgccccgacgccaatgcctacgaaagattctccctgattcatgaaggcttttctggctcgatgacagccttttgacgtcctgatggagcgaccgccttttcttcgtctacctgcgcggctatatccccgagtctaaaagacagagctggcagttgccgacggggccctcgcggatgcgacctttggaatagccgcctcgctgtctatcgtcggtcaacgcccagaactgggcaactcggacgactgggctgggcggcagttcatgctcgactcccttgaatcaacgaccgagcgcaccgtcttcagtccttggtgatgcctcgtctatgggtattcctacaggcgggaagctcatcaaagaggccaaccttgttgatatgctcttcctgtcatatggttctggaggccagttacatcagttgcccatcttcttacgcctggtttaatccttgaacaagatggttagtcaagcccgctcttcacacctataaccctatacttagaaatgaatgttgcagggcggatgtactcgcttgtcataacctagcccggatgcgccggccaggtaattcacctggtaccgtgcagctaacctctagatatagaaatagcgatagtaacagcaaagattccgcaggtaaagcaagtccaatggagcgtgacgtaaattcaaattgtttggggggggggagactcagataatataggaaggcttaattcgcaagcgacgtccccccgatgaggctttgcagcgccccggttccctatacctatgaatactaggtagcaaacatacatagattgcgctggaagaacctgaaaccgtccttcaaaaaaccaacatcaaccccctggccgttaaaactcccagcaccgcactactagccgcgaaaatcgcgaaccgcactggaattcgattaacggtaacatgcacaagactatgcaacacccttaatcccacatacagccaagccagcttaaggtctgtgggatcatccacaccgcgatgcgcaatcgcgagagcgagcgttacggcgtaaaactgcgtcggctgctcgaggaggttgttgaagttgtctgctttccagcggacagaggcgggaatgttacgattcatctcctcgcgggtggtagtgctgtcgattggggtgcgcatccgggagatggctgggacgcgagttgcgtacatccagatttccattatcaaagtccagccgtttagggcaaggatagggcggaggagggacgggatgatgatgctggacattgcggatgtctttggactaatggtggttcgaagagcctctgatggtagaaacttgtgaggtttgactaaagtttatggacatttgctgagaaaaggaatggacttataagcttacttaataaatgctgaggcctagaggcggagtaatagcagagtatattatagattgatggtctgactcatgatctcggcttattcaaggcaccgacattctgtccatttggaatcatcaggcccagcctctctcgcttaaaattcactaaacttgcccaggcaccctggtgccagacaataaacattattcttatcagagccatggcgcgcgcgacacttgaaagaagacctcaagctcgccaggcccggttccctactcgtgtggttggcagtaaccagccatcgaaccaccgcgggctgtcatcgcggagtaaattgcggtgtgagaatatggttgatagtcttcgtgggtaattcatcctccagaggttctccctctcccacgtcttgtccttccgctcacaccttaggtctccaaggcgcttatgt

SEQ ID NO: 5757 - DNA, 3424 bp, Emericella nidulans
gggatccctaagccaaccctcgttcaacgtctgctaactagttctgtatagacccgacgatttgggtagactctacatcgaaacagccaacatgattcgaaccgcgttggcatgcatgacccccctggttgcttacctgacgtattgcacagggcgtccctcggtcaattatcgcactttatcaatttgaggatagtgtgtcccgctttcatgcagcaattcaaatcaggatcactcttctgcattgcatgtgccgtccgagctctgagcagtttgtctatggacagtaatgatgtcaccatcctcagatcttcagccgttgttcgtttttcattttatagggatggacgggaacgagtagtactatttcgtacattccagtcgaactgccccgtagtctaaacactcttttacgtactcacagtaggccttaatgcaagtcagagctgctcgccgaaatgtggcccgtcaggctccacagtcgctgctgattgagtcctgatggctgagcgccccattactcgaatcgttctgcgtgaatgaaggtttggagaatagaccgttgattccattggttggcttccaagacaggtacctacatatttgtctccctgctatcctcaatctggcttgcaggccgtgcggattgtcattcaaaagtcctagtgccacaagctcgtgtcacatctccgaaataagaagacatggcgtctaaaaaggagcggtgaaccaagcacacaggagcagaaatgatgaaagggagaaggatccaagatcctgcaagtactccatacatcgaactccaaaacggcagtcctcagtctcacatggactacgggcccgctgcaaactatttttgtttgtccactagcccgcgcataaaggtcttttcgagacacctgcaaattcgaccacggtcaaattgcgccactcaatcgaatgtcaccagaagaacaaatgaccgcatcttaatgaaaccagtatccagcatacagtatataagcggctctttcagtacagcgagctgcggagctaagccacagaaaagacacaagagtccttctcagccctagaaactttgtctgcgtaatcgctaaatcagttgatatattttggacccagcttgacctgcgaggtttttctgcgcaatcggtgcttctcccgggcataccggttacgtcgctataaatggtccctcgttcgtcatcgaattcctattcaaggcttagcctggttgacttcctgacgtgcatgtgttcccaatcacaacaaaccaaaaaggccgcgcatctccactaatggacatcttgcgaatcacgagcggccgtctgattgccctgataatgaccaagacccctatgtatggcatcccatcgccgcggagcgtgcaacgaaactgcagccggctgcaggcttccggcctcaagggtccggtcaaggctggctaatcattttggagccaggagtgtgtcaaaggttcaagccagttcgaagactattcgaaggcgactattttgtccacctacgccttgtcatcgagaactgagaagggtatggcgatcctatgattagaccaatattgtctgttgcgattcgtggactgtgccattctggggcgcaccaccgacccctccgcgaccttgcccttgcggtgctgtttggatgtaatcattctatacttggagaggtgaacatgtatttgcgcagggaaaggctacgctgattgtattgaagccacggagatctcgaggtatggagcaatttctgcagctcttttccgtcttgccgggcgtaaggcagtcagaaggcttttgttcaggtacccgccatggcctctctttgaattgggacacgaatagctctaggccgagcacggccacataccatatgtacgtttcgtaccagatagaaaagtgagccaggtattatagccctttgccgagtcaactcgagagcgaaagtcactgttcatttgtccgtgcccagcggcaatcccatgccgacggattgctctgccacaacgatcgcttcaacaaagactcgaaccacactaagttcgcgcgtcacccgccacaaggcatattttcaacatcccaccttgatatgaagtctttgtctctccatcctgagccagttttctagacgacgcagaaaatacttcaagccttgacaggcgataatgacgtacgcatctctccaacctgaccagatatttgttggatgtcctgactttctgcctcctaaggagcccaagctcgcaaacggaggaactggacgacgaatacatccgcctaataaccgtccatggccgtgagtatcagcagtattctatcgacaacaagatttcatttgagccggtagacgaggtgagactcgtttgtccagaatggggcttagctcgtctgattatcaataggatgaagctgaacggttggatcttcaacatcaaattttcagcagagtctttgacaaccgacttatcttccctccaatcccgcggctgcgaagagtgctggactgtggttacggcactgggtcgtgggccatcgatgtcgcggaacagaaccctgactgcgaggtttggaactcacatttgaataagatacactaggactggttagctgacactcttatgctcgaaaggtaattgggattgacatttatcctttcatgaacccggacgatacaccggagaacctctggctccaggtaagctgtcatacactctcttaccggaatcgaagcacaaccccgcgctcgagcgcacactccatactgtgtgaaccggagtctcgttgcagtcatttccctctcttaaaatcgatcacgacctaatctgtccctcaatcggatgatcagttgggagacgctgacgacttctcgccaggtagatgatctaaaccgccctttcacctttccttcgaatcactttgaccttgtccattctcgactcctcgcagcaggcatcaatcggtctcggtggccatcgtatattcgagacatcaaaaggtttagcgattagcggcgaagccgtaccaccaagccaaccgttgacggcacaagactgacgattgaatggcagagtcctcaagcccgggggatgggtgcaactggtcgaaatatacttcaacgtccaatcagataatggctccataagcgaaaaccatgctctgaggcaatggagctcgcagctcatgaggtcaatggaagacaataaggatcttagggtgggcacccgcttgagaaacctcctgatggcagaaggattcacggaggttgatgcaaagatgatccctctacctttatccgcgtggccagacagtatgagccccgtaggaccttttcttttctgccgtttgtcattaactgacaatacacctcagacccgacaagccgagatataggcgcgatgaatggtgaaaat

SEQ ID NO: 5758 - DNA, 9652 bp, Emericella nidulans
aaggggcgttgtatacaaatcaagtggtagacaatagcatttgcaaggaccgcgccagtggcacctgcaacggcgcttccccaaggagacagagcgggctttgattgaccagccattttctcgagacgattcttttgagttggacagctggaaaagaactagacaacggtgaatggtggacagagctcagagtccgcgaatgtctatctaatgtgatctcggtcttgccctgcactccgctttgattgagggccgaagacggaggagccactcaagtactgaaggagtaagcgacccccaaaaacacagacaaaataaagacgccgctataggggacaggcagatgatagtgaacgaagacagagcagtagtcaataatagaaagggatagagaattagagccaaaaaaagaaaagcggcagacagttctgctctggagccggggactcacctcggcgcgcatgacgaatcgagccgaggtccaagtaggtagtggtccttgtggaggactcgagcttatcggcttgcttcgactctctgcttcccgctccccgccgagcaacaccagcctcacaacccactctctctactcgctagcttctgctatatggcactctcccaatcgcttgttgatatttccgcaaggctctagtggcccgtacagtccttgtccggttgtcatcgtttccaattgcgcctccccctcgtgctgatccggggagacggtcgttactgacctcattctgacctcggatgtgaggggttaggtgatcagcggagactctcgggaagggcacaggcaaattgagcacctggctctctgataggagcatcttgttctggatgaaccgttctagggagcatagctctggtgaagagtaaagaccccagtcatttaacaaaccgctatcccgctttgggatcaggatgtctagaacctctagcgccccctcgcagaagtctttaatatcgcgagcactggtatttattcgaaaattattccttctatggttcactaacaccttagctagaaagctgagcgggatgtcattacggcctcgtcgcaatcgcaggctttggacgctgccattgatgctgcggaacattatatgaaagccctagctttgacaagctcttctaaagacagaaatgtcttggacgcaaagtgcaaagagtggctcacgagagctgaaaagattaaagggtctgaagattggcgttctgtagcacagtctcgacggtctaggcttcgtactccagcgtcgacgcgaaaactcacaactcgtgaggacatcatccttttacagggcgcaaagctgaatggcttcatatttccgccatggaaagcagaacccagtctcactgaattcgagaccggaaccaacggagatgtgttattcacgtacgtggaatcaatctcttttctactggtgttaagtttgaattgagagagatagatattctgtgcatattctaacaatatgcagcgataagccggatcttcacctgtctaacttgcagagagacatatttgctggctggaaacggccgcacgagctgctctcggggcaagtggacgatgccgggatgccgctcaaccccgtgatgactgtctccggaaacacggatctagtgcaggacgtgttgacggattgctccgttgttgccagtctttgtgcgacgacctccagatcggagcgtggccttgacgatgtgagaaacttctgttgtatgcaagaattacgaatgctgacgcacacagactctacttccgattgtatatccatgcatccacaattcaatgaaatctgacatttcgccatctggcaagtacatctttcgcttctacttcaacgggtgcttccggaaggtggtcattgacgatcgtttaccgtcgtcaaaaacttcgaggtctttgtacatgattgaccgaaatcatcgtaactttatgtggcctgctctggtagaaaaggcatacttaaaacttcgcgggggttacgagtttcctggaagcaattctgggacagatctatgggtgctgacgggctggatccctgaacaagtctttctccacagtgatgaagtgactgctgaccagatctggtcggatctcttcaaatcgtttcatagcggggatgttctcttgacgatagggactgggaaacttacggagagggagcagaaagagctgggccttgttagtgagcacgactatgccatacttgatatgaaggagctcaaaggacgtcgtcaattcttgattaagaacccctgggctgggactgacgctgtgtaccctgcgcttttcgctgatcctggaccattccccaactcgccttttctctcccccggcacgttctggatggattgcgagatggttcttcaaaattttgagaatttatacctaaactggaatcccggaatattcgcatatcaggaggacatacatttcacgtgggatttgtccaccggtaagggaatggcagggtgctttgtaaagaatccgcagttttcagtttataccgaacgtggcggggtggtttggttattgctaggcaggcatctcaggacaatcgagtctcgtgcctcagaggaagacgagagattcggattcatcagcatatacgtgtttaagggaggaaagagggtagcactcagtgatggagcgctccatcgaggcccttatgtcgactcaccgaacactctcatgaagctcgatgttcccccaagaagtacttataccgccgtcgtgtccgaagagtctttacctcgagtcagtcaaaattttacaatatctgccttctccgattcgcctgtgcgaatatcacatgcccccaacaaatacatatgtgtgactaaggttcaaggttcctggacaccaaccacagccgggggcaatgcagaatcggcacggtactcactgaatccgcagtttagcatagtgctttcggaccccacggacatttcaattgtccttgaaccatcagaccaggagcttgccacacatgtcaagctgttctggtcgggtggaaagcgcatagccagggtccgcagccgcgatatcgtcgcagatagtggtgattatcgccggggtggttccttagtagaaaagcaggacctggaccccggggagtacaccattgttgtctccacatttgctcctgaccaatacggatctttcacactctgggtttcgacaaacattacttgtgaagtgacacagcttccatcagaagctgcagggcggcgagcggtgttgtccgatattggagtcttactccccggccaggataggatgcttgctcccctaacaactccccgactgacgcgagtcaagctcattgcgaggagccgagagtccagaatcggtaatagacctgttggtccctcgcccttattgatgaccgttgagcttggtcaggggccgtacaaggagattctagccacatcagaggatggtgaccatagcgactcgatatctggagtccgagtggaagacttcgatcttcagcctggcctggaagagaggggcggggtgtggattgtgcttgagagaattggaggtcctggcggtcaagtggaagatcatttcgaagtggaagctctgggagaagagagagtggagattggggaatggatagttgaagatgcataatcgagatattactataaaccaccttgaatgggtcatgtcatcgaatgctgcagaaacttgttggctccttgtattgttgtagtgctctgacactatccatgatagaaaagacgtagtcacggtacctaatgcggggaggctgccgcaaattagccccgtcccgcaggaactctcaagtcccaacgtcatccccaccttgagttcgtgtgtatcactgtcaacatacatccactagtcgaaaactcgcaactccaaccagggacgcagaaatatggcgagcaatattcccgctgcattgaagtctgcggatgttggtcgctttgctctgcgggcagcccagcttgaaaaggcgaagcccatcattgcctactggtgtgagtcttatgtgacctgcgtttgacggacttaggactaacaaagactgtgctttgccataggtaacttctacattgtgaaccaaattattgaaaaaggcctccataccacggatgaggacgtaaaactgtatacaacggagctaatggagaagctggaacaagtatgttagcgcgatcacgaaagtcctgagtatcttctgggcgggtgctgaccaggtcattgtgctgaagtttcagaatggaaaccgcgacaatgatgctattacggattcaatggccgccagtgcctatgtggaggagtttggcctcgaagtctttggtcgtgcagaagccgccctgcgggccaacaaagtgaccaagttcgtgcgcattcacctgagagctggacatcgagttgacttggttcagacaaacagcggataccttccaggccgccgccacgtttctcgagttatgccagatctggaaccctctcgaagcggaggttgctgcgaaggtgaaattcgccaagtaccatgccgtgaggattgcgaaggcgataaaggcgggagaggacccgaatgcgacgaacccaaagattgaggaaccagcagaggaaagcctggtagaaaaatcaaccgagtctgatgcggccactgcgccttcaactgctctgttgcaaccgagcgttgaagacgatccagaagaatcacaatatgcgcaatcttctggaccgtcgcttgctctaccgcagccgccaacagccctcaacaagcttccttccgctactgaagagcctgcgtctagtcgggttgcagacgtaggctcggccgaggatttaccactcaaccttccatcaacaccgaatacctttgcttcctcagcagcgccgaatcttcctgatactccaaccaacatcggaggataccaccgttctaaaccgtctaatgagtttcagtcgttccctccaccatctgcgataccacctactagctcctcaaccgcctcgcaaggtgaagactctttctataacgtgccaagtgccgcgcccagtcaagcgccacgtccaacacatcaaccttcacctatagcaacgcctcccgttgtagcccccgcgccctctacccaagcgaactctcacgatattgatgaccaagcaattgctctcgctcagaagcatgcccggtgggctgtatctgctcttacgtttgacgatgtcaatacggcgatcaaagagctacggaactctctaaaactcctcggtgctgaatagccggactttaggagacgttgccctgggatatgttagagaaatggaacatgggggagggaattgcatagcgtgacgagttagacagcgacaaccagtgtatttattcttatcatatctcattcgacataatagctatcacgatacaatgacatcgtccttctagaacccggagcgagtccgacaggttctctgtggcaccgtcgatactccgtcttttctcctgttcacgggatagagcatcacacttctgctgactgagattgcggcagcctcgatttcagatagccagcttctggtttagtctgcgggaggaggagtcaaatgttctctcatcctgtgacgcgcgccaataccgtcttcagcaacacatctaccccatccacttttgcgcacctttctgggttgctgatacactgattctccttccgtgccctttcactcatgagtgtttctcttgtctgcttggaacttaccatccgcccccagtcaccctagcatgggccatgagctcttgaccactctcctttgaccaaagctccaggtatagatgttgaaacttgtttctcctccgctatcatgctttcttaacaaacatcgccatttatcaagcccgaggatcactctactctcttcagaagacttgctgaatatgttgggatattcaataggtgaaagactttttgtgagccccgtagtaccacgaatatctgcgtcgagcaacccatggacggtcacagacactagtagggggctatagagtcatgctaagcgaataaaggctgattcagttgctcgcggtgaaggtgatagtcttcttgatgattctcgctggtggatcgctttccctgtcttaccattctttctcctaatcttgcttccatcctgcatgagtctctgtgctgaaccgggctgacaacttcttgactcacaattagctgagttctagctcttagaaagaaagccaacagttttgtgaaggaaaagtccgaatgctcccagaatcgagccacaacggtcttcccgcgccttgcaaccgaaaacgtacccaaagttgaagggctctaggggactgagttcactcttaccgagcactgcgatgaatatgatgagaatgagtatgtcgaaccttgccgcctaaaagagcgcaaactttcagagctcttagtttgcaccttatcccggataacgcaagctctctgacatttgcgcgcttcctattaaaccgcaaccgggatcgctactactacagccgaagtctcaagctgaccggtctaattttgtagatgtatacttgtcagtcgccatccacttcaaatggcgccgtgatacctcttcccggtgactaccgacaaaaaagcttgccccgtctggtccaggtcctgcaacgaagtttccatcgtcattacctctcgagatagggtgtgcttgcagcctcaagcagatgaagtgagctcccaagctcacgcgggagttggagatgaaactgcagttagctgggatgatcatgttgcagctgctcagcaggtaactgcaggctatcgctatggcctccattgcacagaagtagtctggtcatgagatatttgtgtgttggggaaacaatcgtgactaaagggctgtcatgcaacttatcatacaatattccgggcggcataggttgcaaagggattttgtcatcgaccctttgatctttcccaaattcgtgttgtgcctttatactgagcggtaaagatcaaaaaacggacactttcgatcttcttgctgatgtaaagctcgatgaagaggcttgtccacgcactaattgggtattagacactatcagcatctggacagggaagttgcgatatagcggaatattgacaagactacaagactactttttttaaccgaagtcggtccctgagtggaacgtacagcttaacatcttcatacgactatcttgtagcttccctatgaagactccctcaataatagtatatccttcattcctaattcaattcgaccgtcattgagctggggcatctacgaacacttggctaccgtatgagacagacagaaagatacgattgggctattctggttgatgaacactctttcaaacttcgagccttcctagttgtcaacttccattacctaacttacagcctaaacagtgaacgagagacccaggaacttcgagttgtcccttctccgcaattcctagcccgtgcccgggcgtttaatttaggctggcatgaaccatggaacagagcaagcgaagctcacttggatcggagatttccaagactgtcgtcaacagatcatcttcggcaaacagcttccagaattccaaatgtctatcagaaacactgtttaccgcaaggtgatcaacttcgagccaggctagaataggacatcagaagcgacctggcttagtcaattggagagcccatcagaagtcgtcgagggggttgcaaattgggcaaataatattacagttgctgagattaaaaactccactgaaccgcagatcctgacttattccctgcagatgatcaagcgggaaatcctccgctgcggcgcagatgcaacgatggtgccgatgcaggttaggtaattaatttggagaaggatctaggagcttgacattgagtatgggacaatttatccgaatcacgatgcgtttgacagtttggaagcagtaagtgagggatgcgatgcctctgcattctgcgtctgcatgtcttatttggattgtctccccggacttcgtttgttcgttggactcatccctgcagacacaaggaactcgggcgtttcggggactagcgactgccaatctcatggttattgactcatgatcgacttccgccgccaactgcgcagtgcgttgcaggctgccaagtacgcctgttgtctctatccgactagcgccgtcgaattgccttatccactcaccccattgccttccaatctagcttttgccttgcgcgatgatcgtttattccaccagtcagctttgtgatgaggggcaatagcattgacaggaaggtaaaaagcacaagacacagagtggtagaggcagggagaatcaaatgataacttcttgtagtagcctcggcaagtgagacagttcgtcgagtctcaatttaagcgtaaagtcaaaaccaggcgttggctcagtccacactgcacagtcgcctgtagtggcaaacgacatctaagctcgaacgcatagatcataatccatatccatggtgacctcctcggagttggatatcagatatagtgtggagtcatggtgatagtttgcctggaacatacgagtgctcgatggtgagctcgaatgaataatcattctttgagtttggtcctccattttgttccccaaccattgcaagtcatctggaaacgcggcccgccgtgtctctgggctttgaataccattcagacgcctttagcacctggtactcgctcagcaaagcatgtacggacagttcgaggtactcctaggtcaaatttcctgggtggagcgtataagcagacgtcccacaacgcgtcgcttggcaggggaacgacagtttgacctgtcctcatgaccaggatcccacgatgccgccgaaatttctagatgcagcactaacggcgttcgctcggtgatggcttggaagggggagcgtcatccccgtattcgcggtgaagttgctttttctgctggcttccccagcaattgcggcttggcttcgaaggatcgatgggatgaataaaaccggtcatattattgaggcgaagtctggaaagtctggaaagtatctatcgcagacgaataagttcacgtagaatgttggcccgtgggcgtggtcatagtgtccgtagtacttgggtagtggcaggggaaagggatcaacggcccgcgaaagaggcgacggcggagtatatgactactgtatcctggacagcaacatgggatagtcgtttagctcgagagaacccctaggtcaaggttgacagagatttctttcaaccccccgggggggccttgtgaaatctgattattgaaaccgaatctccgtccgcccaaaggggtacccccaaacttaaggggttcttcctccttaaggaattctggcctggtacagtttgatgttccttttatttctttttccatttgggcttttggatttcaaagaggggtttacccgggcaaaaattgaaggttccctcccgaaaccgaaatcggttccttttttaaggtcccgtggtttacccacagttggcggccctttaaaccctccaatgtgtacctttcttgggaacccttcgtttataatcgcttttagtggggggcccgatgtcccgggtggagtttgcaatattttccttggaaaa

SEQ ID NO: 5759 - DNA, 3075 bp, Emericella nidulans
gcgaacagtcaacaacacaaccggcgggccaccggacccgcggaccgcaccgataagcaccggttataaacacagccaagagcgccaagacatacacggaccacacagacaagggcggcgccacggaccggcaccccaaggaatctaccgacccccacactggaagctacgaccgaacaaacgccgccgcggacatgcgcgcccctgactccaaagctcgctggggcgtcgatgccgatgtcgaaacggtgcgctgggacatccacgatcccaactactgtcatgacactaccgacgccggtatggtttaccggctacgatatccgtaacgtccccgccacccccaagggctctaagcctgtctggtctttgcaggcccacgactcctccgtatcttccttcgacatcaatcccgccatccccggattccttgcaaccggctctacagacaaacaagttaagctgtggaacgtggagaacgacaagccgagcatggtcgtctcgcggaaactcgaggtcggcaaggtcttctcgacgaccttcgcgccggacgcagaagtcggcttccggttggctgtggctggaagcaagggcactgtccagatctgggatacatctactaatgctgctgttcggagggcatttgtgtctcggctgccgtcgcttcaaggagaggtgcaggagcgtatggttggtatgcagcctgatcaggatgagtcggatgatgatggtgcaccggagactggcgcggctggtggtgcggatggttgggagtcgatggacgaggattagatgcgaggcttgcctatgtctaaagatgagcatggcttactgaggcgacggctgtttttttgatagtttctactccgtccatatatagcgcgtcttcgtaactgtcatagctttcatccgcttttaatgaaaagttagatacccacatcagatgctctgactgtctacttacgtctaatcctacgtctaatctgtgaagtataagattcatcctagagccaatgggttctatgacgctgtcacgcataatgataataatggatactctatagatgcgtattccaaacagggatgtatgtctacggagtgtataacgttattatacttagcctaactactgaattttaccgcggccgccagtgttgatgactaagggcctgattataggacggaagtgcttcggacccgagtatagctccaactatggaagaactagccatgttggctgatggaagcccgtacggataatggacaccagtactgtgatggatgacaatatgaaatcctaatagtccgaaccgacgagcactgtccgtctgttcctcaaacccctgttcgagtaatacaacgaagtaggcgcaagcaggccaagcaggccaggcatgaaccgtgcgctggcccgtggacttcacgtcctcgggtgcaacgggccggcagttttacggtcagttgcatgaaccgtcgccagatgcgctgtttcaagagctgtccctttctgcgggtagactctgacgaaaatccaagtttgactggcatggatcgactttgagatcaaccagaattagacacccagagcaagttcgtactgagtccaggccgggcaaacggtgggctttcagggtcggcccccgctccacgcagtgcagtgggggagcgccttgtctggccagcattgacataattggctagcgggcacagtcgggatgatttgtgcctggccaacaccgcagatgacacccattgcttttcctcaggtgaatttgttgggtgcacacccgtagatacgccgaatgtgctacgctgccagagccccgggctccttacttagcggtccagatcaggttcttcctccgagacctcactgcaaaatgaatgccaggcgccaggagcgaggctattagtctgagacgagtcggcggaaaatcgctgtttcatcctccacccatgaagcagatgggcgtttctagaggccgccgccttcccgttcctggcgccaaaaaacaaaccaccgcgactgcaagcacaattttggctgatcaggcggtcgatgactggtccaaactgcttgagtaggattaatcggccatcacgactccgccaataatcaatccttatcccacgtcagtttcgaggacgtcgcttttcgagtttcctcggttgacttctcgagaggacaatcggacgtggtcggtgagtgtgacagattgaggattgcgaaagtcgtcttcccactcttgacctggatcagctggcctggtcatttgtcgggcgaacgcacaccgaaactcttgctgcaaaattgattgaaggggtctggctttggcctggcgtttcgttctaagcccttaagcaaaccacggtattgcctgcaaagcaaccgtggttcgtcctgaaaagccagaaaattctctcagcagcaagcgaacagaaggcgattaacgaccgtgaactggattgcgtgtttgggtttctggttgaattgagcctacagttatagcagaatgtacggtagtgtctggttgcccagtccctccacagcgaacgctcaactgtcgcgagtcgcctcgccgcctccactcctcctttgccttctgctcccctcagggcccttcttccctggattccctcctcttctctcctttcattccagtccttgatcaggcagtccttccttcctctacgtcctgccctcaggattatatcttcagtttatttcttttctttttcacggtcctggtcgtccgctttatcttcactgtacaatcttgctttgctgtgctttgctgcagcaactctgacatcccttgagtcaggcagctcacactctccggagaggaccttttaaaaaaacgatctttgactacttttcttctctgcgcaaaagagactcaggccacactctttgacctacgtgattgctacgaatctgataacggaaatccgctatttgatcttccattccttgcgaactccacatctgcgatcggccaccacgcattcctacctccgcgctaagatatctactatccggcgaaggcatcgcaaacgaacatccaagaatat

SEQ ID NO: 5760 - DNA, 5503 bp, Emericella nidulans
gttcttctgtgtcggcttcctaaactgttagggctaggcttttgaacaacacaccgacaccggagcaactgtcctggatcttgtcggcctagtctttcggcgggttctactatgaataatgtcccctcctatccttatgattgatgacctattatttaccgactctagaggtttatgatggaatgcttctctacttgaacaattctccctgcctactcagtgatcgaggaacgtggaaggtaacgcaaaaactgtacttcgtaaatcattagatcgtagctcaactatgtccggcaagaactatgtatctgagctaagctaattgcgacgaatatatgttctaccatactccgtagagtttgtcaagagctgattgccacagattggcggtgtgcctgagccacagttggtgccttaggcctcacaccctgagccattgtccgcaactcgtcacatctgagccgtaatctgagcagcaggcaagccgagaacgcgctctcttctctcgtcgcgcaataacaaacagtccgtcctgaaattgactcgctggattacgcttatggactgaatatgagttgagttttgagcttcattacaggacttgttactcctttcctcgaccgaactcttatctccgcgtcttgaaggaggcgttgccggttcgaggagcctacgcacgcccgccatgacctctttacggaacaaatattccaatggcatcgtcaacggggattcgctccccgtaactggagtactggcaaattctcgattttctgacatcccatccgccatcgacattcccgcatccacactcgacagcgaggtcgaagtgagtctcgaagggcttcccgatgatcctaccgaattatgtacactcctggaaaatgaaagagcggcgaagaatttttgggtcatcatagcgctcgcctatgccaaacaaaagcaaatcgatcacgcgatcgacatcctaaacaagggtctcgcatcggttgctcaaggtgctacaaaggagaagttaggcctcttgggatgggtatgctggctgtacttgctgaagagcagggaggcgcctcgtgtggtatcagacgttggtttgggtacagaagcgaggaccaaagactactacattcagcaggcgaccggaatattaaacgaggcgtcgcggttgaacccatccttcccgccccttttccttgctcggggggttttatctctgttgcgcgcctctttacatcccccacggcctgttcgaccaggggctgttgataactcagaaagagtggaatcattgcgccaggccctgaagcagtttgatgaatcctcgaaagcgttcggtggtagaaatgccatggctattcttggacgcgccagggcgcactacctacttgggcgatatgcagaagcgctggaagggtaccagaaggttctaatgagaatgcctggcctgactgatccagatcctcggatcggtatcggatgctgtctgtggcaattgggcttcaaggagcaagccaaagctgcttgggaacgtgcactagctctggtatgtcagttcgaagaatgcatcttggatgttgtagtggtactaatacagtacttccgcacttatagaatcccgactcgaaagttgccaacatcctcctcgcggtatattacctttatgacagctcccggcatgctacaacagatccggcattcggttccctgtacaaggtggccatgacacaatatactcaaaaagccttcaagctggacaaggaatatcctatgacctgcgctctgtttggcagttatttccttttacgaaaagcttattcaacagttgatactcttgctcgcaagtcgattgagaacactgacgtcatgcaaatagccagcgatggatggtaccttctcggtcgaaaatgccattatgagggagacctggccaaagccgcagagttctaccaccgctctgaccaagctcggggcggaggcgataaaggttatcttccggccaagtttggctctgtacaaatgcaagtgtctaacaaggactacgacggagccaagtttcagctggagaaaatcatacagcagacaaagaacccggagtgcatgacactactggcggctctctatgcggaggaggtctttgcagcgcagaaaagtggaatgaaagaagacaagtccgccgaagctaaaaaagccatcacgttgtttgaggcagtacgcgcgctttggaaggatgaaagtaagaagattacgccggacgagtcagttttggtatatctttctcggctatatgagcagaacgccccggataagagcatgcagtgcttgacacaactggaagaattgcagctggctgagatatctgatgaggaacgcccagaaggcctcgaagatgaggaaatgaaggctgccctccgagtaaatctgccgccgcagctccttaataatatgggttgcttcctataccagagctcgcagctcaacatggctcgttccatgttccaggcagcgctagactcttgtgctcgatcgcaagagagggaaggggaactcgatacggacgcccttgtcacaacaataagctacaacctcgggcgggcgttcgaggcatctgatatgcccgatgaggcgaagaaagtttacgaggccctcctggaacggcatagcgactacactgaggcgagcgcgcgattaacataccttgctctccggcgtagcccgacggatgaagggcccaagaagatggcgaaactgtacgagacagattccactaatctcgaagttcgggctttgttcgggtggtacctcagtaagtccaagaaacgggccgcgaacattgcagaggaccacgagcagcgccatcacaagcatacgctgcagtattttgacaagcatgaccgatacgcacttactggtatgggtaacgtccacctgctgttcgccagagacatgcgacgtgatacggaccaggagaaggagaaacggcgcaagatgtacgagcgcgccgttgagttcttcgacaaggctcttcagctggatccacggaacgcgtatgcagcgcaaggtatcgccatcgctttggttgatgacaggaaagatcttagtacagcagtacaaatcttctccaaaatccgtgactcgttgagagacgcgagcgtctacctgaacctagggcatgtctacgctgagctacgccagtatacacgatccattgagcactatgaggctgcattatccaaggaccgggcccgcgacgctcaaatcctcgcctgtctcggccgcgtttggctccttaagggtaagcaggaaatgagcctcgcagccatgaagacagccctagattatgcccaacgcgcacattctgtggcgcccacccaagcccacctcgaattcaatgtcgccttcgtccagaatcagatcgcgtccctcacatacagcctacccgaaacacaacgaactgcccaagacgtgcaagacgcagcggacggcctccgcaccgcggtcgagactttcgggcgtatcgcccaggccaagaatccgccttacccggctgagtctcttgaacagcgcgccaacatgtccaagacaattataaagcagcttgaacgggccctccagagccagaaggaatacgaggagaagaatgccgctaaactacagcaggcccgcgaggcccgggaggccgagattcgccgtcgcgaagaagaagtccgcaaggcggaggaggctgagcgggagcggaagcagcgtatcgcggaagaacgtcagcggctcgttgaagaggctcaaaggcttgcgctcagcgggcagaagaggaacgggcccgcgaagaagcggagatgactactgaatccgaaacaggcgaaaaggtcaagcgaagaagaagtctgctggctcatccaagcggtagaagcagcgccgtgaggatgacttcattaatgacgatgagggcgacgcgggacagcgcatagctctgagcccgatgatagtggcaaggaggagggtgctccgaaaaagaggaggcggttggagcggcgatcaaggggtgctacttctggtagcggcaagtcgtcgaacaagtataagagctccgagatggttgttgattcagatgacgaggaagaatctgctgctgctcctgctgccgctacgccgacggcaggggattatgacgacgaggaggaggaggatattgtacagcggcggagggcgaaagtgactaggcggatcgcggatgacgatgaggaagaagatgaggttcctccccccgctgaaggagatgatcatgatgatgctgggttgtttagtgaaaaggaggatacagagatgaaggatggcgatgatgaatgattggtcttgctctgttcttttaattcgcttaccactatgtagtttacatttctttgagcttgcattttctgatcccatacgatgagtacttggcgttgggaaggatgcattcacactaaaacttctcgctagcctgcatacattggagggcaagtccatggagttcttgatcaaagatactgttatgtcgctgacctaggcaattgttgcgattccaatatccccgagtcgcttatgtactctggtactattcaacctcaacaaaccaactactacttggaaggtaagcctattctataatgtaggatagcgatacccagcctggagagtagaagaccccacctcgccttcgacgtttagtagattactccgaagatatctggcactgatattctatacgcaataagctgctgagttatcatttgggttcaagccatttcgatctttttcgccgagaaagacgggcaatggcacgattaaagttcaaatctgagacattggtgtggttttactgtttggtctaccaggggctttgcaaaacaaactaccctgtaactccgtgttccgaatggggtgaattcgtgctgaatggttcatcgaatgatatattgtggtcaaatctgatggacttgcaggcaccgagcgattaggatggagaactgagggattcaggaagcgagatcgagatctttttcgggcataagatcgcctcgtctaaagccatgtcatactcgtctgctgtgattggtgaaccaactgctttgctcaaatagagcagacatccttgaacgacggacgtaacagtccctgtcaacagggttgttataccgagatagaaggggattccttgtgaaagctggggaagaaaccatatccatccttgtgctacaggcgatgagcctaggcatcctgtcggctagcggttggttgtagcttgtgccgttcctgtaggaccgcgcggtcatgtcgcttcaagttctacgtcttgtggcctgaacgcagtcgtgcagctgcacacggctccagagacctgaggacagacatgtttgtcatgcccgactccagacctcgccccatcacaatggagccagagactaaaatgggagtggatggtagtattctataaagtcacctaaggcgttgtctgtagaagcgactt

SEQ ID NO: 5761 - DNA, 7973 bp, Emericella nidulans
caacactccgtgaatatagtttctctgtccactcaaaggctggtcatttgtgaaatttgctgtgcacattatggagaagctgcgcgctatagggttgtgtggctagcacattgttattgcaaacagctagcaacgctgtgcatgtcgctacgtcctagtagctccgctcagagtatccggacttcgttcgccctcatggccctcatgatgttggagatcattgcgatgatttcatacattgaactgatcatcaggagaatcagcgttgtcggctagtacccccttatagaacagccaggtttctgtgccaagggagtacaaataagagaacagtcttacctatcggctactgcgaggtaaactcgctttggagcacacacttcgggttcaattcagtacctatatcccttgaaagcgcctcggcaaagtcaccggcgcccgcacaattggctcctcggttccaattgagcatttctcctttctcaccatgtttatgccaatacctgaaaacactccttatcaaccgcaatcttctcctaggcccaagtcaatgatattgcaaaatcttctcagacctctgctcgtgccggttggaaccgacattataccccatctaccacaccgataacccgaggaccggcctggtcagagataatcgaggttccagccgatatactggatgtgccgcgggaaagcaatacaccctttgagcggttgtgcagtgggtccacgagccgcttctgtttactgtcatggatagtttttctagaaggctgattagttttaaaccaacatttcttgcgcatgtagcgggtggcttattgctcaataccacgcgcaccaggaatgcttgcctactcttgcgggacaggggcctgttagtgcgggatgacgaagaagtaagcgaaggtgtggaagagatgggttagctccatgcgtagcgatgaatatttcgcttgctaatatctactaggaggaaagactatgctacgcgtttctcttttcccccgggtctagaattttattcagcaataacaacatctttcccggctacaagttaccactatccatctgactttacacgcgttgcgaactaatcttcgttatattgctgttatatcagtaacctggagctgtcagcatgtccatacagctaggccataataactgattggtaatatgccaatttatcttactacaacgtgaacataaaactatcctgcaggggtgagtaagtttattgccttcacccagtactttagaaacctcgtttggagattcgagtttaggcattggatagactcaaggcgagtgcctactaggtatgtgctcaaagccgactacttcctactagtgtcaatactactactactaccaccaccacctaaagcggctaggaccaggaggtctcacgatctacctcatagctgactacacttcaaagctgtttctgcgcgatcaagcgcaaagcatacagatggtcaggaacgcaatccgtaaatgcaatagtgacgaaacaagatcgctgaaagaacctcagcacagcggagaccatgcaaatggaccaagcaaacctccaatgccagcaaccaagatgaagcagttgagccgctattaaaagcccattcaggcagccaaaaccctacaatcgacccctctctttctcaattccctgccaacattcccattccccacctcctcaacatagtacggttgattcggcaatcgaacctcccatctcttcctccccggtaaatgtaagcccctcagtggctccaaaaacaccggcagcttctcgaccggctcgcagaaccaacttccgcttaggtgtaatgtgaaattctgtaggcccgccatgcgcgttagggcgccgcatgtctcgagccactgctgccggcctgcggagaagtagactgatttcacagggtcttttgtgggcagccagtggcccgggaacgcccaggagagttcgacgcagcggatggagtcccagaaatcgggggggattgtgggatgtaggtatgtgagggaccaggtgttgctgaattcgaaagtgttgagggagtagaggaggtgaatggattcggcatatacctgcttgcacactatcgggagtgcgaggagattgcttcgcatcagcatttgcggagatcgagatccctctctgctactgctgctgctgctgcaacagctggaactcgatgaaggcagtccaccgcgacagatatcgcatgcttcaattttcgtgaacacgccgggacatacaacatgtcccatgcgtctgtctgggcgctggatgatatgaatgcgcatgccgccgagaaccagttcccagatcatcagacgcagctcgggcgaaagcttcgacagcagcgaactctgcagttggacgtcccagttgaatcttgaatcagcttgcttttgctgcggtcgcgactggctttggcttcgagtagagaccgcgctctgtctgcgagagcgagggagggccgcgggcttattgtctggtttggatgattgatttcagtcttggctcgagacaatgaagatgggaagacgaagactgactttggtaccgatgcgctaatacatcctcccaggaaaacacgccctgcttgattcttgccatctctgctgggttggtaggggagtggggttgttcggaaaggtaacggttgggagcaagtcgtacgatgatgaggtaaaaatccgcgtcaataaatcgtattaatgttcacgtcgaacagaagacgtgtcggttcatgggcctcggggcgattgggaaaacacaaagtcgcaatcaggcaagaagagttggggaagtgttgtttgtggctgtgaggggacaggaggggacgagagggggatccgtgccttgtctatcctgcagtatccgagacttcgggcgcaggacaagataacagcaaaaaagcgagagaaggacgttttaaagccctcatggtgaacaaacaaggaggtcgaagagtcggtgaggctatatcaaaagggcccggggatggtcgtcttttaagctgagagataaggactcagcaaacctctaaatgcctaggtatctttgataaggtcttcgttcctccaccacgactcttgcggggaaattcggccgtccaaccgatatcgatcgactcgccggtcaatcgctaatactccgttagtctttaaaatagaacacccagggttaagctgtcgccgagatcggagacaagggggcgtcccgtcccgtcgcgattgataacagagtacagtatatcataagcatatccaagggtagaaagatgcacatgtgatgtatcaatatttacaaataaacctgaagtcacttgctgcatgataaaagcgatatactagattggtaagcgagcgcccgagaaagatccatagcgaatatgcaatgaaagactggcaactcaactgcagaaacaatgcgctaagccggctgactatgcagtaggctgtgaagcattggcccctaaggtgttggtcggacaaggcgccttcagtccctcggacagcagcgcaagtccagtcgcatcgagctggtcaacagtctcctctggtgggacaacccccacgtacgcattgaagttgtatatgccgcaaacacactcgtccacaatatccttcagacttgtaccagacatgacggtttcaccatcgcgaacaaccgaaaacgtctgctccccgacccccatttccatggcgaatgcgcttgctccagcggatgcctcgaagctgctctcttttgccccagatgtgacttggatcgtggccggagacgtgagaagcgagacaacaaagatttcgtcctgcataatctcccacccgtcaggacgcccgcgaaagaagtttccagtcgagttgtcagggcttccgcccatggtggtgtctgttgagtcgcactcgacgtctttgggcgtcggccggtaccagtagatcagcttctcgtcttgaatgtactggtccggcgaggtctcgcctgctttgtaggcggcgatgaaggggcgtgacatttcgagccagccattgtgtggcctgcagaagtcaggattatggtctgtcaaagtggattgaaaatgaaagaatgctgctcacatgtccattacccatttcgaagccccatcgtctgtgtgcggagacgacaagggtccaatgtagtgcgactctccgtaatcgttccaggtaacgatttcaacaaaccgaggaccgagttccagaatctctcgccagcggttgtaccaaagcaaatcaccgggaaacacccagttcttactgtacgatacctcgcctccaaaatgggtaaagaaccagcccgatgcagctatcctcatcagccacagtgctcgagagccagaacatcaaacttacgcgcaacataaggcttgtcccctagggcttcagtatatgcccgatcaccatcggcaaccgtcacattggcaccgggcttgggtgccttgttgttgccatcactgtcccaggccatccaattcagcgcaccgtcaacatcgccaaagtcgcccatgttagggtggtagttaggtgcccagaagatgtcagttccagcgctagactcgatctgcgctacgtcgataccgtctcctgcaaaggaagacacaaacactttgtcgtcaaccataagctgcgcaggctcgcttgcatactgagcgatctttgatccgacggcagcggcctgatcggtgtggtaccaattgaaatcaaacgagatgaagaccttcatatcgttgcgggcagccgactcataggcgtagcccagctgcgtgtcggtgtacggatcgactccaatatttagggcaaatgcgtcgatgcctaggtctttcgctagctgcatgtcggcgtcgtagtcgtcggcgctctcgcgattactcgaaatgccaatctataccagttagtctcttgccaatactcgaaggttttgttcaagcttaccatgaagtggcagaacacaagtctgtcggtggtctcgttggcccgggcaacattcttctgaactttagggaccttgagctgcgggaaggcagaggtgcacgctgcgagggccaaaaagagcgttttcagatacatgatctggaccgtcagtttcgttcaggctctgcttgggaagaaactgtattgacttaccagtaataggcttaggtgagaacaacggagtaaatgatatgaagcgagtcaaatctgataaagtcaatagctatcagcaaacacccaagcaaccctagacataagaaagctcaagctactcactacccagaattcatcagctcaccgtctgtctttgtttcgatcctccacatcaccaccacaacctccagtcttctccagtctttatacccatttccaaccccaacgacaagaatcttatcctcaatgacaacatcctaaccccatcacaagatcaatatcgcacatgaaaccagcaaacagcgaggctagccgaaattctcgtcccgccatccaaccccgaaactggaaggatgccgatcaattccagatagaagcagaggaggctctccatctccatggcgggggttgtcaagcgacggggtcaggagatcgaggcgagatcgctagcgagtaaaatcggcgatgagattacacagggataagagtgaaaaagagttgcgttaggtgaggagtaggaggtgactcctggcagtgatgacgttggcgttgagagggtggaggacgaaaagaatgttgttgtggcttggtgttgggttaagtcggaaattgccctagccatagacgtttctctgccttccccagtctgtactgctgcatacgattctgttgttcctccatactcatgctcttacgccctccgttagctctcaacaaacacagcacgcatatcactatcgtcttaccctccacacactggccccgtctccaacagctcctggtaggctttctccagtattccttcccaaactcaattccaggctgctgcaagcgatcctatcaatagaccgcccgtcacggattactcccagtccgacgtcgtccatccctgttgaatgggtcggcgtcttgggggttactgagaagactccgtggccaggtatatgcgtacgtatagagagtccttgctatctacacgttggtcaggactagtgccgcttctatggtgtaaactcgactcccctgtctcatagacccccgatagagcacaacttacaaccctatgcaaaggcatgggcatcagatggatggaatggttagcccggctctcccaatcccgagatgtctctggagtcatcgagtaccgacgccactgtacgcattgaatctaattgattcgactccgcatctactgtgtaacactacccatgctagtcggattcaacgcccggcaatgtacgaggagaggctctacctaccatagcctagccatgtgatgggcagccggactctaggcttgtttcaggtctattcagctatccttggtatgaacacggaggatgcgcatgaagagaggtgattagacatatcggtgtcttggtaatcaatagcgtgaaggcctagaaaacgggcgttctgagagaggatcagaaagaaggagtgagatgatcacattctgattacagataaactgcctaatctgccaccggggttatcctacggacctgcggttagcgatggcctctacgattagctgctaaatgtccaaatcttgtaggcagagacagatgctatactgtcctacaccactgcaaacgccgaaacgtagctgaccgagctatcttcgacaatctccccaatatccgagctgcgctcgtaacgagcaaagtgaaacttgccctttcctccttcctgctttccagcggcttcaatggcagccataataacaccgattgggtgacgaccacagactgtattcccagttttttcaagaatatcggtgaagcgctcagtctttcccgtggcaatggcggccatggtcgcaatgtcaaatgacgagatactctcatggataagcggcttgcctctccggatggggtcccgccgcttgagatggtagcccgcacaggcgacctcaattttgctttcgatttccgtttcatcatcttctggctggggcaaatcatatgaggataacggcagtctcgggcccggcacgggggcttgaggaacgtagtatgtgtatcggaagcggaggccccagtgacaaaagtccgaactgacaacaaatgcattacttgggtcttccaggtatggagcgagtaaagcgccaaaggcggcttctgtcgctttagaggtgcttcctaccaatattggtaccagcgggggatactctgcggctttcttatccgggtgctggagctgcaggaggcgatggatatatggtaggtgaagttcgatgctgtgttcgtcttcatcaactgattgagacatgtcttcgaacgcgatcgttgagccattggacttggccgctggtgtcgagcggagtttggcgataagctccgtatcgagcgggagggggtcatcagatagcggggtatagtagccggtcagcgtaggaagggctagacttgtgaaataatggtgatgcgaagggccgagaacgaatattcgtttcctgtaaagtgctttagatcatgacgcctcctgagatcggattgactcacgctttggacaaatccagagccttgtaggcgtaggcggcgcaaggtccggaatagctgtatcccgcatgactgggattctgggatcagtatgtgatgaattagaattggtacttgcctgtacatacggggcaatgatgattcgcgcaccaggtgctggcagagagcccaacccttcaagcgtaccaggtaccctgtccagccattgatcgagctgaagcgcgagagtctggcggttgcccgaataccaggaaccagcgtgagacgcagctctaaagcccattattactgttcaatagatctgtagagaac

SEQ ID NO: 5762 - DNA, 8660 bp, Emericella nidulans
tccgccatttggccgcatccgttcttcgggctctcgaatggtatctgtgacctcatctgacttctcgttgaggcgcttgatgagcgccgcagtctcagagatatattcccagttggcctctcgtgtgtatcgctgttgccggctacgaccgtgaagcgtgattgctgctacaccagaaggaccacagttgagcatgctggcttcgtgacctccaaggatgagacgctcgaccagcttctgtgcatttggagtgttatcccttgtacccgtgcggattttgaccgtgattgggatctgttctgagacagcgttcattccacggagcattttctccagtttcgaaggagcgtcaaggagcgccgagccggaaccttcccggtagagaagatcaatagggcacccacagttcagatcgataacgcggagatttggagtaagagatgacagaacctcggtggccttcataacccatcggtacttgtttcccgctatctgagcgccgaacttcatatctttggaattgtcatagtcttgtactacgcttgcgcgcgcagaaactgttggtggcaaagcttccgtttcgtgtgctcgcatcaaagcccactctggcttgtggccctggattaatggcatactgagagccatctcagaataggtgagctgtgcgccaagttcaacacaaagccttctgaatggtaggtttccttgcgtagtcagaggcgctagagccggggtctcaggcccaaagtacagccttctcttctcagatggcataaagggtgcctctgtatatgtcgctctgttttcttccttctcctccttgtcttgagcagtgtcgggatgagcatccttgttttgttgccctccatggaagtacttttccaactccttagatgtcaggtctagccaatcggagtatgcatcagcccgcggcgtagaccgctgtcgttttgcaagagctatttcattcgctgccgatggcggatatacggaaccaatctcacctgcagagggaataaccggcggggccattatttctgcgctcctcgtcctcaaccaataccaactcctttctcccgtcttcagttactcgttcaatagaatgagagccaacgaatcgacacttccagcccgcatcacatttccctcgagcgctccatacaggacagactccattgaatgtgttaagatcctcccgcttatgctccttcaagtatgttcgcaagtcgtgttcgaaccgacatttatcgccaaacgggcattcagccggtgagaattccgggctgtataccctactagcacagagccctttcgaatcctgtgacctgccgaacgtgcgattcttattctgaccagtggtcttcttcttctttcctttcttctcgtcttcacggtccttataggcggcggcttcggcggcatcgtctgtgcttgagactgcggcttggccttgtttgggtttggggatgagaaacctaatgataaatcagtcagcgcacgtgcgtaagcgcaaagattccactagaactgcatactctgccttgatcggtgccacaccctttagtctcggcggagcctgtccattttgctggtcggaggcaggttcctccaatctaaccttcttcaacggcggctctccggttgaatcagtgccattgggcagatcctgcttgggcacctcgacatcgagattttgagctgtaccttccattttcttaagtgacggatctgctgagaaccggtcccctctaggatcaaaaaatctaagctagatggggtagcagattaacaggtagatttcggcttcgcatgcggacaatttttgaagacccgccgcggagtagcccatggtttgtattgtttgcatctttagatgtggcgtcggtggtggcggtgtcggtatggctatgggtcggcagctgatgagtcgcgtaatccgtgtatagagccactaagtactgtcaatttgtcaaggctgtttgctcaaaaggattactttgagtattgataaaatggagggaactcatggtcagtaacttgaccatggtggtgtcaattggccgctgtcgctgtcccctaacagggcgtgcatgcccacagggcacgctaaggcgtaatcttatgattctggtatagttctagcgtcaagccaagagccaatatactcttccccgtcaaatctttatcggccggtttggtacgattgacggctaatctcattcccatcctgtattcgcgacaatgccacgctgccggtatctttcgagtctaacactgcggtcctttggttcgcacctaagtcccactgagtctggcgatccctagtccaagagctacagggtagcagagctgagggcccgatttcgtagtatccttgaggacgcgtggtcaatacagagtggtcaccattcaccgtttcacgaggagtgatgcgttaggtagtctgtagatcaatggagggtcgctccattggagagttcagtagtcacgcacctcgcaccgagccccatctcgcacgcttgaatcgagtcggcttgactggatcgattttccaaggtcgttatccatcaacccctgacagaagaacgttgtaacctcgttgcgtgcacactactgaatagccgaatattgcatcgccaaatattggcgaagctcggcatacaatgataacttgattttaaggattgcggccatgacaaccatgggacgagcccagccagaatataataataaccgtaatcgactcgaatcctatcttagaaccacaagggcagacagtctgagataattacagcttgggattcacaagggggcctaaaggtactaaggtccctaaggtaactaaccggagacgaggagcatggttactgcacagtagccggcaaaagagccaagaatttgggacgccttgcttgcccctccactaccaataacccgatggtatctcgataagcccggggggtgcagatacagtggaggtgaagaatacaggtcggttcaacgcttcttcagcccctaccagggtcggttcttcccgcctggctggttacaccccaaacatcccaagcatcccaagcatcccaagcattccaaacttcccaaatgacagtcaccacaggaataataatgcccatgaacggaactcaaaaattgggcggtcaattagcccggggtctgctctgttaactcggtggttactgggctgatgcgggaaagcgtatgaaacgccgagtactcgttacctaatacctaagggcattctggaagcacactagaggcccttagactgatggatgactccacctttaggttcactatacatcattacatagagttcacgtctgctctacgtaatctcctcagagcccagagacgcaggtagcttccgggatagttctattctgtatgttaggaacccttgagatctgatactcgggaggtgactcacagcatcaaagtccgctcgcagcgaatccaggcactgtgaagctatccaggtgagcggtggatgctggcgaatggtaatacggcgtattgggcgaatcaactagcgccggctcctcttagcgtttcgagtcgacttcaaccataataataatttccgttggcaaccaccaccttcgtaccttctcttcgctttacttttgtcgtggaagtccggtgactataggtacgaccttattagcccgtcttcaccgtcattactgttttcgccggcactattccgtctcgtctattttccgggatccgtcatagagactcgaggggtgatttgatacgtcccgccttttccgaattcgtcactgcaagcgggacagtttccgaggtggactttcgcgcgtgctcttgatgagacattgaaccctctcatcatccgcgcctctgaccttcctctcccttccgtctattattatctttcctttaactggtctcgagtgctcgtcgcaagctcgctccggctctggttggcttgctgtcgcgcggatcggccagtagaaggacttgacctatcgtggcttgtcccataacaccactctccttcactgcgcctaaacagataacatcgaatctccctgctccccataattacttaactcgtcaatcttacattccttctactctggccttctgatagacaagataacatcatgaatacaaccacaccgatcgacatcgccactcggcagacctcggtctccccgccgggacagcaggcttcgaacctcacatcagctcttcaaaaagcaggtaacaccgagcgcacaggcagtatatcccatgccaacggtgtaccgatcagtatgtttaaggcatctgcgcctcggaaagactcgatcggggcggcttcgacacaatggggaaacggtaccaaacctatctcgatgtccggatcaaaccggaatcaacaacgtcgtgagtcgttagcaggaagcttggtgggcggtatgagctggggtggtgtctctgttggcagctggattcgcgatgagtaagttggttttcatacgtcggtgtccttggccgcatgctgatctggattgactgcagcatcatcatggccggcacctctcctttcactactttccagtcgccttcgttccattcgtcctcttatctgccgaaactcgaagcgaacttcatgcgtgacttttcctgctgcggtgtgactctgcctacccttcatgacttgttacaacactatgaagaagcgcatgccacgaaatcaggtcaccggccaagccagactgataaccgcgctgctctcgcggctgcggccattgcacagcaaaatcaacagaacaataaccagaacagaggtttacagccagacaggacgttcgacatgcaacggaagatgaaccagtcccacactccccagcagcattccgacatggacactattgacgatatggagttggatgatgcaatggacgatactgatgcgtcatcccagttcttcacgccgcaatctcgggatccgactcaaggaggatttggaaccccgaatcgtggagtgcctaatctgaatttatccatgctcccaagtcaccagggctttaagagttctcaaccggggactccagttgcaaccggtcttcctctctcagtgcagaatacccccaccgtttcttctgtcaagactcctactctgatgccgaacccccttcagaactcacagttccgcggcacacccgactcctcgactccaggcacgcctgcagagcttgacgacagcatgatcggtccattcggagaattgtctatgcagaatgcaatgatgcagggccagccgcaattctcgagatttaccggaaataatgatatggtggatctgtgtatcgatgagcctgccgaccgacaattcagccccactggcggaataaatcagtctaacgcccatttcaagctcagtggagcgcagtacggtcccaatagtgacattgctaggcggatacgcgagcagcaactactggcaggcgttcctgacaccacttctatccttccgaacgaagagcctaaaccttaccggtgtccagtcatcggatgtgagaaggcgtacaagaatcagaatggattgaaatatcataaagctgtaagttgtctccaacagattctggtactgcaatatcactaactacttatttagcatggccacaacaaccagcagttacatgacaatgcagatggcacattctcgatcgtcaatcccgaaacatccgctccttacccaggaactctcggcatggaaaaagagaaaccataccgctgcgaagtctgtggcaaacgctacaagaacttgaacggcctcaaatatcacaagtcgcactcgcctccttgcaaccctgatttccagcttgctgccgcgcgtagtcttaactatggcggtggagtcatgcagggacaaaacattaatgttgccggagcgggcctacctggcattggagaagaaggtcttttatagaaaccatttttcaaattccaactttttgcctgcccttaccgtttcgattatatgaatatctacggcctaattgcgcgacaatacgatttaatgaccggttcggtggtttggagtttatttggtatgattaccgtcaagagtaacgaagtggctctctgggtctgacgatacccttgaaaagaattccgagactcttaacggtttttcggtgcttctagaacagacccgtctgatttcatcattcggtttccatactttctccctcatctttttttttcagcttttttttcttgcgttctcgcgctgctctgctgttcttcgctcttggcttctgcggatttccatgacatatgattcggttcttctcttaccatctacacttctttcaagcttcatcgaagaaccggtcgaaggcgagagaacgacgggatagatgagtttaggttgggttgggttgtgttttgggccacctacctaggtctggtgttctcgctacacttgtctcctggcggacgacaaatggttttcccgtcggcgctgattgcgaatagacacttttgtgactcaccttggctttgcttcgatctctgtttggtatggctattccgccttctcgtgcctttctaactgtacacggtgtattggagatctagttttgcttagttgtctgtgtttgaccctgtttgattacctggcgtttaactttctgatagaaatattgctattaccatctgagttccaaccctcttacagggttttcttctcatgctctggttggtgcggatgttagagataaggaaaagttttcagagaaaaaaattgagattcgcctgcttcattgaagactctccaaaagactttgctcgtaccagaatacggactacggattatggtgtttgagacagtgcactgcatgacttggtaggacctagtttccaataatttccgccgcccagcgtagcttgtacatacagtaacgatacgcaaaccttgcccatagacattgaattgtttagtttagttggtagatatttctagtacacaagccatgggaagagaaccaccgtccgcctgcacaagcgccattcaccaaaccaatcaggagaaaacatggctgcctccggtcggcaagataacgaaccagtaagaaataaaggcgaacgaccaagatgggaacatttggtttgctgtggatatctggggttgatgtttcgtttcattttcgtaaaaaggtaaagcaagattcactgagcgaagcgacgcccaataattgcttcgatcgtttaggttactgctgagtatatgaccggttgcttttggcttcaaaggaagaagcggcaaacaaactgataggagatttacaagtccagaagggtatgggaaggagaatgaggaatgaaaaaggtagaaaatttggggaaaccgtggcttgaagaagggcataacatctaccattcaaactcgccctgacctttgtggaagacgtatctggagaaagttaatggatgttcagtccaataggtagaagtgtttaaacgtactctttacctcctgtggtcagaattccatccttcaaagtgcatttccacttgttcttgactcgttggaccttgtcgtatgtgcaaagcatgacttgtccgacggcgtcatcatcctcgtcatcttgagcaaccaggtcgtcagggtcatcaaggtcagaattaatagcgtcctcatcgtcttcttcctttgtgtcatcgccccctgggccgtcaaactgagctttggacccagacgaatcagcagaggcgaaacgcggagccttcggctgggattcgcgctcatccagaggaaccatcagaccgcctccttcaagccggagcatttgttgcttgaggtggtttcgaagcgctctgtcgccctctccgtcctgagcagcctcacgtctccgcgtgacttctgccttccattctgataatgcatcgctagcggtaccgtcggtttgggcattgcttacagacgggtgtgatacagggtggtagcctgtctcttgcttgatttgaggattttgaccattcggcatctgttgcatctgctgcatttgttgcatctgttgcatatgctgcatgctagaagggcgcggtaatcccataggtgattgtgattgtgcttgcatctggctaactgagctggcggccgctgcgccatacctctgctgaatcaggttggttgcgcgttcgcgctgactgcgcattcggcgggacggccatcatatgactcatggggggtaacgcaggatggccattaacacctggttctgtcttgatttgtggagagtgtcccatagggtggccgccgttaggcccgactggagtttgagcttgaaggggcggaccgttgggaggcatagactgtgggtgcgaaacatgttgcggattttgtagttgtgggtgctgagtatgtgactgttgcggtggaaggtgttgctgctgatgcacggaggcttgaggagggcgaggagcgttcgaagggaccgtcgcagtaggcggaagtacctgttggttctgggtttgagctggtgcttgtgggggagcaggatcccatgggaaatgcgcgacgccgagagaggagagtttcttctgccagctctgctaggatattagccaccacagaagatgcgacgatttaaaaaagcaatgaaagcaaagcgaatatcagg

SEQ ID NO: 5763 - DNA, 4838 bp, Emericella nidulans
tggtatggcgagcgttaggggctccaatttgacagccctttgagcctgtcgctaccgtttaccaacagacgcttcggcccccaaattccagtgtttcttacacggaaatgcagctgaattagcccattggccatttgggggctaactttccgtcccgcccgggctttgcgtgcttgacagttggcagttccagccccgcgttagcattacaaactcgtgtaattggcaaactaccaatgaggctgaatattattgcagcctgcgactatcttttctggctgaggcatgagccgcatatccgctgtgatccaacgaatccccaagtacaaggacagtccacatccgcatactgccctgtataggatagggtccgttgtgcattgtatatattaatagcgagctggggcggaaaactctctccggtcaaagcctaattgctcatttttgaatatgcgacaatttttgagcctttgtgactatcaccactacgaaactcaagtcgtcgtagttatacatagctaggtaaaataaaatctatatattaccatttcctaattttcaaaaatagtaattgtattgtaaatcacccagcagctctcccaagttgcggagtttcctgtactccccacgctccctctccaatacgctttccatataacttgacaagaacacctacagcgaccgggccaataatagtgttgagcaggatagcccaaacaccggtaatgaagccgtcttcactgacgtatgaggtttcattatacccgatctcgataatcaagagcccaatttcgccgcgggcaaccatggctgagccgaggaggagacctgacagccagattaccttggtaccttctcttgcgggtttttcattcgttccatcttccggttccatctatgcttcttcgtctctttgtctccgcttttgatttgaagaattaggtggtcggcaaggtttcccatgtttggatcgagttagggcttgccagaggggtacccagacaccaacgatgaactgcggcggtcagtatcacaaaatgacgtattaagagcacagctgtctgcccaccttggcgaacaccataagtagtgtaaatacaatccctctccatatcctttttcctgtccaaagctgtacaaacgggattgcgaagcctatactggcaaagaacaacggctccatcaagtacttttgcacatccatcagataccgctcaaaggtatgcacaaatgttggactcttgtcttcctccctctctccttcctccctggtcatgaccacaaatggaccctcgggattcttagaagggatatacgtgaggaaagtgcctgctagaaacgcgccaaagaggatggatgttcctgtgtatgccgctatcgatataaatgcgcagagaacaagcgccatcaggattatattggagatgtggtcgtaccgcgcaaagtggttttcgatgtatcggcggaagagaggcgcgaaaaggtatttcgttacaaggggagttacaatagacatgccgattgaagcgacgatgggccggccgatgagccaacctaggtttgcgtctccgccttcgctgagtttacctagatctgaaatgacgctggtgtctttttaggggttgttctgaatgagttgggaggagcgagtatacctggacatgacaaggccaacaacgtcgtcaatgacagcagcgctcacgaggacagcgccaacacgtgtctggccgaggtcgacagtttttgatgcggaggagatcacggcgaatgtcgttcctgtcattgtcagtctgcttgtccctgtttacacagctaggggaactaccaagcgaagtggcagacagcgcagcgccgatgataaacgtctcaacagctccatatccaaagcccaagtaaagcagcagatatgagagtccaatcggaaatatcacaccggtcgcagcgccgagcatactaagtacgaaattctgcttcagcaaatcaatgcgtgcaccgagcccgcctgagacttatcagcaccgcccgtacccacatataacaggtgaatgagtaggcaagagaagtaccctcgaagataattaaaatcaaccccacatatcccagggtgataaatgtttcctgccactcgatctcaaggatatcggcaagcggtcgcccatatataattcccacggcgatgtgcccaattataccggcgcgaataatcttcgcggagatccattctgccagagagaggaagagaaagaaggagattattacgaggatttggacgactagataatatcagttgccgtagttaatgtaggcaggggctcatggtgcgcactgctgggctcatggtattgtacaaaaccaccggccatgggagctggttggagtatattggtaagtaagttgttgcagcaggagaaaatcgttctcggcgcgatgcttcggcgaaatcttttctgcttggcttcaatattattacatcatggctgggttggccaagggtattaggatccatctaccatttttccgggtccacaggattccgcggctggaaaccgtgattccagatccgaatagtagtcttttttccacgctttaccatagtattatgcacagactgtatttttatctcaatgagaatattattccgggggggtttgctcggtgacttttctccaaagtagatcacaattcatatacatcactaaccgaggtactttataatttgtttctctatatggtctaatctgttcttaccgtgcgctttttggtaacaggcttgaggggtttattctgctactgatgcaacatggaattttgagttagcaaggaaaagtcagagcttacggcacttgttggacgagcaagggtcatttcacatgtactattcgcgctcatagctagccgccgcagtttgccaactacatagaacgagaatagtagctgcaacccttagcgttcatgctacaacgcgagatgaccatataccggtccttgtacgccatatggacgtagtgggttgttctctatggtcctgtgttttccacggagtcatccgaaatatattttatgcaacaagatggaagaaggtttcccagtttccatattcgactgacctctggattaggtactggcagcgaccagaaatacaaggctgtgcaaagacattttcaaaccagcaaatagtatagcatatctagtttctcaagtacagggtgtagaattgagggagaaaaaagatcagcctgatcatcgaccggattagactgggcttttgtttggaatatatacacataattttcaaagtataagcatcgaaaggggctgtggtttagtggtataatgttcccttagcatgggagaggtcctgggttcgattcccagctgctccattttttcccacttttttagttatgtccgtatttatgttggcttgaaaagacctctgaatataagcttaagacaagtcacgtgttaccattaatggggctgtggtttagtggtataatgttcccttagcatgggagaggtcctgggttcgattcccagctgctccagtatttttattgttttttccatctttcttttaatccacttgatcagctgtagcgcattggacgcggcaagaagacgtaccaagagttgccttggttatccaatgcctgtcaatttataggcctttatttcttataaccccggggcccaacatcgggcaaacgtagtgactgactggttgagcagccaccgggcgagtagaaaaagagacagcatgtcacaaaaaggtagtatgatactagcatagctatcctacggctctgtgtaacaaggcaaaaagacaagggtagaatgtggaaaatatgacatgcccaccgcaaagcaatatactgccgagcggacgatgcaaagcagcatactcaccggtgcattcagcatctatactctttctggcagcctgagatgcacagtggtagatactcaagtgcttccaaacacacatgggtctactggccgtgccagaaaccgactgctacatccatattggatgctcaagcattctatgaataacaacatttgtgaccttaccgtgccaatatcctcacatgccagtatggaggggatacaggggaaagactccgccatgcgggaaaactcggcaaggtattgcaagtaggttcgcatattatcatcaagaggccatggttgacaggctgacacatacttgaggagaatttcatgattttgaaagctcaagccttattactaggaccaagtaaactaccacggaacaccagatatgacgggtgtctactcggatttcccgcctagatgtgagcccttaagtcaaagctgagatgtacgacgctctgagtcgccatcgaacctgttcaaatgattccccgacaccgttcgaatcaaccgcacacatgagcaagggtagaatcctggaagcctgcaccttaacccacataccgccgactgctttacactgtactgcccactgatattccaggtgttacgctaaatacggcgcttaagaggggctggtcagatgatacctcaagcccaatcacgatgtcacagcctatataccaattaatccgaaaaccaccaaaaaaaaattaatacaggaattaatggatagacttgtgagagatagggccttgagcctgagaagggagcaatgaaaggtgaattacctgcatttgcttgtttatctacaggtggagaaagacgatgtccaaaagaaaccacagaacccatagctggggtcgcggaactgggatcaacaacacctttcgtttctaacccatggtacttaggagcgtgctctcgtagacaagggcggt

SEQ ID NO: 5764 - DNA, 5384 bp, Emericella nidulans
ctgctgatttaccttcgacaagattcggtgtgccaacatggataggtcatgcaatacgaacctaccaatacgactttttactggagataaacatccgtaccttatgtgctcatctgcccacctatggctatctttgttcattttgttgttaaaaggcccatccatcctcgcattgggaatcaaggactcgacaaatcccttttaattcatgcccatgccctaaaccgtcttgttgttcttttgcgagcttggacatgaaggtccctgtgatagatcggtttctcgattatatctcctcgcggattgtgtctagaacttactgccggtctcagacctcggcaactcagcagtgagttgtgaaaggagcaacttggccctagctaatgcccctgattgcccgctaagtgagccggggtgcttgtcaatatccttgctggtcggccttgtaaaagatggttgtcgacaatgatgaaagtctaacagttcattcgttgacgtcgaaagggaacgagttatcgcgcctttacccagttatgaagttttgctcagcagtcgaatgccaggcacagacctaattccaaacgatgcactcagtggatgaagggaaaggcgatctcgaaggagaaataagctagagtgtgcagtagtgcgggagacttcttgggtggataattagaatactacactctatctatactagtacctccacggtgtcaccatgtgatcgcgactttcgtctttggatagacaactcgcgcatcgtcaatcccagtctttctccctgatccagcaactcagtctagctaccccacaatatggcgcccaggagcctaactccatcactcctagaagcaacctctgcgctatcgcccgagaatggttccccagatcgcttgatagccagaatttcccgcgactggtgcacgcagcagtacgtccattctccattggctacactgcgactacccatcctcaatgctaactaaaagcacagttctgttctgggaggttacctaacaaccctgatgctgtccgccgcccgcagatttatcaacagcaacacagacgccgtagccgaatatcccgaccccatccatgtcttcatccagttccttcacaaggttccacctggccaggtttccgtctcatgcaagatactccgcgccacagcccgactgtgtgtcgtcaaggtcgacttggagttgtctcgacagccagagccggggtatggcgaggcgcaacaatcccctgcatgcattgcgattgctactttcgccaatttggataatgaaaagggcctgacacaagactctacacaatcggagcagttaggtgcacatccactcccgtctcgagagacagattgcgtcacaatcgacgaccccgtggtagatgcaactcctgttactcgaaagctacactgggttgctcctcgctctgcggacggtctatggggtcaccggctaggcgggcaccagcgcgaagtctggctgtcatttcgagacgaaacgccaatttcagatcttcttcatctggcgctgcttgcggacatggtaagcccagcttcaaaaatccgacactttggtccgctttctggcaagatcgcattacatgctctgaaattaattagtgcgtatggataagaagcgctaatgatgtcttaacctatacagcctctccaaccgcctgcaactcacacagcgggcttctattcgcgctatgccctctccaccctctgtctttcggtggagttcaaaaaacggcccggcccgagcacgaaatgggttttggtacgatcgaattcgcacaaggttgtggacgggcggtatgatgtgaatgtccaaattctaaacgaggaaggagagatccttgcgctgagcaatcatgtggtgtatatctcagatttgaggaagaactcgaagagagcgaaaatgtgaagggactgtttatgctaactctttagccacagccgttgtaatttcattgttattggagcatgctcagtttagtttttcttgttttctactccttgtatcaatccttcaacttggaccctgtgcttgtaatgatcttgggatatcgatctaatcggtcatttaattggcgaggaactggaatatccttcagttttgcgaggcggttttgcttatattatattataaagtgcagtattatatcaactggcaaggtggccgagtggtctaaggcgcacggttcaggtttacctgatcctgctttctaagcttccgtgtatcgaaaggtgcgtgggttcgaatcccacccttgtcaatattttttggatgattttggatgctttcgttttttgtcctattatagaatacttgcggatatcagtcatacacaaaagattacataatatcaattggcaaggtggccgagtggtctaaggcgcacggttcaggctttacctgatccttcagatttccctctaagtttccgtgtatcgaaaggtgcgtgggttcgaatcccacccttgtcattctattcttttaaaactacatatatatatatatatatataatttttttttttttttattatcacttacagcttagtatacatatgtacattccagagatgccgacaggcggcatgcgttaagcctatcagacataggatggtggctgccggtgcccaataacaagcacctatgtcaaagactcattctatttgctctcagttactccgtgcttaagatccaacttcaaccccacaattaaacatagtgtatgacacgcccgccgccgaaacgagttgtgtcttacaccaatcagttagacaaccgcaattaacaagacacagacaagcttgtttccagctccaagcacaactgtcactgctatgctacccaacaactcaggtttaaacctgccaacggcgtcagacgccaacagaggcaaggacaaggacaaggacaaagctgcggacaacaagctctccaagcctcgacctgtcacgtcctgctctgcatgtcgcattcggaaagtaaaggtatcccaccccgccttctcttgactctcctttgacatacaccaatctttacatctggagtacaagctctgatcaaaatctgctacttaacatgaaacggctctacaagataatttggatgctgttccagtgcgccgatagttaactagtggcagtgcaaccgcgcttctccctgcagcgcctgcatcagccgcaaaaccccctccgagtgtacatacgccagcacagttgaagaccgtgaggcgatcgcagccgcagagacgatagctgagctccgctcgataaggagtgagctgcaagaaaaactggcgaagggcacggccggaaaggtccttgacgggggcggggaggatgaggaggcagaggcgctcgaggccgtttatgctgtcttgagaggaggttcggttgatctgattagtgaggtcgttgggaggatcagagcgggtgaggaggtgggtggtgttttggccgggttaggtgtcaggtaggcggttcgaacgggttgggctagatggtgctggtgatgatggatggatgcattgaagggttgaatgttactgatttagaagatgggtgacatggtattataggaatgaaccgcccttgctatgaagacctggtatagcgcttaacccaaagaaagaaatgaaactatatatagcgaccgaagggtgagggtagaaagggaacaacgctcgaagaggaagagaatgatatatatacagtttctgcggatggttaggaatcggcagtaaagtaaatgggaaataagggcattagaaagctcagaaaaaaagcgagctgtcaggtcatgaatacatcgtctcatcagcatgccgggaaaacgcaacgccgacggggccggaaccctccacttttgaccccaggacgctgctaaagcagtccatgagttcaaagtcctctaggaccgccccgaatccgtagcagcgcaccttgttctcaagcgtgtccatgatcagtttaacgtcgtcccgcgtcaacttcgtatacatctcatggttctttagagcctggagtgccattatcggggtaacctgtccctcagtgactagttgtcggctaagattgagtagcgttgtgaggttagcatgcggcaggtcgtaggtcttgtgcggatatgtttgctcgctcgtagtattggcgatgtagcttggcggtgggcaggtggccatcagcgcgtgccctgaaaatggcatgtcctcatcatcggcttcagtgatggatcgtcggcagaggtagtcggtatgatctcgacagggtgattccagcctattcagagtcagaatgaccttgcaaaaatattaacgtaaaacgtacgctagaatgaagtcaatctgaagctggggattgtcttcaaatatccccgctccttgaatcggcgggcgacggtctatggcggcaagtgcatcacacggtactgtagcaataccctgattgttcggcccgacgtccggaactgacgagaagtcgaacttttccactccattaaatttcgggctcattcctgatgacaccgtcgttggcggcgtgctgtaagtatgcgccgtaagcgaagcgatgcccgtctgcgatccaacgctcccagctccaacgggactggagtggaatcccgatcccatctgtcgctcggctctgcggcgttccaattcagcatcgtaattgatattgtgggccactaggatctctttcaacatgttgttttcctccgatatggagttggccatttcacgatgttggtgaacagcaaggttcgcagcagatatctcctgagtgtacgcttcccgcaaccgcgcaacttcgctctccaacgctctgatgtattgctccttccgctcacgatgtgtcctagaggaataagcataatcctagaggttgatgttagagttcctacctctgcgcctgacggttcaactcttgtcgccgcgtaagagctggtttgctatcgggttttggtcctcttcgtttggcaggttgcccgtctaagacgtgttaaccaggaggtccagtctaggagcgacgagaacaaacctcgagtagtcttcttagcctgtcctccagcgccaaagaacttgaagaagtccgtgctgattgaacccctcataccgggcgtatcttggcctgctgcaggtatcgagtcagcgactgtgcgacaatcgttcaacgccgtggaaaggtagagtaagacaagccgcacgtcacgcagagggccagcattaggataaagagaccccacgtacggacaataaaagaattgcccacattccagagtgcatccacaagaggtacggaaagtgtaggagcgggtgtcgtttaatgcttaccaggtgaagcactctgcgataagctttgtc

SEQ ID NO: 5765 - DNA, 2872 bp, Emericella nidulans
cccccaaagttgagcattcttgcactcggtctagacctgccgatctccccttactgaggcgcggcgagcctggacctcgaccacggaccgacgcagggaaataagattaaacaagggccatggcggtggctgcactgggtgcactgagtggctgcgctgggtggctgtctcatggacttctgggacggcgtggcggtagtttatttgacattggctatgggctgacgccgttcgatgttcagacgagtcgagtgaccagacgtagtagaacagggtacgcagatagtacgtagaaagtaccaagataagtactaggaaagtactaggaaagtactaggatgagtaccaaggtaggtaccacgatgaagtactcaaagttctggtacgttaagaacgctgcggacgatcgcgcaagatcacttgcttgatcggtcagaaatatatatatctgacagcggagtagaccgtctaagccagcatggcgatggggatgcctttttttaaattatactttttcttttatacgctttatatgttttatgctagaatactgaaatatgatcgatataggtcgccaaatactgagatgcatgctgacagcaatctactgcatcgcaggctgacacatccagtgcaatggactgactcccgataaccgtagccgatgaagccgatgacatcaacgcaacgcggggctgatcgacctctcctcttctttcttcttctaccactcgagcttctttagcttcacttcactcactcacactcacagttctcgtacgtcttactttcgtcctgtctcatgttctcccgtccgcttctaacctacccgctccgtaggtccgttctcgcctcactaagacaacgtccactcccgagctccccgttccagttccagacgcagttccaagcgattcgctgctcttccgccatgtccggtgttagcaaggcctgctgctcgtccgtctccccccagatccgtcgtcggctcgctgacccgtatcgacagcatccccccgatcgttgccaaaggctaccagcccaagggcgaatacaagaccatcaatggcctcaagacatgttcgtccagctatccagcgtggaatcgagcatagctgacgaaaacagacgtgaccggcccttcagatgccactaaggccatcctcgtcgtctacggtacgtaatctaaatacccaaacccaatcctttaaacaccaggacctctcaacctgctaacgctgccagacatctttggcttcttccctcaaacccttcagggcgccgatatcctcgctacctcgtcgaaacagaaataccgcatcttcatgcccgacttctttgagggcgagcccgcagatatcacctggttcccgccctccaacgaagaccagaagaacaagctcggcaacttcttccagacaaaggcggcgctcccaagaccctctccaagatccccggcgtcgtctcggaagcaaactcctacgccccctctggtggcgccttcgaatcatggagcatcctgggctactgctggggcggcaagatcaccgttctctcgtcgggttccgagaacaagacgttcaaggccgctgtgcagtgtcaccctgccatgctggaccctaacgatgccaagggcgtgaacatccccatggcgctgttggcgtctaaggacgaaaagcccgacgacgtcagccagttcggcgcgaacttgaaggtcgatcactatgtcgagactttcccgacgcagatccacggctggatggccgccagaagtcagttggaggatgagcaggtgcggaaggagtatgagaggggataccagaccgcgttggactttttggcaaagcatgcctagacggttgtgctcagtctggtaacagatgtagtgcgtagtctacgtaggctagtaattgatctactgtctatcgatctgcgttggtgacggatattcgctcttcatcgagatctgtgtatggagtttgtgtacggatccaatcgagcctttcacaatgacgatgtgaaacagtcatctgatgttggaaattggaccagaccacttaagcaaagaagcgcaaaagcagcgtcatacctcgacaactgacaggctcaatctaccagtcctacaaattacttccaagttacttgggaccagaacctaagcctatctgaagctcgtgaaccgtccgcttcacaaaatatcgctctcaacctttcagaccaagtatgccttttccaccgcgctttcgttctaattgtccatctcctccgccttcctttttccctcgcgatacaactatcatccgctactcccctcgtcattctgtctcctccgcacactgcagcagcctttcacattcaccgcggacgtcttacaccaccataacaagaaagcacgtccatactcgactggagacgatatatcccatctttacccgtcgcaggagctgggagcgtgcttctgcgccagcaccgcgatatatcgagtatattgaaccccggaaccgacagagggacatcgaatatatatctatcgcatgaacggactttcttgaccggtagagcgtcatttggccgtaacggatcggtttgttgttcgctgtatccggcaacctttcggctggcccgggacgccgggggcgatctatatacttcccaaaacggctaccgatctcaccgcgccaactcaactggaggttactgaggattgtataccatcaccccagttcggacccctcccagcccagcggaaccgctcgacagaaccatgaagtgtcttcatcatgtgcgtcctatgtagcgcagaacccccctcaggatctcaatctgtttcgtgacgtcacgaagtatatgaagagatcagcataaaacattt

SEQ ID NO: 5766 - DNA, 4866 bp, Emericella nidulans
  unsure (1)..(4866): unsure at all n locations
attgtcgacaccccaggtatgcggaagaaaaggtgcgacgagactgacaacatccgaaaggggatggcctagcgtcgccatctcccagtctaagacaccgataacgcggggttccgtcttgtggaagataaggttgtcaatcttgtagtcgccatggacgatggtcgtcctgtcctttggctggtttgctggttctgcaaaaaaggaggccatctcttctaggtgggagagagggccgatggggacgccggtctcgacgtctgtcgtcgtagcttggtgtctgctcaacgaagtaaatgttctgacttgccgccggtagaagcccgagttcttgcccaggttctccaggccaagggcgctgtaagagagggtatgtagattcatgagcgtggtgattgcggagcgccacctgcatctttcattagcattccacatcaacttttttggtttctcctctccttttttttttttttgcatgcgagcatatgaaacgtataggaaaggacatacatcgcgcctctctcacgggcagaaacccccggcatcaacgggtccgtaaaaacccggccatccaggaattccatgatgtagaatgcggtcccaataacactctcgtcttcgcataagacgtataccctgggaatcgggacatttgtatccctcagcgcatggagaatgcggtactcgcgctcgacctgatgtgctgtcttggagaggagctgcccggggggtttcttgcggaggacgtagcgacggacttcgctctgaggggtcaggaggtaggtcggattggactggccgaaaccgaactatctcgtttaattgtgagcgtaaactggaagaagagagtgttggcgcgtttcggtggttttnctataggtgttgatatatgcgggacattgttattgatatacctttctagagaagggatgtcaattccttggcgaacaggacctgccatttctgcagcagtcttgtctttaaggctaatgaacagccgacctaggtagatgagatatatagtaggtaaacggggtcaaggtaatccctacccctcctgctggatcacttatacctcggatgccgagaagccgtcagatcgtatcctgagaggggagcggggtttcctgtattatacacttgagaggcgactcatgcgatggttctattatgatttataaatacaattgagtcagagcgaccgaattaaccatgtcgctattgtgaataatacgaaaatatgaaattgtataagaaaaatgcggggaaggccgaatcaatatagcacagctatgatatgtgaccgtttctcagtaggctgatagagagaaacatgccctactagacgcagatactacaaattttgagtgctacagatacaatcgagatagtatgtttgttccaaggccgaatctgatccctctcacaaccacttcttcaggccgtgagaccaggcacagcttctctatcaatttctagaggtgtaactccaatagtatttccatctattcactcacttgaatagtatgaaagcccatctagctttatggaagctggcaagataggacagcctccgtctatgttggctgctgtggaactgcactcagggacaagttaagattacgacgacttatacgaccagtggatccgcagaggctctcagtcaattctgtaatatggaacagtattattcattccagttcagccgcgcccttggctgcttggcccgaatacagcgctaggaaccgctgtccggcccaaacgctgcaatgtcagctacggtcactccgtggcgagcaccaggaggatcatcacatgagaggacgtcatccttcgaggctagtgcccatgtcagctggatcctcagggtcgtatattttctcgaagctttaggtggaataagtagttacaatcgcttccctgctgagactttgatactcgaagcatattgctgtatcgctatattgcttacacaaacaaccctaatggacggagaacaactcagagaaaaccacacagaggtagagccatttaccttctcggtaataaatgcttacattacacttagccgctctctgaccgtgacaaacatatcctgcgtacatacggaacactgcctcgcagagatttgcttggactgcgggccaaggtacagcgccttttatctttcgtactaccgagctgttgctgatccatgacagaagcgggtctactttgactcgggcgatttcgctctctctgcagctagcaagatgagtgatgataacggtgctgtccaaccgggcacggcacaccccgtccgcgccagtatttcgcacccctacgcgccactgccgggcacgagtaatgcccccaataacgctaatgagaactttcatggtgataaaaatcccagtcctgagatcgcagagagccctcttgggcaggagacgcaacctgatgaggagtacatctgggagaacaaaggggcttgattaaccggtgaatgcttttaaaacatttatataggcgtggctacaaggtcagatctgcgtcaataacctcaggcctggatatttgaggaggaaaattgactgatgtgccttgagtacaaattgacagcgaatatcgctgtatgtatgagggagagagaattagatccagcttctacggcgtcacgctggcaagaatatcctcaatctgcagttatagattcaggagctacagagaatctaatagaggatttttcttcataacttacctccttggtgtcttacagcctttggaagtgctatttctattatctctccaagttagctcttactaccttatagagatactttgaagcgctgcactctttttctcactatcgcatcaagagcaagatcgaagagagcttgatcagtttacacctatgggctatgcttctgaattgcaaacccggtatggctcaaatgagttcttgacgagtgagtggaaactgcagtccggaaacggggaacccagtctatttatgagagggtccttggaagtaagctttccagctggcgcaatcgaaagagagtctgccccagaaaacttgaggctgtacttccaccaacggaaaaagcaaaaatagcaaagataaagcgaaggataggacgagggtgatatgcaaagatgggtggagaaacaaagtgaatatgtctgagtcactttcagcctctctagaggatcaggcaatagctataaatactttctcctgagcaacaaaggccccaagagtcaaattgatacgaccaaccaccgagaaaaagttcctcgcgccgccaactagggagatttagagtccaggatctcattggaggtaaaatcagctgtgcccctggttgcctggggtgtgatttagtgaataatgaactcatgcggcgccgatacgagtggcgcccaggctgcgactgaaggcccagagcccaggaagactcgtggtcgcgcaatctgaatcgtatagacaatgtgattgaaggagagatggcaaatggagccgatggccagcgatcttgcggtggagggagccccattctaagacatcatactgtagggtcccgtaggcgaggtccgtgatggttcgtccgctagcggaagggtgggtttggctgagtggaaacagcaggccgggatgatcgttagcacaacccggggaaacgctaagagtcttagtccgaccagacacttatgccgagcagagcaagttaaggtagttccacgaggccggagaaaaggagctgagcattgtagaggaagcgtgtcctacagtctgtggcaattgcagccgcaagcagaaaaacctccggattcaggaaggagggagggtacaaagcagccgaggtcacattctgctcgcttatcctctgctgttccctatccaatcagtattgtgcctagtttcaccctactgcggcgtagtctctctagtgggaggctggaggctggagcgcccaaacactcatgtcagtcatcaaaagtggtcgaggggctttgctcgtgcgccgtgtaagaggccccgtagcgtggttccacccagcgctttctgggattctctcggtcagcccgggaaggaaaaaatgattttcttagatgattttctgttgatctgtttcaggattgtcccagatgttctggatgctgtaatcatgactgtcagcatggcgtaaccagcgacaatccgcgacgtgacgacgcaacctcgcacttacagtaggatttacagtccaaagagatactttgtcagaagattcgatgtctcagccaagtgataaatagtcgctgtttagcgtgagaaattagcaagctcagataagaagatgaagagggatgcgggcaaggtcngnacgtcttaccccgtattgtaaggaccaaaggggtatcggccggatgttttcgcccagccttcaggtctctcggctcacaagcccacgattgtttccacgaaaaactgaatcatcctcaaactagcttgaatggctgttgttgactctccggttgccctgcagattgatcctaagagaagagaatagcgatctctggtaaaaggcgaaacaagccgctcatgtgatggatcactgattctatcaggagggacaaagatagaaagcagagccgaccggctgggctgaagctgacactgccactctcccacaataagggtgcatcacaaaaaagaaaaagggtcccttatcgcgaggctggaactgcgaaccactcactcctacagctgagttctaaaccattgacattgagagccgagggtgttgaatattctgcctaaggctactattgttgcctgaactgactggtgagtgatgatgactaaccactttcccaaaacgggcttgttagagagcgcga

SEQ ID NO: 5767 - DNA, 6477 bp, Emericella nidulans
cggtatacctaatcaagaacaaataaccggtattgggtgaaagatcaacccctcgatggaagggtagcagagcggaatacttaagaacggagctttccatataggtgacttatgacaaatccaatggaactaaaaacacaaaggcgagagccatatttggtttctgaatgcttttactaaatttctggatggtaggtatgtgaatcatatcatatgtatacaagaacagcagggaacctcggtcaagaagagaagataaggcaaacgagaatcgaatcgccgtagctgcatagaacagatagccagacagcgctgaaccctgaaatgcgaaaccagatagatgcgtgcagattgcttggaagacgctagatgctcgtgcagagagaacataagacgagggcacctacatgtcgacttgatgtcccgaagtgaatagatgaaataaaaggaaaatgaagtaaggaaattgaggtcttagcttcgtgcatacatgggagaatagtgcgacaaatgagatgaaaaagagtaaatgaagcaggaagaaacgccactctaatgctgctcaacaattatgttttgggctttccgcatttctatcccagtggaatccgtgcgaatggataaaagaaaaggcgacagaaaacatcagcaaaatttctgcccaggcgtctctatcaacatgatccgtggatcataatgtctttcatatctcgtgatggcttgcaggaagctcgtcgggggaaataggtgtcgtgtctcgagggtggattatatataggaaacaatgcggagggcgttcatatcacagacgtggaatgaagatattaaaacgtatcgcgtggaacaaaatcgtgcctagaaagtaatatcgaccgatagggtacgatgggcgtagccatcacgcgtgtagataattactgtcatgaacgttgtgagcgactcatcgatcgttccgggacgtttccaggcgtaggcgagtaagatcttccaccaccgatcaggtcatcaacgtcgtgctcctggaggattgcggagtatttcggatcccgcaggaatttgggaacagaatcctggtagaaattagttatcgaacagtaatatcatgtatcggtgccacgaacgcttgacataagcttgaataccgatgtttgtgccatctcaaacagctggactacttcttggagactcttgagcattgagtcgtcgtcgccaacagctttcgtcatgcgactggccagactgttacggagcgcgtggtcaatgttgagctcgcagggagacccgggtgctaggaacgcattgtaaaggccttgtcaaattagactgattgttcaggtccaaatagtttcgtttgggaagtatgacttaccatatgctgccgcaagcgtttcccgtacagcgtcgggcttcttgaagtggcccaccttgtcgaatttatgatactgggtggtgaactcggagacgtcaatgtagaatgacaggttttcttcgcagagtgagaaacggagaaattctcggaatagtaggcgtagggcagggtcttgcaagatatggttcaagcgtgcgttattcgaatcccgtgggatgccacggctgtcataggtcgtcgtgtcgcgaggcttgtcgcgagcgagccatccgcaaacccgctggccacgctcagtgatggcgtagatcgcgttcttcgagggttggaaagcaactagtgagttctcgacctgcggcattgaccggtcctcctgaagtacggtgatcaatccatacttaacaaaaagttccgcgatcagaaccgtctcccggggctcaatggttgtcgaacagtccatcagccagtcaaccgcagccttcccagtgaaagtattggcgcaaattttgtcgccgactttgcgctcccgagccatctttactccaaccagaccatttgagtagtcgctgagggaatctgaatccgagctcgagacactgctcttcacattagggccgtcctgccctgcgaatcgacggaagatgacttcgatcgtcgctcggtcgtgggagagcttgtcggtttcggtatcgcgctccaagttgacgagttgcatagtgttgcggggcgactccaggacgtcaataacatggcgcgcagtgatgccgtttctctgacagaacctctgcaaaatgttgatacctttcggagtaagttgatataaagcgcccttcagcggaaacgtgtgcgagtatttcccatccacagactcaatgaagcgagcatccacaaaccgctgacataccgatcgagccatttctttcgccattgagaaggtagttgttgtagtagtggttacaatgcgggaggggtctttcgggtctggcatccggttcgattgagagaatttgagggagcccagattgttaatggcttcctccgatgtgaaagtgtggtcatatttcgtaaagcgaacgcgatgcgaatccagtttcaagctgaccataagagtagagaaaagatccatgaaatcctacgaaagggcacgattgtcagttaatgttcccaacacaagcgcttcgtttaaaaatgcaagtcgcattattaccttggtgaaaggacgatcatcctccgtcatgcgcaacagccttgacgaggtttgatgcattttggcgggagaaacaggtatgttctcagagatgggcggtacaagctggatggtctggcggcgccgttctgcggcagggttgggctgctcagtgaccgctgataaaggttcgaacggggcagagctcgattgctcgctgctgccgctaccgtcggacaatggcggggagagtggaacaaagcctgagatttcgcccacactcagttgcgacgcttgcgcgaatgcttctgtagactcccggatgaggcggactgccggagggaggaattcgtggtcgagccgattgacgagagatttgcgagacgctagaagtcttttctcgagcgagacagcaaaagagcgtcgattccgacgtgaaatggagccgataaccgaacccagtaaaactgggtgtggttgtggtggcggggacgtcggacgtgataagggacgaggtggaggtgaaagacgggagccaaggtcgaccggggaggaagacgaaggaacagcgcgaccacccgcagcagcagcagcagctgtagaaggaggaggggaagaagaagaagggacggactgaggctgataatcaatgagagaagagggaggggatccttggctgaggggagcggtagatatggaagttggcattgaagagtgcaggtcggagtgggagtgggaggctagggcagactaagtaaaatgagaaaaaattaaaataaaatacagtacgggatgacgaaaatcagactaaaccagaggggacgaaaaaaaaagggcagaaaatcggaggaggggagggggtgggaagggagaggatcaaagggagaaaggaagggaagggagggtggaggtggataggtaaggaaattaaacccttcagtcttcagactcttcacagttcactcttcatcgactgcggggtctggctctggttctcagcccaggctctggctctggatcttgggaattcggtcttctattctgtacagagagaggcagagggaaaggataagtatgctgacagcagtacggagtatctgtgagtaataatattaacatccttacatcccatcagcccatatttgagataatatttatcctcttcgcttccagggccaggggtcaggctcacctagcagaggtgaagaattcggcctgtcattcccgacccaccgggcacgcggacggtttcatgcaccagcacaacgtgggccaagagcacttaggcagatgtggatggatcggcctctggcgcgatcaaggaacctggccctgctgcaagggtgttgctgttgcaactttatcggcgcatgtctttttgctctgctgaacaatgcgatcaaggttaccaggaatcctttattagagactgtaaatcgtattccatggtcttttcaccttattggtgaaattgaaagattcacctttgttctcagagaaagagggaactgaaaaaccctatgggtatggtgctatgctagacggacaaatacggtaaattacattatcgggggcgactaacgggagaaactgttcccgttcctgattgttaccggaaacagccactcagcccacttccatcaccttctggatggcttcgatcttgccttacaattaattatctctgacagagggcctccttatttaaattgtccatgatttcttgtactgagaaaagcagctttggacctgcgtcagcagcgtggccaccacaaccgccagcttctctacgcaccttccattttaagtaagatccttctgggccgctgacccatacaccattcaaccaatcatcgagatgtgagagcggctgctttccggttgtggattagtggactagtagtcccattcccgagtccagaccaaacagcgcttcaagcaggatttgcgacggtccgtctttcaattttcttgcgatgtgcgcctatgattactggaaggctacttggatggactgtgccagatggatctgttggtggtgttgtacttatacgtacgacgttatttcccttgctccgaccgtagccgccttcctgcccacgtggaattccacgctgcggcttgggaaccctggcggatggtgctaccgaagacgcgtgtcacgtgaattacgcacttaatgcagatctcaactctgggaatctgccctcgcgtgccaagagaagacctagaaggcttccgctcagataccttgggcttgcacaggctcgaatctcgcattcctccctcctcgtgtttcttccgtggactcctagttttggcggtagcaaacaatccccaaaaccaggtctgcattacaatacactcaataatgttcatagttcgggccacacctccgctaatccacctagtggattctagcgtggctgagcggcttcagggatcgagctccttggaagttggataattcatgattttcaccttccttattgttaactagcgagatccatgcggatccacgtggacacacgtggactcgtggagagaagcggccgtcattcgggcgccttggcttcgagtccgccgttttgaaatcatcgttggagcggtatctcgtgttttccgtccttgtcattggcacagagtctccctacggaccgtcctttatctcaatcttaccttgtgattacagagatgtcgtaagagtaagtgtcattgccccaggactcttacgatgacagtgggaactaactattcttggagatttcctctcggtaatagctcgggctcgcacgccctatcgttatggtgttgttccccgcagcaaggtatacaagtatccctagccgtcacgcaaagattacgagagccgcgcaggccgcgacaagtcagaaatctctggtggaggagactcgatttctctaatacggatcaatgttatcgccgcaattctggtttggacgtatcacttcaccgcaaatgctccgcgcaatacgggcttcggagtacctcgaccgttctcggtcctggcagccaaaacaagaggagcggatggaacacatgagcatatagacggggtacaggatatcattatcctcgctaaagaccctgcgcatccccaatagtcctcggcgctctccgtggactccctggaagctgaggctcaaaggttgatcggagattcaattcatcaattaaggttcagcttaggaaagccatgcaaacaagctggtgatgacaaatacgcgagtcatggctaataataaaccaattttagtgattgcatcttcttgaatccttcgtcggcatttcgaacctactctggtgcccacctggagacgcaatcagggagcggtgagcatcgacccacgaccagcggcccttctggtccacttgcctcggagcatttgaactagtacaaaacgacctcggaatagtggcctgtattttcctcgagggaagttggaacacaagcagcaggcttgtttgcttcctgtttgctggatgcgtaagcttttggacccaatcaggcactgctgcagacatatcatttctgtgcaagactgttcgtgcttgtggttttgtttgacgagtcgaggctagcctggtccgaaccccaatcattcgcagtcacaacacgccagtagtaagcagaaactcaaagcatgccgatcactgatcaccgcgcacttgcaccgaaatatgtacaagggtttctgtcctgtattaccgtggcctccctgaactttgatagcaagcgccgaagggttgttcgagactcccagcttcatatcaagtcaagtcaagtttctgccgtgttatgacgactctgcgagtatcttatgctgtcagaatcacggctgaggctagtagatacgttgattaggacatatccccttagcttacgcgaaacgacaagtgccgt

SEQ ID NO: 5768 - DNA, 5017 bp, Emericella nidulans
ctcttgcttattattcgtggcacaacatggctacattggctcaagcattctcccccgacggctctaatgccgttgttatcggtccggggaatccggctttaactgatacctacgcgcagctgcattggcatatatctgccgtccatgaaaagctggctaaacttggtgtcggacatggtgccgcggttaatctgcatctaattaactcgcgcgattccattgttggctttgtagcaacctgctggcaccgcgcaatcgctgctcctctgaaccctgcctacaagcaggacgagtttgagttctatatcgacgatcttagctcaaccctagttcttatccctcgggaatcctatgctcagaatggccccgcggtcctcgcaggtagaaagtatcaagcggctattgcggagtgctactggaacgggacggaggttgtgctcgatgtgaaggagctgggcaagctaaagggcaaaggagacattggcgtccagaccgctcagcccgatgacattgcgcttgtcttgcacactagtggaacaactggcaggcccaaggctgtatgcgagcactttccgcaggagtttgattgggaactgtactaactcttgagacaggttccgctcacccacaagaacctgacaactaccatgagtgagtgtcgcggtatcgcttctgacataggactaattccgttctagggaacattcaagcaacgtacaagctcacccctcaggatcggacttacctggtgatgcccttgttccacgtccatggcctcttagccgccttccttgctccccttgcctctggcggttcagtaattgtacccaccaagttctctgctcaccagttctggtcggactttatcgaatacaaggcgaactggtactctgccgtgccaaccatccaccaaattctgctcaagtcgccgctgcccaaccctattcctcaaatccgcttcatccgctcctgctcctcgccgctgtcaccaaaaaccttccaggatctagaaaaaaccctcaatgccccagtacttgaggcctacgccatgacggaagcggctcatcaaatgacgagcaaccccctgccccctgcaaagcgacagcccggtagcgtgggtattggtcaaggcgtcgagattaagattcttgatcaatccggaaacgaagttccacagggacatgaggcagaaatctgcgttcgaggagaggaatgcacgaaaggataccttacaatccagctgccaataagtcatctttcaccaaagacggctttttccgcacaggtgaccaaggcaagaaggaccctgacggctatgtaattatcaccggccgcatcaaggaacttatcaacaagggcggagaaaaaatcagcccaatcgaactggacaacacgcttttgcaaaaccccaacgtcggcgaagcggtctgcttcgccattcctgaccccggtcactacggcgaagacataggggccgcggttgttttgaagagcggtcagaatgctactgaagatgaattgaagtcgtgggttcaagagaaactggctaaattcaagaccccaaaacaggtaagccagctatctctctgcccctgaccgggctgttgcatctttactcacatcaatgccttgaagatctggatagtacagcaaattcccaagacggcaaccggcaagattcaacgacgcaaggttgcagaggcgatgctgaagcccaaggctaagctgtaaatattctctgatatttcatgacctctgtctttcaggagtcggtaaatatgtagtgtggcttgatatatagcatgaataccaaagtacatacgatctatactatcaaataaccaacatccatttacgctccaaccctaaccgcagacttgaactatacgtaggaaaccccaaacccgttagtctcagcccataacaaccacccagtagcaagtactacatagaagaacagtcgcaaaagatgacataccggaataacctgcgctgcattcagatcccaaacccccgatttggtgtagatatcattccggataacctcccatgcatcttcttctttttcgccaaggacaatgagcatactccccttgaacgagggcgtttcgccttcagatgggtgcgcgttgagcattgcgcctgcatcgaaaaagtaggcagaaaaccatattagtaaagaggaaaaagaaaaggtatttgctgaagagcgtggccctgagcgagctagctacaaaaaacttgggttggttggcacataccaccaacaactaccttcccggcctcaacgagcggtttcacgccttcaaggtgtttcctgcatcattttccggttacaactggattgtgaacaagaggagaggagaggaaaggagaacgtacgatcggacctcaagtcttttcgcctgcgcgtcgggcttgtcggggagaatgcagagaaattcgttagacattgcgaatctacttgtggctctaaagagagaacaaggtgaagagtggaacgttctatggggttgaaactggcgagtaataagagatcctagaactcggtttgtcgagtttgtgacgcggggaaactgggcgagggtgagagtgagcatcgtgttgcaatagcgcaggtggggaagatggcgggatggcagatggggaaggttcggggaggaggcgtttgatgggtcagcaatggccgaggcggcgaagtcctaggcgtccgaggctgtagcactgcagtgtttagggaatagaacggagggcaaattcaccacgaacaacccgatttcaagccactcttaggcgacaggatatacagggccgagtcgcatagccaatccacgcggtttcaacagttgcacttgaccgtcaattgactacacatagcctatatatgtatgtacaaagaaaagcaccaaatgcccttcgctctttgctccctactttccattttatttgacgcagtcctctattaaatagacagtgaggcacggtgatggatcacctgtagcctgcactgagatccataccatcactgcagggtgaagaacgtcagacccggcgaagcagaaaagcgttcagagccaagacccggccattgagatggtgcccttcgctgacgaacaagatgagctcaaacagagcaagattatcgttcaactctatgagcctccaagatcgctgaacatataccccaagcgccaacagaaaaagcaagcataaccctagaacacaacgttaaagaaggctaataattaccggagtcggggtgtcagtttgcaactttcgcaaatagaatgattaataagagaagctgcgtaagatggcaaggcccctcgtggtgaaaccagccgcaatgcgtcagatgtacaattgcacaaggagtatttgaagatcgggaagttctctttcagtgagaaatcgatggtggcgatcggacttagtacgccttgcggtcaccgaggttcccgggtttctcgtcagtatcgatatgccagacaacgtagtttggcaagccaatgacctggtatccagcacgtttggccattctcgcaaacccttcagtttcggcctgattttcgaaagcatatgctgggaagttgatccctgaaagcaaggttagtgtcaccgcaattgtaaatgacaagtcagacgtacccgagcgatggacgtcggctttaacgacaatgttaacaccaccaataccgtcaagctcaacctccttatccttgtcatttctccagtcgcccattccgacaagatactcgcggccggtgtcgtattccttatagccttccgccaggatagtgtcagggtccagagtagcgcggagtctcctccctttatcggattcaatccaggagttgtagtcaactgtaatatcgggtcagtaaaagtcaactcaggtcgggataaccacatacagcgaccctcgatatcaacgccatccttgtagcggtggaaccaaatgtcttatagatggttagtgatttctaattaatctagtaaagatggcataacacatactcggaacgagaatatccttgtcgtgggcgataaagtcttccagaatggtatccgggctgtcaacaatatcaacatcccgccagtacacccaagagtgatcgggtttaagagcagagtagagcagatagttgcgggccctgccaatagctttgcgccggggtccctgtgcagcgaacgagtacctgtcctccacattcactttgtagtcggtgcagaaatccttctgtatgatggtggcgctccgaaaagcgaccttgtcaccctgatcctggatccgctgaagttcggaggcgagtgttgccaggtgtcatccttgggtccccaacaaggaaagctaggtcaatcagctcgtgcgatacgtcagcttgtagatgaggtcgaagtatctattcaaatggaacgaagcatccctcagcggagtgagaataagaacacgctcacggttctggacggcctggttggtggatttgataggattgaggtcgacgttcttgatcgagctggaattcacttcgtaaggctcgtgatagttgaataggacgggagtctgagcatgagcggtccattcggtaatctcattgagactcatatccatcggtgctttaggaggcccatagcaatagaaactaagcgtcgaaagcgattagtatgttcggccgctttcaaactgaagacaggcccaatcaactcacttttgcatttccgaggcagagctgcttattccgcgccataataaaacaatcaagccagtaatggccagagatattaagaagcgtgtcctcgtcactagaactagaatcgctcgccatggaggcagcctagctctagctgacttccacgtcacaccaccctttggaagtaacatcctcgtgtgcggtatatgagaaggccgcggaggctgcggagctcggagaatttgatgagtagtattggtaaagaggaggcactgaaaagtccgcagagcgcgatagtccccggcacggtaatgtcacgattgttg

SEQ ID NO: 5769 - DNA, 6727 bp, Emericella nidulans
  unsure (1)..(6727): unsure at all n locations
gatatcagcccgtacaggtagacacagaccatggcgatgtatccccacgcatcttgcacggtgtcgccgcgcgctgaggtgccggcagggtctcgctcgaagacgtacccgccgatataccacataggcaaactgccaatgaacgccccgtatatgagaccactacggcggccgactctctctacaagccatacgctgaagatcaccatgcccagagttttggcgacaccgtagaatccggttgcaaacagttttgtgtcggtgctgttgatgcccagggtctcgaaaatgcggggggagtagctgtactcttcaatgagccatctccttgaaattcccagcagggtggggggaaaagaagcataaacgatgaagaagaagaagataacatactaagtgatgatgttgaccccggtcaagttctgacaggccatcagcaacagcccgattccgatcctgttcctggtccctcgctgccacaaccgctgcacgtaataccacgggtcgtattttctcccctcaggaacaacgtcgtacagaaactgctcacggatctgttgcagttcgccctggatgaacgggtggttggcaggtaatctccgcgcccagacaagactcttttcggcatcgccccagcggtctttctttgcgtaccatcgtggcgattcggggcaccagaagatgcctgctaacagcaggccgccagggagcagctggaggccaaggggaatctgccactgcgccatgcgtgacgaggagatggtgcgattgatggcatagttgatccagaaaccgagcatgccgtccccctgggagcaaatctcgaagatcccaacgagccggccgcggatagatgcgggtgactacactcgttagatttccttttcttttctctcttttaccgtgagggggactccataacatatggaggcgtaccatctcggcaatgtatactgggacctggagagacaccgagccaatgccaaaccctgcgatggcacggccagcatagatcagccccagatgcccagacgcggcggtcttgtacgtgtcagtgatcggtcagcctggctagcacaggtatctctcaccatcagactgccgccaatgcaaaagacacagacggccatgacaatcgcattccgccgcccaaaccgctccccgagcggaaaggtaagcagcgagccgaagaaacagcccgcctgaaaggtggatacgatgtttccctccaacgtatccgtctcaatgtcggacgcatggatgaggccaaagtgacggcggaaggagtccagggccatagtcccgccgatgacgctggtatcgtagcccactacatcattacccatcattagccatcgtcaacaggttaactgggatatatcatgaaattaaaataaggtaaaaaagaacaaaataaaagaaatataagaaaatagaataaaancgaatcagaatcaatgagagaggaagaacaaggcttgttagtgcttactggcaatcgcgcccatgctcacgatcgtcgtgataaggtggatccgccaatttcgcacctcaggaggatcattgctgttgttggcatggagactgaagcccatgtttgacggtggtatagggccaaggtagggcaaagcagggcaatactgctggtggggcagaacagccttgcgggaggctgtgcttgctttttatctcccaacgaggcatcttcaaacctcactgagtgggcctcgacgtaccccgcaaaccccagatatcgcgggtctggagtctggacaagggtcccgtccccgcgtgttagaccattcatttaagttcctgtggtatgcatgggcggttccggtccgcgccttggccccagtaacgctgctctttaaagatgcgaagactgcgccgagaccgtgtgcgggcttggccacagggtcccgggacttagggttgctgtagatctgcaggactggtcagtgcacctacactggcatcagtactatatcaagggacctctgccgaagagacaatatcgggagagatgcaggaaaggatcaatgagggaggccgcttctgccacaccttgtagaatgtctagttcccagtttcgtatcagttactgggcgttagccaccggacggggactactgggcgttagggcttctgtatagtgtaaagcggtacgtcgtccacgtctccgtccacgtctatggcgggtggattccgtgtctatgagtgcgttaaccagaccgagccgactacaatctcgaggggataggtgtcctcttctaatagccctagaagctaagcaaagctaaacactaaggggcgagaaaatacctgaccgaccagactggcacatttagaatgaacaggatatagatctatattgatataatcaatgtccaaaccccagacagccgattggccctggactctacactttccagtctttactagagcggtgggccgatgtccatagccaacccgagcacgctgtcagtttcgcccttgaattatattctcgtgtaactttattgttaatagttggcatatcttggaagagctcggcttgaccagggctcggctttgtgctctgtgcacagaaattggcttactggatgggattgaatagattgcagggtggaagggcagttctagggttgggagggggtcaacctacgggacggtgttccctcttctcgtccgggggttggctttcgtgttttgtcgcggcgttctgctgtctccttttgttttgtggtgctcgtcgttccgtcgcgtttctgttgtcgggcgttcccgctggtgtggctgtttgggcttttcctgggtttggggctcgtttcgtcttctttccgttgtcgtgcctggtctgttctgacctataaatatcccctggaacatgccgtctgttcctcgactggataggaaaaggaaacgcctcccctggatctggtaagtagggtcccgggtcattggggtctgagctaaccggtcccagccatcaggtaacatcagcataggccctcgtaccctggtgagtcatagtgtcatcgatatggctggtaatatagagtagaaatcacaaaatatctgtctccagcttccccgtcttagagcctaccgcgcttaaagtaatgggccaagggccattgcccatctcgctctagtgggtgagcagacaactggagtcgtgccgacctgggtgagcaaggagcttgtcaggtgggtgagtgagcatctgtggctggccagctcaagacattcgccctcactagtgaccagccctacgccgccaattacctggctgctcgaagcgcccagttattcagatgagctgcaaatatctaatccagatagttctataataatcactggttgccaaattagttccaaattagtgatattattggctcttgaatgattgacatcgcaattgggaccagtctggagattctaggcgccaatcttcatcaaatatcatgcgctacagctgcaccgcttacgattgctaaactactagactactgaaacaatcctttgcaggggatgttataagatggggtgctttgtagtaacattattggctgtcagcagctggagttctgattgcccccaagctaatgctaggtgactgcgccgcatgttccaactagcggagccgtaagatgagataggggccttatgacagctcaaatcaaattataaaagaagctgaagagttagccttgagcctattccatcatcttataaatgcttcttttttttttctcgtcttatctttccttattgatcaccctttctttcagcgtcaaggctcatctaccctgatcccaagccatggcatcgcaaacgactgaagaccaggctctgcaccagttacaacagcagcagtccaagctactggacaagattgatgatctacgcaacattggcgttggcagcctcgtagagttgccgcaacttatcgtttgtggcaatcaatctagtgggaaaagctctgtgcttgaagccatctcgcgtgtcggtttcccgcaaaaagcaatgtatgcacacggttcgctactgaggtgatcttgcggcggaatccagtgtcgaggatcaagatctctatcgagcctggtccctcacgcattaacgaagaagagaggaagagacttcaaagctttaggcacgagcagttttcgaccaagaacgatctgcctgccctgattgagaaggcgaaggagtgcatgggcgtttcagagtccggcgggctgggctttagcgacgatatcctaaaggtcgagatctcgggaccagataaaccagagctgaccctggttgacctaccaggcctgtattattcaaccagtcgagagcaggggctggcgggtatagggatcgtccgcagcctgacagagaaatatatgcagaattccaggagcatcattcttgccgtcatcagtgcaaagaccgactatcatctacaggaggtgttgaatatcgccgcgagattcgacccggggggcaagcgtacgctgggaatcatcactcaaccagacattcttgaggcgaattctgaggaggaagacacataccttcaattcatgaagaacgagaaggtccgcctacatctgggatggcacgcactgcgcaatcggtccttcgaaacccgggacgtatcggacaacgcccgcgatgagcaggagaaggagtttttcagccagggacgctggacgtctctgccgcgcgaggttcttggagtagacaccctgcggcgtcggcttagtagcgttctgctggagcacattcgtcacaacctccccggattgatcggggatatccagcagaagatttctgaccgagaacagagacttgcaaagctcgggtctccgcggtccaccattcaacagcaacggggctttcttcttcagattagtagcagcttcgaacggatcgccgcgcaagcgctgaacggcatgtatgcagatcccttctttggtgggttgggagatgcaaaagggacaagcgatattcgacgcctccgagcagtacttcgacaactaaatgaactctttgctgaagcgatgtcgattcgaggctgtcgacgcacaatcgtcgacgaatcgacctcaggctcggcctctacgacggcttccatgccggggtcagagaacccgtacatagacggctgggcagcagagtacatcgaccgcggcgcactcgaggctgaggtcagtaaacaagcacgtgaaaaccgtggcattgagcttcctgggagtgccaaccagctccttgtagggagcttgttccgtgatcagtcccatccatgggaggagctggctaaagcccatctgctcagagcttgcgactccgtgagatactttgtctttcttgtcctccagtacctggccgatgagcatacatcctccttgctcgccgcatccgtcattgagccggaattggagaggatgaaacaggctctctttgacaagctcgacgagcttaccgcgcatagaaagcgcggccatccgttgcctgtaggcacgagtttcctagctcaaatgcagaaggcgagaagccaacgtttactcaggtcgctgaaactggatcttcttcgacccggcaaacagtctgacacagaggatggaacaatcgcttactcaatcaagaccttggagcaggctatcactgacctggagatgtcccgtgatggatttgcagctgctgagattatcgaccagatgcaggcatattatgacgtgagacacatttctttaatttctcatggtaatctcctctgctaaatgctgccagactgccatcttgacatttgtcgacaacgttgcaatactcggcatagaaaactgcctcctttaccctctccagcgcatattcactagtcaggtcgtcaatgatatggaagtttcccaaatccagagtcttgccgcagaaccatcctatgtcaccgaggaacgcaagcgtttgagccaagagctggagaagttgcaagctggtttgcgcacccttaacctcttcaagcctatgccaatagacggcctatccatattcggtgtgctccctttcggttttccggggcctgatacaactcctcagtgagtgaactgacaataatatggtaggaacaaagggcgctacatccacgtcagcaagcgccaagagcactcctagagtggccgaagcccctgttcagtgtaagtatgcatccctcactctgggaattctagctaactgcgccgtaagcggagaacgcttcaagtcccagtaacgctccagttgctaatacccagccatcagtctcaaagagtacatccagcgccactccagctccctcaagcactatctcaaagccagctgcagatgcttgttcggccacaaatcccagttgggatgttcgtgcgagtcaaacaaactcctccggtttgactgcacccgccaaagttacaacccagtctccatctcctcgtgcttcttcgccggccattggtgtatcggcagatagtacgaatgcggcaccttcgactcgcagcacgtcaactacctttgattcatctgcaaaggggagaattggtgctgtctttgggtcgtctggcccggaaattagtgcccctgcaaaaagtactagcggttctggttctggactgttcagcccttcggtggacgcatctacaagggatacgggcccttctggctctggactgtttggcgccgtgtccggtggccctgcaaagagtgt

SEQ ID NO: 5770 - DNA, 4812 bp, Emericella nidulans
cgccgataatatcactcacttagcgatcgcgcaggtcagcgtcgcgattattaagcgcctggtcgctcttccgacgagcgaggctggcattgcgtaatttgtcttcggcggcgtcgcgagcggcagcaaggtcgcgattctcttgcagtagatgttcgagtcggaattcaagctcttggaggttgttgcatactttggcggtgccggacactggccggtcggctaggcgaccggggggaactcggcgtctcaccccagccctcctactactattagcatccaagcaagaacgaccatcaaaaaagacaatcaagagagactaagacttacatagacgtccgtcatgctgcggaggggctttttgcccttgtctctgatggggtcgtaagaggaggaagatgcgatctcgccgacgtccaggtcggtgggggctcgagctggaggctgggggatggccgcctgtgattggttggtgctgtctggagctggctcatcggccgcaacaatcgctgcaagtgctgctgcgcgcagatctccactggcactgtgcacgacccgtcgcagcgagtgcgtgctgcttttggcgctcggcggcctgcttggtcgaagaactggtttgtcttgctcgggggttttgagaattcctcgtaaccctcgctccggagagaggttcttggggctaggcttctgcaccttctcccaatcgtcgtcggactcgttctcaggcgtaggccatgcgcgccggcccagcgcattctccgtgaattttctgactggtgtttcgggtcgcgggaggacatgttcgggtttcatctccagccggggcgtaccgtcccgtcccatggctcgctcatgttcctgttccgcaatcggcggaaggggactgggcgagatatctcgttcgcggcgttcttttgcggactcctcaagagaccaaggcagtgcttgctggacatgacgcccgtggatcgatggcgaccgacgaagctcacacgtagacccggactctgaaactgggtctgcaatagatcgagactcttcccgagacccttctcgaggatccttgattggccgctccatatcaatatcaggtttgttagcggggagttcccttgtagctgcaatcccaaagacatcatcttcttgagctggctttgatgtagtgtcctgcctagactcgtgttcaagattttctggcggacccgatgtttcgatcttcgctggcagttctattgaagcagcaccaacgacatcatctgcaggactgaggatatacccgctatccctgacttcaggctgcacctttccatttttagcgataggagcctccaagacctggatcgcattatcgcgactcgcttcctttccggtctcttcctcagccccatcttttaccgactgagtcgggctcgggttcgggctcggtctgcgaaagaaccctcgctcgaggttgggaaatatgctggcaatcttgtctgacactggaaccgttgtcttgggctcttccgctttctttccttgcgcagactctacatgatgtagggcccgcagggccgaatcggtgccagtcgtattaaattcaactgttgtcacgtctcgctcgatagtgccagtcatggcttgggctttgccctctttggctgcttcttcgggaattccagtcacacgctctataagagcctcaggaatagcagactccttgaactcaggtatctctggtacaaacggagccgcatgagcttcaggggacgattgagcagattgatcggtggcgtcaatcttacctttgtcccagtctatagcaggccatgcgtcttcatcttcacgggctgtttcttgagcttcgaccggctcgggaggtgtgtgggagggttggttccgaggttggctggcttgctccgcctgctggtcttctagctgtaattcttcaacgttttccttgctcttcttggaaagcggtataccctcctcttcgattggctcagcaatcggctccattgactttatagtcggtgaaattctctcgcccaccaattccctcgagtagtctgtcttgggctcttctatcatttctggcccaagtgtagaccctgggatcgagacctttcctttcaagacttccacaggttctgccagcatttgctcatcttcttttccctcaggaacctgcaccacagcctgcgggaccgagaattcatccttgactgcgtccatcgtctgaactgggtcttccctctcttgcttctcagcttgtttcttcagcttcttcttctccttcttggacattttccttgtcaaaggagcaggcgcagactcaggctcaatggcacaactctcttccgcagtagccgccatcctttccgtttttgcgacacgttcaaccgaatctgtctgtaactctagctctggcacccgtttttctcgcaaagcctcctttccagattcgactgtcattttctcccggatatcctcccgcggtacatctagctccttttcagtatcttctggaactccctcccgctcctccctgataacttcgcactgaaccggcttttctggtgccctatccgtttcttcatcccctttcgctggatcatttgtcggttcattagttgatccatgatgtagctcgacactctcaacaggttctaccgcagagaattcagcttcaacggcatcggctgccttaacgtctttcccaaccttcgtttctgcaatagcagaagcagtgacctccctttctaactgctcttgcttcttggcctgtttttttgccttcttatttttctttttagactccttccgggtcaaagctgactcgtcgagagcagcaggaggctcctcgcgagacttatctcgggaaagatctccgagcgatgttttaggttgctcattctcccttgtcgcttcaaggagaattgactctggagcttcaacttgaggagccttttcctccacttgaggaacgacttccagctgctcctcaaactcgcctttttccataggcgctggcactggaccttcgagttgaggtagccccattttaatggcagtatcggtttttcgctgccccttttgttcggctggctctaaaggagtagactctggtgcttgattctttgaagattcacctgtcctctcggtctggatagcgggctctgtagcactcacaggattccctttagaggagtagatctcttcaggggcaggagatgtacttatatcgtggactgggcctgggggtgcagaaacgacgggttgcgcatcaaattcgggtagctccgcgtcgagcttgctttcgtcgacactgacccatgaagactctggtctagcagtctcctcaagcactaaggctgtgtcttggacagcttctggaaaggcaggctcgacaagctcgtggtctgtggtgtcgaagtctaggggctcaagagtatctctggtagtggcctccgcagctgcctcctgcagagtaggctcttcagtaatcttgatgtcgctttcggccccgtcaaagactgaactatcgaccttggtctcgtttttcgtagctaaatcgggggggcccgaagcctcctccgtagacgccgtctcctcctgcacctgcgaagcagcagccttgtctgcttgtcgttgtttcttcctctgcttcttgctcagttttcttgaaggaacagctggctcagtcgcagactctacgctgacgacattttccgtggactgagtgggttcggcttctttagcagcctcagcttccgttatttgttccgggattgcttcctccaaacgctcttcgacagccccaagtgcttcgaaagtactatgtttgagttctttttgatccgcctcttcaagtttatcagttgcatcatctgaattttctttctgctcactttcattctgtacttcctctcccagacccgtgaccacctcaatctgactgacgtcttgcccttcaagcatagcatcgtcccacgtttcaaagccagcgtcctgttgactctcttctaccacttcaggatcggcagtagtaggcgcaggctcgacctcgatagcccccttgtcgacttcggtactttcagattcactctcggggataagaaccgggaaggctatgtgttgcttctctttctctacctgcgaagacacatcgttatcagtccaagtcaattctttatcggtgccgccgcgggattcggtgtcgtgggactgattatctttaccgtcttcttctgcaggcgagaatgccgtctcagcgggtacgtcaatcttcatttcacttgtgccaggtgcaacttcgttggtcggtattttggagtctagagcgtgctccgttggagtggatggtacggtatctttctccggggcgagcagcttggattggcgctttttctctttcttggccctttttttgtccttcttggagagtcctgtctctggtgtggttgtctctgcagtcagctccatagctttcgactcgacttgttcaagctgtgaagcggaatttggttcctcggttttgggaatatcaggtccgtccttgagcaggtccccagaagcttgaactgcagagacctctctatcatcatccaggggggagtcatttgatgtaggttcttcgaggatttgttgctcattctgctcaaggactggttcgtttcccggaaccggttcgggagatgcagtaacttgttcggtgacttgttcggagggcgcctcacattcaacaggggcatcatttgatactaactctatagcctctgttgagtcgaaaactaaaggctcagtgcgtacaggaaaaccagaagtttcgcc

SEQ ID NO: 5771 - DNA, 5126 bp, Emericella nidulans
tgcatgatgactaaaatccattgtgggcgtagttacttcattcttgttgatgctctatttagaagatgaaatggggatatgtatatatatcaaaacaaacacgaacagtatcaagcttacagccaccaccaaatcattctgcgacacccacacctccactttcgccctgggtcaggaaaaacacatctaccacccctcccagaccctatccggcaaaacagtcctcataatcccccagtgctccagcgccgagcgatcctgatacttatgtaagcgaccaacctctttatccactagaaccctgcgcccatgaccttgaggaccgtcctctaacccgacattatcaaattgcgccgcgtcgacctcatgctttggtaccaggtaacgggaccggaagcggctgcccaggaagtcctcgggaacggggtcgcggaaggtgataggcgcaccacgggatttcgtgcagaagatgaccatgtttgtgaagtcgggcccgatttccggggccgcggcttcacggaagagacggcaggttgggaagatggattttatggtccggatggagagggccgtggaatagagagagatgtcgccggcataattcttcagtcggttagttatcctgcgtatatttagaaggttttgaggtgttgggggaggcatacaatggcaataacgccgtcatccttcaagagtgcgtgtagaccactaatgaactcatacgtgaagagctcaacaggttctgcaccaccagtaaagacgtcgtggacaatgtagtcgtactgcttgggttggggtgcgtttcggctgcgctggacgaaggcccgcgcgtcttcgatgataggggtgtggttttcggggagatcgaagtactgcagagcatacttgtggacaaccgggtcgatttcgacgatggtcgtgtcgattccgtggcttatcagcgcgccaggggttgtgccaattccgagcccactgtgaaacgttagtgtcttctgtcagcggaagccatgggggaaaagtttacatgacgagcgcgttacttcctgcgtcagaaaatggtataccgtgcgctgtctcgacgagtctcacggcctccagcatagtaaacacagcgtagatagggtccttgacagcgggaggggtgtagttggggcgctttttgatccattggccaccaaggaggctgtggtcgcatctcatgacgcggaagccatcctcaagattgtcgaggacggagatataccccgttgtggaatcctgacgggcgacaagagcgaatccatcatcggcgatgatgttgttgagggctgtagtcgtgtgtcccaacggcaggtgcgtgtttgaagtgacagagaaaagaaaagcagggatagctagaaggagagccttagagggaacggctgccgcgtaaaagattgcaatcaagatctgaagacccgcgcggctgagcagcacagtcgacccaatgaaccttgacaagaaggccttgatcaagtgctcgccggcagagtagatgacatacgatcccagtagagggatatgctccgcaaccagatcgccatgtcgttggaggttcaagcctgcctgcaccaatttgcccgcacaagccacagagagcagaaccagcgggtataacgccagtacttcggtgaagattgggccagcaggatttcccagcgccgagctctgctgggagacaaagtactggacaacaggcagaaagaaggccagcacagggatagcgtagatcgccttgcgcccagacacccggtcgacgatgtccttggagaaccagcctgctacgcctgcgatgccgacgccgtagccgtggaagatgtgcgacggagttgacccatagactggggccagcgtcaacaggaagacgtaggagtagaaagccgcaagcaccaataaggctgctccgactaccagcttcttggtagcatctttctcatagatgctcctgaatggcgccatgttactatttggtgatcaggcgcagacagagctcctaacaggtgtcagttggaccgtggacattaggtagagatctgccaagttatatgccaagacaggtgaaacgacaggggtctcttacatttcctcttccagccagttatttgcagacactaatgcgctgaagcgtgatatcttgacagcttcgcctgagcgctcgaattctgattgacgcagtgtggaaacaaatccctaaaagactgtacggtattgccgcccgcttccgactctcatcaaccgcacctcgcatcatcaccaccactaccatcttcaccccgcaatccaacaatacaatccaacaatatcatcaaccatgcctcttttcccaatgggaaccggcatacagaatgacgagagccgagctttcgaccaaaccagccgaaaccatgctcctcccatccccgctgcgacgcaaaagaaaaaccggcggaagcgttggttagacctgcacccagagtacttctctgcagacctcgagctagccggtccgcacctccgcttcatctcatcttcatctctcagctgattcttcgccccgctcagaggagagctaatactgagtaccagacccattactctacgaccgtctaatccgacgcttccaaacgcccgccgagcgtgaagccgaaggacgtgcaaagggcttctccggcgtcctccaagccgacctgctgcgatcggaagcgaaaatggatgcgctaaatcacccggatccgcgctcactgttctcgtacactcgcgggccgaacggggagattttggcggaggaccgcgatgagattccggcgagcaaggaggaaggagagaaggcgtggcgttgggaaatgacgatgcgttttctgaggggagaggacacagactttgattattcgactgtagatgggaatgaggatcttgatgatgcgaatgaggaacaggagaggtattttgatgaagaggagcctgaatggtgcgttgaaggggaagaggaaggggatgtgagaaacaggttgacgggagagactgggattcaggatttctgaagcatgatatctacccttcctccgcggccagtccgcgaacatcccctacgctctaaccagccgctcttcagctaatcctttgttactggttcctggaaaccacccccttgacggtccgcccaaggctctacgcacgtccttatcacccgcccggtgtcaactgttgcactagccagctgaccgttcttgaggaacagccacgaaaatgctgagagggcccgggtatagccaaagcttttgccgatgtaagaacacggtgtgaagtatgattcacggtgttatgagcggtgtactctgagccatgtctgtatcagcagacccttgagatcctgcaattcgcacaagccgagtacctctaaagccataacaagtcgatgatcgacttaatacagtcgcctgaaacacttagctaccgtatcggttaggtatgttgaactaggtatgtccatgggtggtcttcatgattctatctctatagctggctagatgctatatattggatcagaatctggtatcaaccgaaaattatagccgtctacggccgagcccggcttcgaccgtagggccccaaaagaaaagaagataatctccactccgcaaccataacaatgattgctttagtagcatatacctcgtgcaacctattatggaacattagagcaactccagcacgtcctagcaggttgctgatttgttgagatgctgctctcagtgcccacccaaaagcttgatcgctgtctccttaagcttaaatttctggatcttcccacttgccgtcttcgggaatgaatccgtcggctcgaggaagaatatatacttcggcactatgcgcaaaagtatcagcaccgcccgaatcaaacccagcgtcctgaagatcagaagaaagaaaaatagcgacctaccaagatgcgcactcagtttctcccttacaaacttcctcagcttctctcccgtctctgcctgctcttccgtattctgatgcgcctgtttccatatcacaaaagccgccacgacctcgccataatgggcgtcggggacccccacaacagagacatccgcgacaccggggaaggtcaagagacagttctcaatttcaagtgggtgtatgttctcgccgccacggataatcaggtctttaatacgcccggttatggtgacgtagccgtctggcgaaatagttgcttcgtcgccggtctagacggtatccctgggttaggtcttttgagcaggtggatcgggtgatggaaagacatacatgcatccaaaccttcccgtctttatccttcagcatcacctccgccgtcttctccggatcaccccagtatcctttcataagcaggtatccagacacggcgagttcaccgcgagaatttatagggagaatcttgttacggtcgagcggatcaacgaccttcgcctcaacatgcggcatcagacgtccgacggtattgattctcttatcaattgggtcatctgtcgttgtcattgcagacacgggactcgtctccgtcatgccataacagattgtcagttccgttagattcaacgtcttgtgaagctttttcatcagttcagcggggatactgcttcctgccgctatgccggtacggagatattcaaatcccttgtgtgggacctggcctgattccaggagcccgagctcttcgagaaacattgttggcacaccgtagagggctgtgcactgttcttcctggacggcgcgtagggtgtccctggcattaaaagcttctgcggggaaaacaatggccgacccatgcgtcgctgtagccatgtagcccaggacggagccgaaacagtgaaagaggggcggcggacagcagactgtgtcggctggcgagaggcgcatgcggtcgccgatctgggcgccattgttcaggatggagcggtggcttagacaggctgccttgggcatggcggtggtgccggaggtgaattggatgttaacaatttcattgggagtcaagttctgctcagggagcgcagcaccgtccgcagggttgagggacgtgatggacttgtaaggggtcagggctttgaaggaaaagagggagctgttggtgttgatgc

SEQ ID NO: 5772 - DNA, 12089 bp, Emericella nidulans
catacatccaagacccaacagacccggccgtgcccaatacgcaactcgaggtgctggactgggtggatgctcatcgcgtccattctccccgggcttacaaactaccaatcgtgaggattgccgatgagaggcctcttcttcgagtcatgtccgtcccatggaagctatgattacccagtcaacagtcaagtactgaccttactagatttctggaacccaaatggccactggacgggcttcctttactgatcgagcactacaagatccctactgcgttcttcgagggcgggattcgcgcggtgacacattcgtttggctcgctggacacagaggatggatatagatgttcgcccaccccgcgcctcccctaatcctggcaaacctaggcgggcctggtaagaaaggaggccatgctaacctagacgacaggctgctggttcgactacctctgcaagaacatcacagtcgctcagagtcccggcccggagcccgtcatctcagatcaaagctgtaattcactaccgcagattcgacagagcgactttacctggacacgggcgggctttttcctgcgatggcccattcggtccgaaaatcgacataacctgacaatggtctattttggggccaatatggtctacgatcggctgaccagattgtcctgcgaggctgtgaaggagggggtcatacacgatccgatgagtttgctggtggtggttctacatcagctctcggcaaggatggacgagacggtgtggaatttgtcgatggtctttgggggcatcgaatcggtaagttcctttctctcccctgacaaaggtgaaaacttggtcctgatgccggacagaaagcactcggtctgcatcgcgacagggagtcctttacggggctgcataatatctcgaagcatatcatctacctccaagagagctcagatgcggctctggaaacagtcaaaaacctgcatcaccaccacaaggatctatctcccagcgccaccgaagaagaaagggctgctggtaacctgacgcgcaggacgatggcgcagatcgaggcggagtttcagaccgtcaggttgcgattgcgcagcctggataggcggatgcagaatgtgattgctttagtgcgttgctcgtcacatctcctaaactctagggcgtggtgactgacctgcgacggtgcagtcattccatctagtcacgcaggaagggaacgagctcattcaagccgacagcagcaccatggctaccatcgcctttgttaccttggtttttctgcccataactacggtctctgtgagtctactccccagcctcgtcctgcatccaaccagcagaaactcactcctgcagacgatttttggcagccagttcttcaacacggcacccgacaacgcctcgattgaagtgtccaaagacttttggatcttctgggtcgtatccattccactgacactcgcagtgctccttggttggtctctctggcagagaaaggcccttgtcggtagtcacattgcccggaagggcatctcagggccatctaattccagcgctctccatgccgcggggtgagagaaacagggatgagcactccttgttctccttcatgtccttgccctggtcaacacagcgaagaaccgcactctcgactgaactcccagactttacgcgtacgtcgagctggcggaggcccgatccctaggacaaagtgtagatccggatatgtagcgcatagcctcactcacataaattgaccggctgaaccttcccaccctaccataggtgatataatccgtccaatcaatatagatatgcacattaacttcattacaaatcagcggattataccgcttcccgccgccactcagcctcgtaggattgtcagtcttctcggcatgcattttggtgttatcactgtgttgctagtaccgtcgatcaccattaaaagtgatcatctggggttagctcgagcgaatcgctctagcagtcggcgaaccattgtgcttgttcgctgtggcgtgggggatggcaatagtcctagattgtgggatctgtcatctgccgcgaaaagtgctctgagccctaactactgaatcgggctgtttgaatcatggcgtgaggctcaagtagtggcgtgccgtcctccttcctacaaagccgcgggatagcctgttttgcttgtcaactactttgtctgccttgtttgcccatgttgctggaagtctccgtcaaatcgcagtctcaaggtgctccaacccatcacagcagtgaaggacacaaacgaacagaaaatgtctgattccaattctgccctcgttgcaggctcatcacaccggcttgtacgtagattctcgtgtcttttgcatactccagggctttaagttgctaacgattcctaggcagcctcttcccaggagcctctggtactagatacattaaatactggcgaacatcgaatagacctcagttcttacactacagacaatccagacaccagcaccaaccgtaatggcaacaggtttgcagagccaaaagtgagtactttgctgagcccaaagaaagtacaagtaatagccactgacctttatctccctcttctcatatagagtcatccgaactccctggactttcccagaaatgttatccgtacggtcgcggtcaaatttaatgagatcccccttccctggaccgataaccgtcctattgaaccccctggcttaacatacagagacaacactgagcaccgccatcgagacgtcctaagtcgtatcgaatggcaccgtgaagacgaccgctacctcagctctacggacggccgcctgaaaagactggttgtgcaagccacagatgacgtgcgtcttggtcccagaaatgggacgtgggcgagaacaggaatccgcaaagtcacgcccattcagctgcggattgtctattgggttcttaagagacatattgaagggaggagatgggatgtcctggagatttgctgaagtgggttccgcatgttggttatcgccgtgtggggagctttatcacatgccaatctaattctttgatcgctctgtggctaataatgcagctctttattcccgctgatctcggtggcgagaagcgcaacaacggcctctatgagcagttcaaatatcacttctggggatactcctacatcccgagtaacccgctcgaggcgtccacgtcctcagacccggcaataacacttgcagatgggataaacggcatcacagagcgtccccttcggccgcgatatctctgttttcccgctgagaacgggagcgtcgacattgtgagagtcgccgactgggaagcccagcacggccgggatgctgttctggagtacatttttatatcctacacatccgcgcagtttgacggtcccgatgattgggattaccttcattctgttgcaaaagcggcggttcggagcgccggtgtgcccgcatactggatctcgtgcagttgcatgcccgatcctgaggaatattctgaggatgtttatagaatcagcgatatcgttcggggctcgcattcagtcgtcatcattgtcgggcctcctatcagcaatccgtcggcagagtttaacatgaaggccatgctacagcactggggagagcggatatggacattccctgaagtgcttttgagtcccaacactcatcctctcgccatctacatgcgcgctgggaatgtggcaaaccccacctatctacaaaaacgcaattttcccgccgtagcatggacagatgcccctgtctcacgtcaactggttgaccattatgagggctctatccttctcagcccgcttgaactggtcaccctggcgctccaatgtctcagcggcagggcacacaacacagctccttttttcccgggagatctaacatacgtgttgatgggcctcctgcgacgcagaccaagggtcaacaggaaccacagcgcattccaggaattctgccgcctatctcttgccaacgacagtaaccggctgctggagcgcctcatatgtctcctccccagccgccgcaagcgagaagactcctgggaatggcatgacatagatgatacttggagccgaaatctctgggacattacgcctctttgccaggtagacggggttggcgaagacgatactgtaatcctaggcggcggttttgcggcgcccatccggtggaaatcattcacccccgtcaatctgctcctgagaaacacgattaagcgaatggtttttcgggttgctgtgcgtgcgatgccgagtgttttagttcttggcgcgttcttactcgccaccagtcattcccagggcgggtctcttgcagtggtaacggcactgggatggctactcatggggcctgccatcataacgattctgctttccccgaggctattggcaaagctgtacatcggtaagccgtggcgtgcgcagccatggctctttgggtttgagggttatatgcctattggtgagattgagacgaatatttttggaaccgatctaggtaggttgaagtgggcgccgtattcgagcgagctgtccagacatcagaatacggagggtgaatgtataggcgtggatcctatggcggattctgcggtccgtgagatcatcatcagggctcgaggctcaggatatggagaagagaaagtgtttacacttgttgacacgaatctcatgactgttacgctgtttagcgccgttcgtcctcctgtcgccctggtgctttgcgggagtgaaggcggaatgcagaggggcttactatgctcttacgactggaagagtcagacgctttatcgtgagagcgtgctgagagttgatacgatggtgcttgagaagatgagtagggtcgagcggttcaagctaggactaaggaggccgctggggaatacgaatgaagggacacccagtgaaacttacagtgatgagcaggattgatatgagtaggcctgttcaatttccatagacgcagataatgtatcattgatcttaccttgggataccctggttttactgtaaactgcactggatctctatatttgtaggcttgatgacgctattcgcttccaggaaccgtctgcatcctgctgctagtatacgcccaccttctatagcacacatatagggtcagacagatggctttgctctcagattgcaactggcataagctttgctgatgcaagtgttagggttggtatatcaccttgactatgtttttcactacggattctgcattgcagataaccttggataaacttgataagtatctcacgatgtcaaatttacttgcctcgtagttacagatcgcttgtctcctggattaatctgcttccatatctacttctctgacatgttatcatatacaaccatagaatgtggagaccagggtttcctgtccgctcaactgcacttcagtcaccattatctgcttcagcctacaaataatacatccaatggtcaggttgtgcttctcgacacttagcacctttatagttctcttgggatattgcgcctagcagaaagagaaagatttgagggcgacgttggaatcttcacaccaactgtgttctggttcagacaaggcaaggagttgtagattcctcgtgagaactgccttcaagaacaaacccaggacctaagactcgaagaccaaggggaggagcgtactagttagattcttaacagcgcctttaggctaacttacataaacatcccaatctgactactaggctaatatcatgtttgatgccatgagcatcaaccgctactccctaaacatgtctataccgctccaacccacatcggggccacgaaacatgtcgctcctacctccttcaaggcccatctcgctgtatcgaaggccgatgcacgactctgattctcgcagccgtataacggacaaaatgcattgcgattaattgaccggcgagcccgattaatggagataatgtgccgtgctcacaaaactagcctgctacatctgcctatgagaagaaggaagtcattcacacattcattgaattactctttaaccttatgtgcaagaaacttcacaagctgatggcggttgagaaattctgtcttttgacgatcataatcatgttgcatctctctggacattccgtctagtaatgtaatatttctaccaagccagtcaatgaacctaggtccctgaagtgctatacaatctatcgggtatgaccctattggattctatagtgatcttctggtttagtgttctaaaccgtcaaacatcaattataccagtcccgggctatagtcgctcagcttcgggtgaaccggaatgaatcttcgtataatctatagatattttgaaaccatgtcgcatccgcgagagtacgggcgtttcagaccatcatctaagtcgtctggacacgcttagtcccttgacccgctagcgacttggttccgagaaatttgggccatgcatgtcaatattggagaaaggcacgaacatgtcatcgtcttccttttggttgacctatgtctacatcgcctaagacttcctcggctaagctggtctcgcgccttgcacttttccgctagatcggggttcgtctatagtaggagaggcccctcgagagccccgcagtgcaatgaaaagagacggcaatttgaacctcgtcaatattactgaaataattcttgtaaaggggttctgccgactggacggcctcttctagactctaggcgagtgagacatttgtgcgccatcgcacagaagtaaaattgcacccatgcagtatctgtctagcatactttagcctcggtcgagtattgcacaaggaaaaattgactacctatcaccaggtattaagaacctaccgagacaccgtctaggttgtgacatcgaacatgcgtgtccccactcgccgtaaatgcgcgcaaaggattaagagtatatgagcttgagaagtctagaactttcgtgtatggctggcccctgttctgacctagtggtcaggggtgtcaagcatgaaacaaccgcctgcaactagtggttctctgctcagacccgatttatttggctcaaatggtgcaagcaacagtaacgaggacgatgcgtcgcattgcttttgataaaccttaaggtacatcactgtagagaacatcagcagtatggttgtctcagcatagactaggactctgaagtcgacgtctatgtggtttacctatgctgattaccgcatagcgctccacaaaggtagggcagaacgatagggtaatgtgataccaccgctaattcagtcccggtcaggaactcagcagatctctccgctatatataattatgctaataccaaattaccagcaggcttcaaataatcaagggcactatcccgtccaccagtcagccaaacgcgcagacccttcaagatggaagctacttgctgtttcatctgcctcactagctgcatggtcggttccaagacataatacaaacaggcctagggaacgccagcacggatatgtcgacaagtagacgcactgaatctttatccggctcagtgttggctgtccttgactgtctagagtatcagttgatgtatattctggcttgatattcacaagtatcttcgaatataaacgacagacggagtagccaatgacctctgagtcagctcggatacgtcgggtattttcaatgcatgtacagagtcggtaaatagaatttacataaataaaaatagcattgtcgactaagacctaggatagacattccggtctcgcctgtttgttccggatctcacataattccttatcctacctggaggattgccaacaaccatgcctccaggagcatttgagtatcagccctgtacttagggctgagggtggcatgaccagagctcttaggatcagccctaagcctgatcttcgattactgcaccggtcaccattcgcacgagtccggatgctatccatggatggcatctcatcactgggctagattttttgcccaccttcagacaaccacgacatcactttcgcacccgactgggctctctcgctgctcacctgggccacagaacaataccatggccttttacatattattacgctttacaagcggtatattgaccgaacgcagccctaagcagccaccaaacatctcgcctccaccgtcctcgctgcggcgactggtgcaccccgccaactacgcccgccatgatgacagctctccatgcccatgacttcaccgtgcaatgccccttctccaacctgcctggaaaatgacgtcaagctgatccgtaacatcgtctcatcgctcacaaccagtggccaccgcatcctcatgggcatgcatggttacggcggtcgtagggaccgaagccgtgcggagtctcggctatgccacatctacatctgtgtctacatacacacatgacacttcatctggctgggcaatacgccaccagctctgtgcgtaaatcctctgcttgcctcaaacgagaacttgggatatcgtgaccgactggctctgatcgcattctcgacgatccacacaaagaaacgagcaggacgagaatacgtccccgctggatccggcgaggaggttcgtcgggcgcgacagtcacgcagaatgctatagatagcgcatcgggccgctgttctagtttcttcggaatactggtgccgactggctggcatggcgactggggtcccgagcattgagtcatgagcatggatttccgagcctctaccaggaaaccatgctgaggcaagtcagggaagcgggggtggagaccagctccaggagttcgatacgtgtcatagtgcttttgttccgagagataacgagacgaagagagttgctctttaaggggctgagctgcatcgtcctcagaagggacgcttgaaagtcggtctgaggctatgaatagaaggggtttgcatcgccacgcgatacgagcttctgaaggatccagctgcttgtcgaaggaatccaggaaggtctgagcttcctgtcaagatcgtggagacactcgattcgtcaacagtagcggtaaatccgaaatcgggattggcagtctcaggcgcggctgaaacttgatcaaattcaactgccgtgaatgaagccggttaccgagtagatcctctctactagtgggatcgaaatagtctgagaccgctgacgtagcgatacgaccttgtcagcaggaaatttgaagatcacgatttttacgataagcttggagcgccttgtcctggcttgtctcactcttcaccctgagccatcgtgacaccgctgcggcaggcttgcatgtctctgctgcgctggtgacagccctgttacgttggaatgactcggtgttggcctagcaagtggccgacagagaggggcgagagtcaggttgggaaaccaaaacgacgtatcatattgccccgaaaccaggtgaaagtctcgacgactcgcccgcggagtccggcttgaaagattctatgcaagtaccgtgctgtcggtaatcggtggttgggcattggctagtctcaagggtctcatgcatggcatgacgtgccctaactggtctgtgctggccggggcgtcccaggctgggcagcctcatagccatgcccgctggtcatcccagcaggtgagactgggctatgcggcttggtgtcgtgagaggtgttggtgggggccgggggaactgcggagaaaatatcgatattggatcaatatgtcttgctgattgcctcgcatctttcgcctagcctaccctactccatcctatccaacctaactactccaactaagacagcttaatgcctgtctggtctatagcaacctcattcaccgactcgtctacctgcatttacccctcatgcacgaactccaccaacggcaacggcactccaacccccctcaaccgactcagacagactccgtactcggtgcaatcgtcctcagcgtgatagccacatagccagaccccgaatcactccagaccaaatcccaaacaccgtcgacatcggtcttctcggcgtaaaagttcgcaccagccgtattgatcagaacatagttgccgtagacactgaacacgctcgccgtgtcggactccaccttctgtgaggtcttaggcttgaagacgacgtcacctgcggctgagccgccagacgggagcatcaggacgtcggaagtgaacgatgcggcctcctttttcttcgggtgtgcgatccacgtgttgggagaagcagacgcaactgtaacttttgattgccattagagtggtcgatgggagtcgacaatagtcctgttaaagagacgaagaacttacagtagatcttctctgttacttttgcagtggagagtttgggatcgccgacttgagctttgcctgggagacagtgctgtcagtatggatccctacactgggccactcagatagaacgcggaaaggaagacagataccgtcagcatagaagaccggcaacccactgatcccatcaccgtaagcgtagagactgaaggcgtccgacgtgttggggtcctgaccgtcgtcgatggggtatgcggaagccccggccacaaagaggcagacgactgcaaaaaatagagcacgggagaacattctgagcatagccttgtctcttatttttggggcgaaaacaacgagagtacacgacgagtgtccacaatgagtgttcgagatggaaagtttatggagttgcaaaggagaggctcacaggcggccgtactgaagatttggactacgatgcgtatatgagcattgccacagacctaattttgacccaggcgcccggcctgttcagagtccaggcagcaggaatggaggagagtcggttacgaatcatcctgattcaatgccaggtctaagaactgccaatcaccttgtccagctgagacatgccagggcattttcatcgtcttgcccatacctcactctgcgcctacgcagggtcgaaagtacattgtccagtcttgtctaagtgcccttttccacagttttctggccttacaacacgggacaagctagttgctttttttgctcattctaagacgtgaccaatgaccgcttgcgtccagcaatgccgtcgatgagcccacgcgaagttctaaatagcaacaatctgcaagccaaaccaaacccagtaggcgctggaagtcatcgcgagctggcctgtgccctatgcgcctatggacccagcaagtgagacacgcatcgcacggcaggagcagactaaaagtaggggcagtcccaacagcaatagccttaggtaattgccaatagatttgaacttatacacaccaaatctacttggatcagttcgctaaaccattttcagccccacggccagatggacgaaggatcagcgaaccctatcttgattggatctcgtatacctaatctggcgctgcagctagctccaccttatcgacaacccatgtccgccatgcaatgtcatgtcatgccatgtagccggtccgatgaccgacggtattggcatgggccagcagggctagggctgattccggcagccgggtgatactgtaatgcttctatatcggtctcccgggcgagccgggctgtgaactgctctctctgtgattggtcgatacggccctagacagatagagaattaaatgtcctaggcaggaacagggtgagggatcagtgatgctggtagatgctatgcaaggcagaccatgctgcgttcgaataatggggtaccatgatgatcgtgtggtatgtcctgtcttactctagaccagatgctggacgctggacatgtagcagtcccgtccgggcgcgtttgtttctgaaaatggaatatcttgtcgaggtaatatcttgctctagcgagagacatgttcagccagaaataagggctttcggctttcatcggctggaggcgaggtataacggtggcgcgctggaccgtcagacgtactggaatgtctacaatctggtttcttctttctatgggttgattgtatcgtcttaatgagacagctgtcgtgtccaatcgctacacgatgctgcgttcttcctttcttctcttcttttatgcactctatgcttctgcctcttgggt

SEQ ID NO: 5773 - DNA, 7614 bp, Emericella nidulans
  unsure (1)..(7614): unsure at all n locations
gttcaaggattgagcttagattccagtgttgtacttgtgctctgtgggttcctatatatattttgaccgtgctcgaatagaaaagctaggctcttaaaatccagcatacgcgatataccctgttgtctcttctagatgccatttcataattaagttattacaatcaagtgattatgattaagtgatgctcggtttgctgagtctcttaaactagacacacttttgctatgcgattgaatagaggagatgctataagccactgcactcatttatcagtactaatatgttgacctcgagtagacctgcgaacatagaactaatgtcctcattcagctaagtttttgtattaactagaagcataacaaggttttgtacgcaccatgggtactccggctcactctagatcgtactgggaaagtatggcgttacggacatagttgctcatacagtggttttgagctggatagtgaaggttggcagtaccctcacaaagccatttctacaacgaacgatactccagcattattcttgcattcgtactggcatccgtccatgttggctagatacttgaagtcgtaggtgaacattctgaaagcttatggtgagaactgacaaggagggatctaagtaagttgttctcgcctcaccaaactggcaactgactcgctggctgtgcgagctgatcaggaatgtgccaaacaaatacagcaacatcgtcagcataatgctactctctagccacgcgcttgagcataccctgttcgtatagcactagccaaggctttgggaagggaagatttatggtgtcaataccgcctttcttcgagtctttgacatagggtcgtggctgaccagattgtaagatactgctataatccggtatctgaccccattcagctggtcagaacttaaggcttcgcatgatttgcaactgggatgagcgagaacagccataaaccactcaaacaggacgactcaggagatcaggagcttgggatgtcctctatgcccgctggcatcttgtaaggcttccgcgccggatgacgagccatctgaacgcgaagtagtcggcgtcaccctcatggcatctagttctctttgactacccgcgcaatgacactcaaccgactcctgaagtcttgcttcccacctacgagcaattcaggtcaagggctatgcagtcttattgtcgggcaggggaagagaaaagcgacgcagttctgaagacagaccgtgcatgtgaatcagagtagtttgatctaaccttatcatcacccagactcaattcagtctaagcaatatggtacccagcagagccgacttcaatgtaagtatcgagagccaattctccagctcctccagctcctccagctcctcagcttcttctgagattgcttgatcatgagggcccattttaacgtcctaaacaggatagccgcacaacgcccttgatcgggtaatatagtagctgatatggctctgatgttgtaaaggggaggccgcggctaaagtatactagaagaacgtggagatagcgaccgtccttttccccagtgctgggaatatatcaagactgaactgaagcctgaggcagctggcaaacgaaagtttctcgctgggtgattggctaccgcgattacaaaagtggtacatagcgtaatgggtcttgcatatgaaccgaacaacatcggactacttgtaccaaaaaccaggagggactactcccaatgccgacggcaagatcgaccgagcgtcagtgatcaagaatgtaacccaccactgccgaccgaattagcgtgacggtgcaaaggaccaatctcgtgtgcctttgtcactaatggcaagtgggaggcatggccacgtgaaagacctacgacggcgccgtatttgcactgagcttaacaatctcgtttcagtgtaggtcgaatggctctcgacaaaccttcctgaatcttcttcggcggcagcttggagttgccccgggatggtgggtgggcgcggggtgggatgtcgcgattcgggtcgagagcaatggaaatcaaccgaatcgccatcacaggctcagaaggtgcaagcgcagagagagaccgaaatcgaccaatttaaccgcctgtacagaagacccgggataactccgagcgagagaccgaaggattgattggacgccgagcaggacacaattatccgtgcgggatattggtggagaatttccccatcgggaaggatatttgtttccccgcggagtggtgtctaccgattgacatcataggaagaccggaaagtacctagatagactgttgagggtcagtagaggttcattgaagggtgcaagagaataatactgacagagacgctgaatgttgggaaggataattgagattgtaacgggatggttgaggggtaaagtgctgttacctatgatgccatcaggtgagccccgccgaggggtacggcagcggttggcggggaagatcgagacgcaacgaggattcgacctggatcgaggactgtccggcgtccacggtggcatcgatggcttccaaggtaatgttaaccccaccggaactgcgcagccttttattattccccttctctccctcccaatttctctcctacatctctctgcattattgattcctctcattccctccagtcatccatccaccataatccattcacaaacacaatgtctctcggcaagaaggttacgcttaacaccggtgcccagatcccgtacgtatcctcgaatcctcgatatggcggttttggtaatggctaacatgacacagtcagctgggattcggtacctggcagtccgcccccggccaggtcggcgaagcggtctaccaggccctcaaggtcggctaccgccaccttgacctggctactatctaccagaaccagcgcgaggtcgccgagggcatcaagcgcgcctacaaggacatccctggcctcaagcgtgaggatattttcatcgtacgtcaatttttgtacccagagcagctcgttgggccattagactaacagttcgcttgcagacatccaagctctggaacacccagcacgaccccgccgttgttgagaaggctctggacgactgccttgcggagctcgagctcgactacctcgacttgtacctcgtccactggcccgtcgccttcaagaccggtgacaactacttccccttggacgagagcagtgaccaccccgacggtgacgtcctgatcgatgacagcatctctattgttgacacctggaaggccatgaccaagctccccaaggagaaagcccgcgccattggtgtctccaaccacactgtcgagcacctcgaggcgatcatcaacgccaccggtgtcgtccctgccgccaaccagatcgagcgtcaccccgttctccagagcaacgacctgatcgagtacgccgctaagaagaacatccacatcactgcttactcagtacgtccctgaagcgttgtacgccgcttgcagcctaaactaatgaaaaaactaggccttcggtaacaacatgttcaacatccctctcctcgtcgcccaccccgaagtcaaggccgtcgccgaagaggcctccaagcgcctcggcaagaccgtcacccccgcccaggtcatcctcaactggtcccaggagggaggccactcggtcattcccaagtccgtcactgcctcgcgcattgccgagaacttccaagaggtcgagctcaccaaggaggagctcgccaaggtctccaagcttggcgaggagcgccgccgctacaacacaccttacgtggctaacaagcctcgctggaacattaacatcttcggcgaggaggacgagaagcctgccaagcacaaggttatcgtttagatggattatggatggtgctggtcacttatgagatgtatatatgatgaatataaaatatagatgactccaactttacccgttttccaagacgtagtgttatgaaatatatatatataatatttgtatataataggggtctaactaaatggtacaaataatcttccccttagtttggttactctccatcaacttatgcgcctcaaccacatcatcaaacttaaacaccttctcaacaaacaccttgaattctttattccgcaacttctccagcgcattgtcaacaagcatatttctcaacttcctttgatactcttcgtcccgactcctcaacgtacttccctcatagcggattctcttcctcaagaagtacgagatatccacattctcaaccttgattccacccaagaacgcaaggttcacaatccggccatccagtgccgcgctctttaggttatcctggaaatagcccgcaccaatgtagtcgacaatgacatcgacaccgcggccatttgtggctttagaaagttcctcggcccagttttgagtccggtagttgaagcccgctgtcgcgccgagctggttcacacagaaggagatcttttcgtcggagcccgctgtgacgtagattgcggatgcaccggcggctttggcgagctggattccagctattgagacggaggaggcgcctgcgtgccagaggaccgagttccgggtttgaaggcgccaacgaggtgcagagcttgcgttgccgtaatccatgtcttaacacattgtcagtacctaattcacggtgcgaaaagtcctagacagcgtaggcgcgcagattgataagtacctcaggaatacccgcagcctcctcccatgacagctctttcggcttatgaataagcatccccgtcgcaacggcaatatactctgcgtaggcaccaccatacgccaagccaaagacctcatcaccaaccttgaaatcttccgttgcgccgtcaccgacgtccgcgattgtcccggagaattcgacgcccagggttgcgggggcttgagggggaaccgggtactggccttcgcgctggagaagatccatgcggttcagaccgaatgctttgactttgacaagggcctgcgagggaccatactcgggaacggggatgttgtcgatgtagagagcgtcggcgggacctttgccgccctttatggctgaaggagcggggcgtaagtctggtgatagcggaggtgggaagggagggggacgtaccaactgcccgcatggttttctgagagggcataatccttggagatgtcaattgtgtcgagatattgtcaagcagtccaatttggtgaccgagaagagtaggaagacgctgcgttaaagaataacgcccgcgctatgatgtcgttgaccgataaggtgattgataagcaggcggggtcaatttcccgttctcggagtctggcggatacgttagcctgccgactgccgagcaatgtacagactcctataccagctcgacaccacctcaattgcatgctaaacgctcaagatgtcctgatccaatgccaaaaggcatataccattcttaattaaatacagcacggcagacccgacctgaccgaacacccgtcgaggttttttttttttttcttcacatacttgctgatctttatcgagaagctacaaggtcttacagaacaaccgcggttctcagcgtagcgaagaatcttagccggcggcctcggctgctcgagcacctagattacgtggattgccttcaattccttcatcgtcaaaccaaccgcttcccgcgcgttgtcgcatcctcagaaggcacgagtttaggggctatcatatcttgaaggagtgcaagaagcaaaaggtttggcccaaaagccgtcgctaggcgattgggcaagcttgttgaaccgtgattgatgatatccccaagacaaactaacggctctttgggtactcgcttggactttattccagaaaacaccaaccaagcgtgagatgcaagtaaaagaagatcaggggtagggcacccatgtgcgaaccaggctcactggaaaaaacatgcattttttttcagagcaaatacgcctgattaaagaaacgaaggtggaaggatgttggtagtcgacacatcgttccctatatcaaacgggacatttggccacagcacactgactctacactggcaggcaatgtcgtcttgtcgtcccatttactggtaagtaggaggcagacgaagggtgagtaaaacacaaaatgttggggtttgggcatacgtactgaatctggcaacggcgaagctagtgtggcaagtgaccagcgggcacatgcaatgtattgaatgaaaagaagtatctgatctgggaaggtggtgcacttgagccagccttcagactctgtagagtagactttgtcctgaatttgtcctgaaagtagaacgcgccccacactagcaaggatgaccctgtcagcctgaggagtaagcttaacgacaattatgcatattaatggttattataggaaccgtaatatcgagctcaattctgctacaactaaaagatctttcaatggttcttcactctctcaatatacctacctcgcttccacatatacaaacgacgtccccagaatcgagacttgtggaagggacggacaattgtcattactggatggccaacgtggccgcctatctatacacagcttactaaataatgactaagcgagctcgatccctaagttaggggcaggcgatgccataggtttggtttggtttgtttcgtttcgtttcgtttcgttttattatttaacgtcactcggcggatcacggggcccacgtgatctgcggcctcccagggggcatctggacgtgctactaaacagaactgcctaggaactagctagatacaggtttaaagcagcaactatggacaatatatattagaaataagtagaagaagcacctggtactaccctggccaggtctttgagggcagatgcctgttttgactacctatagattggggggaggggccggaccctttatccaggtagatgtgtggactatcatactatcaagcactctggcaggcccagttcaggcatatatccttgaagaaggataattcttgtataatatagctgaattctttagccctggcagctatacttaagagctagtctattatttttaacaggctgtctcttatatatctctatctatctttccagtactttctagtatataggcagaagaagaagtatactggggtcttggtcctaccacaagagcagctttccaggtagtctaagtagttaaagcactggtagtataccataaagtctctgtagcctgtacaggcagtaacaagtcagccaagtacctaacagggaagcttgtactcacgggtgtggctttcctttgtatagggtctaatatccagggtcttgtaggcttgtagtgccttactagcatatactgtatatatctctatacaaagctactattttatctcctgttgtaggtatgcaggagatagggggatattagggctatatatagaggacccaagctttgcaagcttgtctaccagcttgttcctagtaatcccagaatagcctgggatccagcagacttgaaggggtnnnnntagcatagttcccnttccgagagcttccaactactaggtagtaagctgaataaaggactctgatagtctatccctatacagagtaggcctatggct

SEQ ID NO: 5774 - DNA, 8650 bp, Emericella nidulans
ggcgcttgttcctgcaagcagataatatagaacatggaagctacgttcgcccgtgggaaccgaagcaatccgactacgctcaagtctgtggtcgatgatctttccacctattagagtcgggttaacggaggaggacgcatcatattgcagttccagggaacaatccagcttttgacgcggtaggtgtcgtcaatgacttggttgtggtgagggtgtcgaaaatgaaagcggcataggacagttttgatgacagcggagtggacgaaaaggagaggaatgatgagagaaggtgagaccgaagagtcgttttaccggcgccactctcgcctctggatatattcagtaaatgctgcttgaatcagagacaacgccggggaaacttacaggaaaacaatcgcttggttctctcctcgagcaccgagccgagtataagccctccgagcgaggtcctcggtctcgcccatagcactaccttctttcccgccatcaggacctttcgaagatgaggtgtagttgtttaagctgattagtgcgtgggaggaaagccgcgcggtgggtaggccgacatggaagctggtagacagtcaaatcagctagtttctacctagaataatagaaagaccacgtaccgactggctaaatgtgcggtaagatgggtatcggattgtagatgggctggtaatgaggggagtgacgattgcacatgcgacggggtgtgccccgctggcaaagtcccaaccatggccccgaaacctcaatctgaggagatcgtgtgggaatggggtatacaggccgcgctaccgcagcaaaggtgtccctgaccgatctgaacgagcaagctttgtgccgaagactttgatcgagtaagggttgaatcagcgacaaaaaaaggtagacatctcctgcatacgaagcagatatggtcaaagcaggtaacacagagatcgctggcgattcgaggatatcgagcagatactaaaaccgagtggtttccgagattcgcggcgttagagtgcagtccgagcgatcgtgagatgagaaatcagtgcggcagttgaacgaaagacgatcataagattagaactatgaaggcgatagcgatgtcaggacgttcaataatgcaagcaatgagaacgaccggacaccaaaaaatcgaagctggagaacgagcgaggaaaagacgccagacgacagcaacagaaacagagccgaacaacagtcgacggcgtttctctgggatcagctgtgataaagggaattcgatagcggagaagcccgtaacttgctaatacaagcggtatttttcaacatggaacatcaggcccagtccccagtcgacgaccactttatgctgggccgctggaccgactacgttttcattctatattgattcagcctatccactagttctaataaacgaagtgtccattcattaatctcgatctacatgaccaaggtctgctttatttgagtagactattgaatgttgatgtcaacatatgagcccttcgtccctgacctgggaaatccctggttatggtccggccggaagaaccaaagacccttggacggcctgcagcacgcgtaccaagtgttcttaaaatagtcatactgtcatactgtcatagaaaccagaaaccagaatcccaagcgagaggaaaaattgaaaattgaaattcagtctcagatatgatacgggactagaccagatcgaagaatgtgagacagcagaccggtccaatcggtcattcaatattagcgtcaatcattcaacgccacgcaggttgaagaacaggaaaaggggctcgcctgccttttcccctatttctttctggttggacgtgaaaaaaaaagaaagaattaaagaaatcagggccgattcaaaacccgtaatcgattttcgatgacaagttaaagattctgggtttaaattgtcatgatcagcatcaaccccagttttattggcaggattgccagtagaaacacagcgctctgggttggaggagagtcgagggaaacgacaagctcagcaagaaagtgggtgccgatgatcagacaatggaagagcatatgatagagatggctggattgaaaaatacggctagccgtagttcaaatataccatggctgctaggctaggctagaaccttctcgctgtccgggtataaataacaacaaggcgcccacacggccacccaacaaatccagctggcgaggaactgtcatatgctcctgctcaggccgtcgaagatctggcatctggcattcctgcgggccagcagcagagtatcagccgtggcgatctaacaggcttgattcgcgatgggtgagacaaggccagaaactctggagaagtccgtgagacatttgctgttattttagggtcctgagccccgcagctctctccataccctgacctgttactatttactaatccagtaaagcggcggttggtcgctaaactccgtactgtaactatacaagcttgaaaaacatggtcttttgctatgggagtccaatataaatcaggatgaagaagtgcaaggctcgtttaaataattatcgttcatctgggcgtcctgatcccttcaaccctgaaaagggtcggcttgattattcattatgggactagaaataggccactcgggtgcctttcagtagtcgatcttttgggacgctggactctttagttcgaaggtagtggtgatctatctgtaattctggtaattttgaatacgcagacggagtcgcccaaaacaacctgaagcagagcgattcactccgctgcatgacaaccgatctctcttttctcacggcttccgtctcgcctctttgttttgtcctcctgctcgatagtttgcttcttgctttcgcttgaatttcttgttctgttcctcgtacatctttgcttcaggttcaacatattggcctagttaatactaatctgtgtttacggacttgcttcacgaccttcgttccccaacattcgcttgtaaagccgcgaaacagacgaccacttgccccgatcgcattccgtcgttcagaacatcgaaatcgctttcttgttgaacctatcatctcatcgaatcgccgttcaaactactacgctcaaccaagtgacacggtaacgtcttaaaagcatctgacgctctgcaatcaccccattccatgcattaactcccgtccgataccacgctcgctttcctgggcatctccctgggctactcctgtcgaccaaaccgatcctgatttgagtcggatataatgtcgaatcgattctctgtgtactccacccagtctgcaggactgcccggtggccgtccgtcgaaccagctctcaaccacaacattactgaatgcccttcacgcacattacacctctggcctaccgtatcaactagacgctgggacaagtgtagttgtcaacaactggcttaccgccgctcagaccggcgcggatggtcataatggaggcacatttgaccgcgaattggcggcaagggcatgggaacatgctcgacgaagggcggaggatggttgtattgttctgaggtttgtttcagacaagtgcttttaaacgtagcgctgaccgcttgtagctctactcaccagtcaactccctccatatttgaacccttcttgacgacgcttcctctctccactcccagcgttactttcacggctctctctgcactgaaaccgttcctacgggccgtaactgccttcaacccttcttactcactatactctgctctctccgccaacttcaccttcaccctcaaaggtgacttggttgcgcttacgttggctctgtcgacttcgggccttaatgtccaaaaaggcttgctggacatacccacggaacctgggtatcgtgcgtttgatgtcttttactacctattgacaacaacctcgacccaagcggaacgggagttcttggctttaagggaaccctcggcgtatgccatgttaaacaagtctgggacatacgatccaccttcatatattcccaccgccgatgatgctgccgctgcggaggactttagggctgctctgaaagccattggtatcaaaggagcatctctgcgaaatcttctctcagttcttgccggccttctgaagcttggaaacgcggctggattcctcgtagacgaggaggagcttgaacaaacatgcgaggatgttggagatttgcttggtgtagaccctgagattcttcttcacaaatgtgctaccgacgagcgcgagcttctcattactggaatctacgaggccttggtcgattgggtgatcagcaaagctaacgaggccattgctggcgagcttgaagagttgaatgccaatggatcaggcgaacactggaacgatgacgacacggtcagcatttcagtcgttgatattcctcgtcctgccttcggaaaagccgtagctttgcgaaacgtctttgacgatagcctcggtatcaatgcagagatgaaagaggacggcattccagcaccccctgtcgggcaagccattttgaacgaaatggcagctgcagtggagcagtttgggcctgaccttgggattagcacagaccctactaaggaatacgaactcgacaaaaggcaaggtgttttggagaaagtgggcattgatctcgatgcagattcatttctgcggcagatcttgattccggtcgagagtcaaggcattgctgttgggaagaaaggccggttcgatcttgccagcactctcggtagcagcagagtttggcaccatatatccgtccaccccagcgatgacctgcccggagcactgaatacttctgcgccgacagctgcgtggacagcaagcgctgtatctcgccaaattcgcgagtggcgacttgttgaatgggccaatcgccgcctcaaacagttcgatttcacggccgacttcgacgtggacgagtttgttaaccgttattctcgactgggctgcgccgatggcagggacggcgtggagagttggttgatggaaagaggctggacgaacggcgatgcttttgtcggacatcagcggatatggatgagagaaaatgcttggtgggaagcggaaacaatgatcgatcttaaagcggatgaaccgccgtcgacgcattcctacttcagtaatagcatgctcgacccccactccgggggcactcccatggccgaatctgccagtctacttggaggcagtcagagcaatctcctacacagacagagtgctatggcccccagcgtcatggccaagtctatagcacccagtgtgcctcctaccatgaacatggccggtgattatggtctgggtagcaaaggtgatgataaaaagtgggacaatatatattacgatggcgatgctgaagggggagatcggaaacatctcgagaaggacgagatcacccttggacgccgtgtttggactgccttcgtttgggcgctaacattctggattccgtcattcgtcctacgctatgttggacgaatgaaacgccccgatgtccgaattgcctggcgagaaaaggttgtcttggttcttctaatcctgctcttcaatggcattgtttgcttctacatcatcgccttcggcgacctcctttgcccaggcaaagacaaagtctggaatgaaaaggaagtcagctggcgctcgacaagcagtaatttctatgtcagcatccatggctatgtctacgatatcaccaaatttgccaaggtcactcatggcgacacatcaccagaagcgacgccttcgctgatggaaccattggccggcaaggtattggacgcctattttccgcctccgttgacccggatgtgcgggaactatgtcaatgatctcgcaatcaacctgcaaaacaacgacacctccgccacagaggatcagccgctggccgtacataaatctggaccacgcaatcgaccagatacgactaccaagctgcacaatatcacttggtacgaacaggacttcctgccgaagattaatgagtactacaagggcaagcttgtctggtccaaggatactgttaagaaacaagccgaaagtagcagtgaacgaaaatgggtcattgctcacaacaaaatctacgatcttacggattacttctatacgctagacatgatgaattcggaaagttcatatgattggcttccttctgcaatcactgatttggtcaagaacaaccctggccaggatgtctcggataaatggccgttgatgtcgtctcctttccgcgaagcccagtcctgtcttgattacgtgttctacaagggcgatacagatttccgtgatggtccgcggtgcacggtcaacaactggattctactcgcattcacgatcttgatttgcgcagttgttcttgtcaagttccttgccgctctccagctagggtcaaagccagtccagcaactgcaagacagattcgtgatatacatggcgccgacatacagtgaagccgaagactcggtatgcaaaggtctgaactcactcagtgcgcttcgatacgacaacaagatagaactgatctttgttatatgcaatagtatgattgatggtggtggtaacgagcggcggacgccgaaaattgtcctggacattcttggagttgatcccaaaatcgaaccctccagcgttgcctgtcaaatctatcggccaaggcaacgaacagcttaattacggtaaagtgtactctggactgtacgaatatgaaggcaacgtggtgccttatgtggtcgttgtcaaggtcggcaaggagtcagagcagaacaaatccaagcccggtaacaggggtaaacgagactctcaggttctccttctcaatttcctcagccgcgttcaccaccgtgccccgatgtcccctcttgagctggaagttttccaccagatcaacaatgtcattggcgttgaccctgagctttatgagtactgcctgatggtagacgcggatacaagtgtacgtgaggattccctcaatcgccaagatagctgcgtgcgccaatgatgctcgcattgctggtatttgcggggaacgtagtcttcaaaccgaggaaccaagttggtgcacaatgatacaggtttatgaatacttcatctctcatcatttggccaaggctttcaagtctttgtttggcagcgttacctgtcttcccggatggtaagtctattatcccactgttatacacacatcactaacgacacagtttctgtatgtaccgtcttcgcacagcagaccgcggtcgtcctttaattatatcggagaagcttcttgaggagtattcggataataatgtcgatacgctacacaagaagaacttgctggcccttggtgaagatcgatatctcaccactctcatgaccaagcattttcccaccatgtcttacaagttcatccccgatgctttcgctagcacggcggctcctgagacatggtcagtccttctgtcgcagcgacgtcggtggatcaactctacaatccacaacctggttgagttggcggccttgaaagacctttgcggattctgttgtttcagtatgcgttttgtggtaatggttgaccttctgggtacaatcatccttccagcgacctgcgtctaccttggatatctgatctaccgcgttgcgagcgacacggggcccttcccaatgatctccattgtcatgctggctggtatctacggtcttcaggcgattattttcataatcaaacgccagtggcagcacattggatggatgattatctatctctgtgcataccccatctacagtttcatccttccgttgtattccttctggaagcaggacgacttcagttggggtaatactcgtgtagtcattgaggagaagggttcgaagcgcattgtcgcggtggaggacgagcaattcgatccccgcagtatcccccttcagcgctgggacgactatgccctagccaacaaccttcccgggcgccgaggcgactacgccgtcggccaagagaaggctttctatggcggacgctacatggatgacacggcgatggaaatggatgacatgcattcgcagtactcctctgtcaagcccgcttcgacgattctcactggcttccacggtcaaggtcggaattcgtacatgccgccgcttttcccagctccctttggcggaaatgtccctggtaaccgcaactcgcacttttccaccttttcccggtacaccgaccagcctctccagagcaacagtcatctgcagacccgccatatgtcaatgggcaacctcagccagctggagagcagcggcatgaccaaccgccacagcgtcggaatgatgcaaagcacagataaccttcttcgacctaactcgcgcagcccggtagggtttaactcgcggcctgccagcgcgttcgatttccgggcgggcatgaacgggcccgacgagggtgcaatcacggaggcaatccggagctgtctcgcagaggtcgacctcgacaccgttaccaaaaagcagggtaagtgtctttcttctccctccctgtctcttcgcaagcaaactaacctgcaatagttcgcgctcttgttgaacaacgacttcagacgacgcttgttggcgacaaacgaacgttcctcgaccgtcagattgataatgagttggcgaatatgtgatttttacataacaat

SEQ ID NO: 5775 - DNA, 7549 bp, Emericella nidulans
acactgaccaacatggaagctgagaaaaggtcatctcgttaaggctattgtgccttccatgactagactattgggaacagaaaacgccttgcggctatcttcactcctccatctcggtcctaaactctacccgctcagtatcagcctgtacctttttttcgctcaggtaagacatgctcatctgactcccaaacagtccttcctcttagaagtcaggcgtggcaccctgtctaacctttccattgcctccttctcattccgctgcccgctcgccagtggaataatctcggcgatcgagtgacaaccatatcatgtcgagttgatcgtgtgctttgatcttagctccgtcactccagctcattccagttccatgctctctatgccgagtttgatcatttcttgcgcatggggcttgggggctcgtacacctaggctctccgtctagctcttccctttggacccacccttcaaggccttgcgtcttgggaagtatcagagacaaggtatttttgctatggtgaacgccttcatggtaaccactgtcgatgacgaagtcttgtactccaggaagcagacaacatcagagaagcgccgaaaaacaatccgcatttcaccggcacgagtcgcaaaagccagggccaaggcggtccaacaccgggaagtagtgtaagaaatgatagatacaatacagctacacgccgtcttggaacaggtacttgcgaagaacaaactggtcaacgatgtggttgtaagttaggatgcatcttcttactaagcaaaagccaacctattcgtctatcaagggatcaaacgaggggctgagcaatcaacttcaataccacttcaatcactagatcgctcacgatgctatcttatccggcggtatttacttttcagtgtatttgcacaggtttcattatccataacagtgtcctgttgccgggttctgagagaaattgtatccaacgactcgactgtatgcagtacgagataccacaatcatgagaaaagaggggttcattcatacaggacgtcaccgcttgctgacttgcagcttcaaaatgaactcagagggaattaagcgaaaaaagaaataaatgacaaaggaaatcgacaaaggaaaagggaatctagctgacgctggggtattgtgatgatggctttggcattatctcatctccaggcgccttggcttagagataacaggccttggatgcaatccaggtcctcttcctgactcgctgcgttgccgcccatgaatgctgaaacgtcaccttccagaccagacatggacagggattttgaaggtccgactgtttttcgatgcgagggctgtgaccatcgcgagcgtcctgatgtagaagcgtcgtgtggtcggccgtctcgtccgttcgagtccttgaggacaggccggtgggtatggctggaaaccgtccgtcgacgcgattgggatactcgagttccaggaatccaattctccttgtctgagtcgccggcttcaagttcgaggtcatccttagcagatttagagttcttgagtgtggaagggaatttctcgcccaaggctttgcggccagattccaaccgaccgagggaagagacagtacgagaaagcttctgcctcttctgtcgcattgcttgcgtgataggggtaccctgggtatcggagtttggtgtgaggagggaggggtgcctggcggacaggcttcgggtcagagaacgcttgccaccggagagtagggccgattttggtgtgctttgtgaactgaaaggtgtggcaagtgcacttcgcgcgtctgtatcgaagatagactcccagttcctgggatcgcgcgacctaccgaaggatttctctctttctaggctacgcggtgtacccaatacaacagcgctattgcttctgcgaagaccagcgagtctaggggtgcgagtggggaacatggagatgcggtttttggacggggatggttcgccgttggcacggatgacggcttgtccgtctgccgacattgaaattcgaagcgagtttcgtcccttagggggtgatggtgtcaattcgccttgctttcgaaccatggcttctccgtcaaaggaaagcgatagcctcagggacggtggtgactttaggctgtctagcatgcttggggttgctgactctttgtttgtttctccaagatctgatccagatctctttctcttggcggagtttgggtgaagcgcgttgctggacgcgtcgataggactctgcatcgcgttcaactcaaccagactgctgtctgccgcttgttgactcgaatttggggattcggatatggcaacgctcgtttgtgagctctcctccacctggcccctctcatccttgtccactgcatctgatgcaaaggagtcgccctcgggcatcgacggccgcgaaccgtgagcccgttcgtggtcatggtcctgctccagcctgctggagccctctacaagtatactgtcgtcgcatttcgttttcgagtcgtcggactgggaggagggcaagagttcgtgaggctggagaggctttgactttcggcggtcattctggcgacggttctgaaaccagatctatggagggctgcattagcgcgggatatatccaactaggctaagggagttatacctggacttctttctcacccagcgaaacgcggctgactatgctggcccgtgatatcttgtccggttttgggtttcgttggtactctgcctcgagaatcgcgtagtcttctgggctatagacgcgtttatcaggtcagaacggcaaatgatcgaacgctaggttggtcatgagcagtaaaggcaaagcatacctagtccgacgccgtttctgccgtgcaagcaatttgttatccacacgcggtgggaggttctgagtcaacgtcttctgggaatggaccagaaaggcgtagctggaggaggccgtagacgagtcggagttttgagtagatgggggagaggacgataaaatcacggcagagggctcggggtcagacatagtgggtggtggttatgtagagtcgacacggaacggcagcataaggacgaagcagcagagaggacaattagagctaaaaagaagagaatgcgagaaaaaacactggcaccattgcgtggaagagcaagaggagcagggaaaggagaagtgtgcaccgctgaagtgggaatgttcccgacctagagctcgtgcagaaaagacgcttcactgatcgcgtcgcgatgtggacgccgtggacgagacgcggcgtgcagcctgagtctttcggggccgcccgagtctccactctggtcaacttcactcttccaactcgataatcttccacgcacaacgcgaaatagatcttcgagttttgcttcaattgattgaacggatgaagattagctgtatcatggtacctgcacacattcgcgatgctgatcgtggtgctgtagaaccccaatatgcgtgaccacgtgccgatccataccagacccgctcagcatcacgacaagacaagatatgccaatgctcaaatccgaggtaatcacttcctcagcctagttttcagcctgctggaatctatacagtcgccttgtttgcaagggaatgtactcagcctcgaggatccagaactgaaccagtggaccaaaccgtgcttatcccactgtcatctgccccgcgatcccgtcccatggtccacaaggtctatacaccgactaatcactactaggaaggcaacgcggcactttttttatactgatttaggaactctatcaatcatcaccgcatctatccgggaatgaccgcatagtttgaggactagctatcagagtgccgggtgaaaattcagccatcgatagttcgaaggtgtaagacaaaaacaagtcggccatgaaatcaatccgtatgggctaggatatcaaaagccgccattgctgcttcaagcgcttgatatccttctgcggcggataactgcatcgcagcaaactggtcattttctgccagcagatgctccctggactgctgatccagccttccgattatgtatatggaatggtccgcgccattgtctcctctttctccccagcagtgttggcctacagtctctcttttatctttctcgtttgatccccatctttggccaaacacatctcgtctcgtatattgtctccagctaaacaatttgaacagagcgcgtccgcacactttccatccgcacggccctttcaaacagaattgcaccctccgtcctggtctgtgtgagagccagtcctcccgcgttattcaccgtcgacgttcctactacgtggccggtgtcaggagggactgtactcgttagcgagggtatgcgtcccttcgctttgcgggttttaaagttgacggcgcgcaaatgggcccacggatgaaggggtaacaagtaagtgaagtagactcaaaaagataccatacttacaggctggctagccttttaatattacatattgtatctttgctagtatcggtagaacaagcgggaatatccacctcgacgatgattcgagtcactactattatgtataaataaagtataatgagcattgttcctaactcccgaagcacgaggacgttatgctttatgctcttggccacttgtacttacaactttaaagtctggacggtaatttgcagggatctaccgaacaattcatcggagaacgcgtaaaaacgcgaagtcacatgacattgtactgcgcttacgactataattaccaaaggtatctcgatcacgaaatacaaagggctctgcctgtatgagtccaatcatgcctcctgttgattcatatggctaggaatgttccatgggcattatccatatgtacaaaagctctttccactgtcggtacgctctcaagcatatattgtagactctcgccgaggtcatggctgtcgcgcagactgctattatccggcagcacgatgtcaacctcgacattgagtaaatcacccgcgtagtacgctcttaaattttggattttgaggatagaccgcgagaaccgcattgtcatgtacagaaggatgctgacgtcctcgcgggaggcggcagctccggtgaggtggcggatgtgctcgctggcggtacgactccagttccagattatgtaaatggagaggatcagacctcccaggggatcgagaaaccagatgttcgtgaagccgcccactagagcattgcgttagcgttactgtactagggaggatgttggtagtacgcaccgagcgggaagacgatgctgaagaaattgaaaactacatccgtcattgcatcctgcgccaaggcttggacactcgagttatttattagtcggcaccagaaccagcacaggaacttgacgaccacggtgctacccataatcgccgccgatggcactgatagctggatcacggcgtgctcggaggagatcaagcggcccgcagacgtgatagccacctgaaagaacgaggtaaccatcacaacagcaaaaaccaaaacactaagtggctccaatcgacgtcgactaatagggtattcgtaacggtcttgtcttcggataagagcggtagtaatccagacgatagtagtcgatagaaaatccaatgctccgtccaccaagctcgcaagaactgatactgagtttgtcatcaacaaagcagcaatctttgcggccaggagaatgacgtttgcgacaaagttgacataaatggcgacagtgacaatgcgggctccgctgtccacaaaatcatgaccttttggtgtgacatcttccaagggtgatgcttctccatccgtagtttgaggtagtagcagcgagctttcactaggaatccgatagagattccgaggtgtgcgcttgatcttcttaggtatttcgtcatctgccaggttctcgaaagatccgtagcctccttcatgcgcgcctgcgtttgttctcttcgcgctctctacagcacgattctgctggtattccactatcagacgacggggcaacgacgagtcgaggagccggtcaatatagacgtattgcgaaataaggttattattccgctcgtagagttgacgcctgggaatattagaacttttgttctgagatgggaaaggcttcatacaatggtttcgacaatcctttcaacgcgttcgggtgttgatagtactgctgcctgattccgttagcaagtcgccaacgtgagtatcaagcgaacttcactgccaacgcagaattaccaattatatggcggcctccgctcgccgatcaattccctcgcccgcactgttgcggggccctcaacccggtgacggaaagaacctgtgtcatcgcgctcggtgtcgatgtacccatctggcctatagaggctttggctgctcgagaacgatcgtcgtcgtattaaagatgaaaggtattggccgcgtgtggataggatgtcgacttgaggttcgagactcggtcgcctgggccggatcggcgattcattatctgatggtgaggatggaacagaaaattgcggccgtgttctgcggccagaagacgccattctaggatcaatcaggcaatactgcgatgacggctgattgttggccccgctgatatcggattgactgcgcttttctgccacagctccccgccttcggctgacgaccccgcattgacatctggatagcttcatatttctagtcattatcttagctcagccaatacatttggtactccatgctcgaagcgaattcttttttttacatcagtgctagtgccgggtaggaaattagggtggcatcggtcgcctccgacagaaatgcggagagagaaagtgcatcgaggacgagcacacgatgggattggctaatacattgaatattggcacaaatgagaagaagcaaggcttgtattgcacggcggttactttctgggtccgctatcttcaacaataatggatgcctttgcggtctcctttacggggtaacctaaataccctagggcttctgcggacatagtaccaaccctttcgcttaattcagcaatcgaggatatagaacattgggttgagaagtcgatgagaccatgggtattctagatctaccgatatatcgcccatgaattcgcttcagcaactcaacgctctcagcctaggaatattgcacgttccccagtccatgaatgtaatgttctcccaggatgttagggcctgcatggcggtgcctcccacatctgtatcaagtctaactgctcccagttgtcatccattcaatgttgctgggcttccttacgaaatgcatcacgagtactcctcttatgaagtgcacttagcccttttgcttcaaactcacttctccaaattaaaaaagcagccatgccttacggaccgtatttacctttgttggctcacggcagtagacagtacttgcgtcaatatcaaacccttgaacctcaaaaacgagtcacgattttccgccccccaaaacagaatatcttgatcgctgtagtctgcaggcctctcttagtactcatgtatcatctcttctatcaaatttccctgcccata

SEQ ID NO: 5776 - DNA, 10918 bp, Emericella nidulans
  unsure (1)..(10918): unsure at all n locations
cttagcagcctcagtttcgttaccggcttcttcgcgttgttgcgctgggcgttgataacgtccgtgatggccagctcaatggcgaacttggtgtttccgtaggggtttgtcgggccgagcgggcagtgctcggggatggggatcatgtcgggaaagcgagtggcatcgccgtaaacggtggcggaggaggagaagacaatgttcgtgacgttgtggcggaccattgagcgcaagaggcagattgtgccgtaaacattgacgtggtagtagtcgaggggcttctcgccggattcaccgacggccttgagagggtacaactaagcattggcaccaaatagcattgcatatagacgcagcgacgtaccttcaacgccgcaaagtggataacactgtcgatgtcagggtgagcttcgaacaccttgtcgaaggctgcttcgtcagtgacatcgagctgtgcgaactcggccttcttgcccgagatcaactcgatgcggttaagggcctcggcggaggaattgtacaggttatcggcgaccacaaccttgtacccggcctcgagcagggcgagggtagtgaaggagccaatgtagccggttccactatggaagggtcaataattattggtgttgctttaaaatatgcaacgtacccggtgacaaggacagatccagaaggcatggtgaatgtgaattgaatgcaggaacgaaggaccagagagatagtactagcaatcgaacaaagacggcgagaatgggggatggcgggagatttaaggggagcgaggcggcgatggcgagctacggagtacagatgcaggaggatagtggggggggtgtagcggccaggctagcctcgtggaggggcagaccacctatcgatttatccgtcattgcagccattctgaactctacaagaacaccaccctgggccaatttcatcaatattggatcttgattctctcttgtaccactaaaaataccacacctgagtcacattctcttcgtttcgaggtctcgatcctctcaaacgataattgctcggagttctcgatcaggtaccgtacgaccgccatacctccgatcagggactcagggcgactatactgatcggcaccgcaaatagagacgcgtacgtaagttctcctctacgtgcgcgacgatccaatatcgggttgatccaacccttatttctgggacatttttttttcatttctctttttcaaaagggatgccgtgacggaacgcttttacccggactgaacagcgcccgtgtatggtggtggtcgactacgtatgcagccatgtctcagggccgttttaagcccgaattgatatggcgagatccatccatggctccatagcgtcccgagtcccgtctgcccggctgtgaaatggggcttaccgcttggctggtgaatcgaacaaatgataatggtaataataatactcaaaaattatacatccattatttcttggcacacatcgatagtacagcgacataaatcaacccgcagaaatgtttattatctgcttctattccttttggtgaataaaaaatctacccgctacctcgctttccaaagagtatcgttcttcttcttgcgggcctaaagtaacaaaagttaggacgttttcgggaaattacaaggggaagttggaagagacataccataggagccaacatcgaaacaccaattgccagcgcaacaattgtcaaaagcaactgcagtttcgaaaatcccttgcccaggatatcaaaagcctgagacggggtcgccctcgtcgcgaaaatatcgtttccgaaaccaaatatcagacttgtactctcaaggagcgtgggtgcggacagaacggtgttgatgcctgccacctgacgcgcgtgagagaggtaccaccgcccatcgaaatcaagaaagggcgcatatttcatcaggccctcttcggcttccgtaggagtagggtctcggccgactggacggcgggggtcgtggactggacgtgggatgccgattatagcgttcgacgcaggaagtgtggcgaggagctggcgcgttgtgatgccctggcgggtctgggtgacggccatgtaagagattggctctgcgatgatgaaggactgggagatgacgtgaggttggggcaggtcggcaatggaggagtagttggacgcggatcctagagggccacggtcgtttggtatgggcgattcatacatttccgaaatgacaagctggtaacccttgggctcagagggatcggtgccctcggcgtagaaggagtatgcgaaccagttctctgacatggcagatgcgatgggctgcgcagtgtccactcctttgtgcgtgctggtatggagaatgcggccggtgaccccgtcgagcaggtagaatgtggccgaatcttcgcccgccgcagtgacgagagctgcgttcggggttagatacttgtacagaacggatcggttgcccaggaccttgccgatggaagcaactgggtcgtgaggtgggcgggcagtggcgcggatgatcttctcgcctggcgcgggctggaacgtccagactgggatgcgagagtctttcgagctccatccgagtattttcccatcttcttgcgtcacggtgtacacgtctggagatgtgttggcttcagatgagggcttatctgtggcagcggaggtgtgagtgatatgcccagtagtaacgtttagggtaacagagctgccgtcagcagcttgtacggtcgctagtccgggctgagtctggattgacttgacattccaggtgtccgcttcagcagctttgacgctccaggcgactttgccgtggtttccactgtccagagcatagacccatccgtttttcgtagcaacgatgacaggtttggagacgccaaagctgtctaagttcgaaacctcgtcagccaggatgctggtgataacacgtttagggagatcttttagccagttgggaaggttctcgagatccttaaggtgacgcttcacacngtgcgtgtacgctttgaggaggctctcgtgaccttcaacttcgagtggatgggccaaatcttgctgacctgcgacattccgccagcttgcggtcagcgcaccggacagcgctttcagtctagtccccccaaccggcccctttggatcaatggccgtccccggactccaatactatggccgaacgaacagccacggagtcgcctttcatggctacctctgaaaccgcatgcacagcaccatctaaggaagggtgctgagtccaccttccgatgatgccgtgagagacagacgacacaactgtagtctcagaatcggtgacccggatgaaataaacattggcgtccttggtgcccgtagagaagacagaccatccctgcaaaaaaggcaaactgtacgccttggaaacggtcgaagatgccaagtcaacgtggtagacttccgcccatgaaccggatgccgtctcgtactggaccaggaagtggggcagcgcattaagggcctttggggcgtggatatagatggacctgatatcttctccgctggtgttctcaatattaacctgcgtcacttgttttgttccgatgacattaaccttcaacgtcctatgcgacttatctgcccaggcgatgacaggaaacgcggtgttggcgcccacaaagagaacggagtccggtccggaaacatcgctgtcggagttgagaatctgctgagacgcttgtcgaccggttagaggatctagcgaggtgacgcggtattttgtaacccttcagcaaagccggttgcagggagacgtaaaagtcagcagttgaggaagcggacacttgaaatggcacatcaacactgtcgcccgtcattatcagttaattagtcttcgctcatgggtaggcagcaaacctttcatcatggtactcccacttgacctcaccagttgacccatccaatcgtctaaccgagcctgaatggcctccagacagtgcaattgcgtcagtgaccaacggagcagagctggcgtcttccagctctaagagctcaagatccaccaccggcatacccggtgatgagctcttccatatcagctttccatctagagcgctccacgcggaaacgtagtcccctaatgcgctgacaaccgcgttttttcctccagaggcacgtaacaaaccttgggcgtcacggtcgggcgttacggcggggcgagagaggttttgcctccataataatgaaccgtctttcggattgaccgctccaagaagtgaattttcggataacgtgtacagaagagcggcatttgaagaggaggacggtcggtggaagaaggtggactgagatgaaggaacacctagcagcgcatggtggtaatcgatgtgaccgacctcatcagcgtagatggcgaatgccgaggggacgcaagaggcgaccaagaaaagcgtcgcctgcagccgcattttatgagctcggtcgtggaggggtcattgggtgttgatggttgcgagggcgaggaagataaaggtaacgtagtggagaacttggggaactccgacgccgagccctggggctttgctcatcttcatctactagattttcagactccatctgtctacacgaacttgacttctataaatcaggttatacacaaaaaataattggcctcaataaagctatttacaagattaagcgaagcacgccttatttgccctctcaacagcctgtctctctccttcagtcatgtcgtcggtgatatcccaccgctgctgtcccaagcccatggctcgctgtccctcagcactaatcgaattccagtccaacgctcccttgaatccaagttcgcctggcccgccggcccctgggaagtcccatggcggggagtaagcgagcgccgcttttcgctgcttgagcaggtaatcgacgttcatatcgcacattggggttgctgggatatagagaacgctcgagtcacccttaccccgatgctccttgtcgactgagtgcagagaatcacaatgccaggcaacatagtcaccaggttctacctcagggacggacaccatcgttgtctccagctcgagatgcggatgtgtaatagggttgtactcctggcacgcaccaggcaccgaccccgggaaggtagcgtccatcgctggctgtagtgtctgactgtcaaagaatggtctgagcatagtgtacgcagtactgtgcacaagcatggggcagacatgtagcgagccttcgcctggggctgtcttggacatggacagccagccctggaaaaatctcagcatagagcaggcgcccgcaccgttgtacaaatccatatttgcggcgatacggtgctttgcgtcccatgggtcgtattcttcccacttgccttccaggattttggcgtataccctggagtactcggggtcctcccaacgctccaatgagcctccatcaatgtgaggtcctagagtgaacttgctgtcgccgggctgtcggatacgcaatctgtcagcgtatgaaagagggtaccgcgtcgagattcgtgtgttggggtctgtcgaatgccataggcgctgcaggaaacgctgtgtatctagcacgttggagtgggctcgagcttctgcttgcgacggcgtccaatacagctcaaacaccgccggtgagtctgggggaaatgccttgactttatcctgattggctgcgacgtaatcctctattctctccttccaagcccgtgcttctttccgcggcaccacatttctgataacgacagatccgcgatgacggatctccgccaggagcgccggagacacatcaccggaaacaacgtcagagtaatccacgatagggatgatctagcaccgtcagtcttaaggtactcatctatgttatcatacatactccgctctttttcgccttaatcttgtccacctcctcttccagactgggcaaaagcctttcccagctcttcttcaaagcatccccgtttctgcgaaatattcgctcctttagatctttaaaccgcggtggcaacggctccggtttatagtccggcctcaagctgggaaagacactggagatatcacccgctgccttggtaagttgggcggatgttgatgtggatgccgcgcgggcggttgacctggtgataagttttgggactgacatctgtagacctctgaaatgcgttggcagtgtctataatacaattcgttcctgagattgacttgtcccaactttataccttggagaatggggagtagatggcgggatccccaatgcagtaagcgggccgccttccgtttctagtactctagccgccgtcgcccacagatacagcgtcattggcatcggcatcaggatgcggagaattccagaccattcgtcgcgtctggcgggtcaaggctattgtccccaattgtttttttttttttttctatcttaataggggtaccgtgcattggccttcttcgatgtcgcactagatttttgaagctgttccagacaccgagtacactctgtaccggtactgagttcgatgccaaacaccttttcacatcagtgaacttctgcactgactatgcgaggcaatcacggaaggtgaaccggaaggtgctgcaagatgtccctctacaaggtgacgtcggctcgtgccaggacggtccttgacgttacctaagatgtaagtgccagttctgatctcttgtacagccaccaattcgctaggaacaaagcatatcacggtatttaatgacaacaacaatttgagaaccaggaccttctgctggtataattcagtggaatgttaaagcataacctaagtaagaccctacgaataggccttagtccgcatcttctgcaaatgcacctttctgaacattgactcacacgtctcgctcaattgcatctccataatgcctgtagctcatagcccattgtcctcttgtgactctaaacccagcaattacccaatctgattcaggataaaattgatcttcaccgtacctgaccctatactagctgtgccgccccacgattcagttgtctgctcctgctacatagttgactgggtgcgtgtacttcaggttatagcacaatttgggcacatccaagatctaaactgacttttagatatggactaagtggttggaaggttccaatgcacatatatttttttacctttttagcgggagcactgcggtagcaacagacaagattgatagaccagatacctgaacaactgagctagggtaggcaggttgtatacctacaatgcccagaacataagaacctgggtccatgcacaatcaatatagttcattattaaccttgcttcatatagattatcatagctgttgtgcctttcaccatttacagctggtatgtacaaataagaccctacgacgtttgcctgaccacaggcgtaactaggtaggaatgccgatgcaattcctgctggagttagatttggcggaaggattaatggatacaggaagtggtaatccttcgtactatttcagcattgaatggttgcgccacctcatacgtatgaacattattttctatagccgtgtttcagtgtaggtttgtccaccaaaatggtcctatttaaccctaagttatcgaactccaagtacagctagataaccggagtgatattgatacaggatgcagcgtaggttcaaaccccagatagaatacatttgcgccattcaataaacagagtctttaccataaatcaaccaaaccataatcaaacgtctaatccttcttgggcttcttggtaccatactttgacctgctggtaactcgactagcaacaccggcctaaagacgaccgtcagaacatatgaactcggtaggctcaatatggaatttaaaacaaggggttccaaacgtaccagatccatagctcctcggaccaaatggtacttcacaccaggacaatccggcgctctgccaccgcgaacaagcacaacactgtgctgctggacattatgacctacaaagaaaacaaccagttaacagaccagtccagccagcgcatcttagtctagtagctagacgtattgaaaggagggaaagaggagaggggttggagacctaccttcaccagggatataagccgtaacaaccttcccactactaagcctgactctggccgtcttacgctcaccggagttaggtttcttcggtttcgtgatacccgtcttcatgcacacgcccttcatctgcgatcggttgatgagcgccggagagcgggaacggcgcgcagcttgagctttacgacatccgcgccgtacctgattgtatgttgcaagtttaaacggcgatgaggagaattgccggatcaaggagggcttcgcggcggcgaatgcttgtgctgcggcaagtgtgcggaggatgggttggaaacgggttgtgctgcgcttgatggcggtcgtgacgggacggtgaatgagtgtccgcaggctgtggagggcgaggggcgagaagagtgagggcattttggcggctggcagtggaatggtgcttgatctccgggtgctgaagcggttaatgcgtctgggaataatttcggggagatcatgtgatctgaggatattgcgggcttggtttttgtggttcacccaaggagctggacgcgccattcggagctgccttggcttgactgaccgtcactggcctccaagctgcatacgacttccaacacctctctacctacaacctacaattcccacatccgctcgcactcaacctctagcttctttatatttttgagtcctgaacgaataaagatactcgataaaggagaattcataagcaatacctacgaataatttcataagtatcacaatggttcgcccgctcatcatctcacctatccatcaccatcaagacgattagaaccagctctaacagctaacagtccctccgcatcgcaccaccctcatcccaccccactcaaacatccaatacctcaacccggcaccttcccaacacccatacctcaagaggcgctccttccgcccctggagtccccgacaccctccgctcaagcattgctctccgagctcctcgcggcgctccatccactcaaccggccacaccaacctccacacatcctttagaagcccgcctacttgcgtggcgccagacccaagatgcactgaagatggagggtctccgccgcacgtacggtatcgcggagcccgtgcgccgtggcatggagctgaagattgttcgcgatgggacgttcagacctgctgtgctgggcggtaataaactgggaaatgtccatgaagacatcttggtccttgggggaagggatacagagatcggatgggaggatgttttccatggtttgttattcctttcgttctatgttcttactagagaaaaagttggactgggctgatgtggcttgctttgcttgtaggagacgacttcagggagccaccttccttccacgacgagatggagaagcggctgcggatggactagagtggtggaactattgggggcggcatcttcttataggttaggatcgttcgcttgttgataattggactttccgtggatctctcagaaataacttgatgacatgacgtcgaatcaatacaacacgctacgggtacggaatgattccaaacgaacacctgtgtacaagaaggcctagagtcattttggacttgataataggcttctacatcgtacattatacagtctgcacagtcacaactgtaaaaatagatccggcaagcgcgcctggcgttcaattcgtgccgttacctagcataccgctcatcttcccaaacgtaatatgtgcgcatattcgaatcagagcgcaggagccgtagagcgacatagtcgccctcaggctaaatggtggaacccaaatctcccaataaacaacgcacgatggttggcacgagagcccaggagaaatcagaaacacattacaacaaacctggaatgagaagataaaatgaaagccccaaaacataagtagagaggacatgcttgaaattgcattgatgaaccggacaaagtgcaaggatatgaccccaacaatggaacagaaatcagaaggaaaaaggaaataggcaggcgggaaatggggtatatagggcgatgtttggatgtaaggcgagagatagtccattcttgggacgattgcgaagtggacatggagtagatcggttcacgagaaaatgacaagcgctggtaaggagtgtcaagccataacggcatcccaggtttcgataaatagcggttgacgaagtacgacgtctcacaccgaacctgttcgtaggcagaagccgataccaggcatcggaaggttcaaaggatgtggcactgtagtggaccacaggtaggtcgggctggtcgttgcctctgcattacaggggcgattggatgaggaatgtcctagacactggggctcgtctccatccagtggataacgtgcaaggtacagtccatgaatatacgtacgaaccatcaatctttattgaatgacacagcgacaccgagggctccgttcgctggcttctcgatcgcgagaatactgcgccttgccacctttggcgtcctcctcgtccacaatctcctggggtttaacagtcatgtgcaccacgttgggtgcgtcacggctgaacttggaatctgaacccatcatcaacatcacgccttgggtaacaggactcggaggacatcacatacctgagagaggagatttatcatcaaggagttttccaaaggatattagacggatcgagctaggagatgacggccgaggctcccaatctaggatgcatcagctaggagccaccattgataccatgttgatgaattccttaccgtcctgccatgccctccaaatcaactccttcaaagtgtagacgctcatggaaaacgggtcatagttatccaa

SEQ ID NO: 5777 - DNA, 6780 bp, Emericella nidulans
ggagaatcagaaggagattgaggagattatccgccaaaatgcggtcacagagaacctgcataatgccatggagcatcatcctgaatgtacgttgacccttaggtgaggggtggtcttcatggccgccggcggaccgccctgcatgaagtttgagcacagaccgctaacctgtgtcacagcatttggccgcgtgacaatgctgtatattcccgttgaagtcaacggccataaactcaacgcctttgtcgactcgggtgcgcaagtaacaatcatgtctccggactgcgcgacggcgtgcaacattatgcgcctcgtcgactcacgctacggcggtattgcgaagggtgtcggaacagcaaatatcctcggccgcgtacactctgcccagattaagattggcgacatgttcctcccttgctcgttcaccgtcatggaagggaaacacattgatctcctgctcggtctggacatgctcagacggcatcaggcgtgcattgatttaagacgaggtgcgcttgtcatacaagaccaagctgtcccgttcttaggcgaggcagatattcccaagcacctcctcgaggagtttgaggatgagcctgtcattaagggcgcggatggcgcggaggtcggcgcgcggactggcgccgttacacaccaagctggcggcagtactcctgctcctggacctagctcggctgcgaatgcaacggcttcatcttctcgtccggctgccgtgcatagaccgtcgccgcgctggccggaggcgtcaattgcaaaaatcacagagctggggttcacccgtgaggaagcgacgcgtgcgctggaggccgcgaacggagacttagacggggcgatagggtttctgatatgattgatatgattgattccattccgagacaaaggctagtggcgatgttgagttggagtttgagttaccgactacggggaattggtacgacgtgttccattaaggcagtgcttaccttttatgattcatggctagcaactatatgatagacctgccgagctactgtttcgccggcactgtgtattgggcatcagtccttccagaccatcccactgtctggcattgcatacaaaataacattatatatttccggacactttctcctccccgtttagttggtttcgcgggatcaaggtcagtgccaggatgccatccccattggcgtagtaaccaaaacgtcttattcattcgtaatctcacagtcatcaatgttactgtagagtatggctagatgtgaatgaagtgtatataacaatgcaataattgtagtgcatgcgtccctcttttccacatccgacatacgtgctccactaacaaaaaatcatgataatacacttaccacacggtatggcttgcccttgtactcaagtgctcagcaggagctatgatgttgcgcgggggaagataaagagaaaacgccgatacgatcactcccgtttcgacttgtccagcctcaggaggctcgaccgaatccgcccgaacatatctaaggccataaacgcccctatgataaagtaaaaattagctcaagcttcgagactccgagctcttaagatggtggggctagcgtaccaagcgcaacgtaagggccgtaaagcgcggttaaattttgtttttcggcggcggtgcggtcctcccacgaccaaacctagaacagacagcccaaggatgtgatgaatgactggaagccgaacacaagcaggtgaactgggaccacaggatcatctagcaagttgagaatccggattagccagctatcaggatcaaaagatatctgtcacggaatacgaggctggaaccgccgcagttacaactagggctagctcgcatggtcctcaatgactcctgtacagagtactccgtagggcttagtgtgggtcgatgtacctctcaatagggcgccgagggcccagatactcagcggaacatgatacaatatctccatccagatgtaggaagtaaaccatgctggaacagagtcttcaaagaacttatcccggtatgtagcagtgtaaaaatcacgaagttggcgagagacggcattgtcaagtagaccggggaggacgggaacggcgtcaaccactattgagcaatgtcataccactcgggcgttagcaatccgtacgtagactatccgtagaagtttctgcatctggctgcaccttggtagatggtgtccagcgtcgtcaatcagccaaattgtgccgtttgggcagtggaaatggtctgtcttgtggaggagaccggaagcatggctgcggggacctaggagaacaactcacagaagatgataggaatgtggattgcgaagaacccaaaatagactaggtcgcgtttccggttccaaagcgaggtcatacttgtctgacaggcgggtcctggttcggaacgaacgaagaaacgatatgcaggagttggagacgataggtggtgattcaagtcatcaaaagcgtggtgaaagctccgactcacaacgcgcccaagaaaagacgaaggcgcgtagtcatgtgattccgtgccgggctaggacttgggctggtggaaaaagcaacgctctcttctagtcttaacacccaaggccgagatgcaagtaccgccgaaggcccgccgttcaccagatccaaatcggtggaagaccggcagagataaggcaggcctcgggccataattgctttttcgactcacgcgtctcgaaggtccctaaacatagcttatccttagctgcgtggatcgcgcgaatgtacgcaatctgctcctcgcggtaagtaaagtttagcgtctagcctaaacattggaagccttcactttgctttttcgcccggcttttggctcttgtagtatattctaacattgcaatttggctcagataatggtctgccctcgctgcccaagaaacagaatccatgacctaatgcaaattcccagagagcgcgatcatccttcgtccatgcgttcgcacctactgcgggatcgattgttcaagaaaagcccctcaccgcaactttgaactgacaattagatgccgggttccattgcggtttcggctcatgagaatgactcgctggcgctcagcatgacgacagggccgaaggtactcacagaccatcggctctcgagtcgaccggtctcaaagtacgtgctgatcgggcatacgctcctggcaatcggcttgactcagtaataccgccaagatactgcagggattagtgctctggccactttcagggcgaaggatagtatcatccaatgtgtttctcgaattcgaccagacagtcagactaccgcatggatgctgcatgcgggatgcagctagtctccccgagcctagcattcacactggattacctcaggtttgtggtccttggagtcttgcactagtgcttgccttcgagattgggacggtgctaggcccgctttcggatccttggggcaagccacgggaacttcacatttagtgtcaaagctatgaacactcggtccaatgatagagttgttctcgaacatagcatcgaatccatgtggatcctttcaacgacccgaagggccgaaaggtacctgaaaggacgttttctcgggacttggatgcgggccctggagtagacgtacgaagccgtttacgaatgacggcgttccagggttgtcactttttgcctatctggcatcacccagtttcccttcatcaaggatgctgatccttcgaggtttcctttgcagcacctcgatcaaccagttcccgccctggttcgaggagcagccgagatcgtcttggactgcccgtttgaatccacattggactaccgacgtagcacgaatcgatatcataaaccgatggagagtttacacaatatggtggatacacgggctgatttgattttgattctgcagcctcaattgagatgtcatctgcacttggcccgtgagaccattatgccagcaattgatttggctttggattctggcatgcaagtgaatttcgccttccggtattatattttcctcagaatcaaactttcgtctcgtttttcggtcagcgtcggcaagtcttcgaacaagatcaaaggagagattccatgtagcttaggcgctcttctggggccgaaatcaatgatgtatactttctgactccaccgtcaggattcaggaataatctaccgggtgggtaccccaagataaaccacggacattggactggaaacccgaaatgagatggggttacgagggtcgcaggctcacaggatgcttggcttgaaacaagcgcgcctgctttctctgtctctgttaaattcaccagcagccaatggtatcgactattcaggccaaccatcacaaggatcatgatagcgcaccctccgagagaccactaacagccgtcggctaagcaaacccgtgtgcaaccctagatttcgtctcgtctcactatagagcgagcctatcaggatatgaagctgtcgtttcatcagagctttttgcgggtttaggggaagttacagtgttttcctgggagcccgcgacctcggtgaaatgaactatccgaattagaaaggacgatctccgacttttccccaatcaaatgaggtaacaataaaacggccagatacgatattgatttacctccccactgctccgtactaacgtggcacggaatagttccggaggaccacctgcatttaccttatcaatcaggaaatggaaatacttacaatccaccaaccgaagcaatggaagatctgatgcagtgtcgcaacgccattgaaccaggcttttgatgcaaggaaaatgataaactgattgtgctacgtatgtggaacataccttgtctaccatcgaggccactgtagcacagggcagaagcacgccttgctcggaacttaccatcttctcacaagccatgtaaggactaatgcaagatagcaaagctacagcaagctgcagctgctctctcaaatcttgggcagctagttactgcacagaaagggctcgttcagcgatccagaaccagcccgctccggcgcgagaaacaggctcagcagctcgaagatattgggccaacatgcatgctaactttacggtcccacttaatcatccttctgcggttttggctccttatcggtcgctcaaattgcatcagagagcggtgaagttcccggcattgatgggatgaacgctggagagccaatcccccggaagacgccggcagcagggagttgaaggtgcttagtcgcgcatcgtcaaaccaagatccaatcatcccgatgatcgcatccatgaggtatctagtttgggacagctgttcgttcgcggattgcacaagttatgtgccgacgatgagccgttgaaagccttttcctttgaccgcctctcttccggcctcttgtgacaatcgcggactcaagtccgtatgggtgattccagctcctttcatccagattcctccattcgtctttccgtcctgtttattttggcagatttcgacttctgtcgagtccctcctttcatttgagtggtccatttccctgccgctgcccctcatcggcccccctttacgacttccgtttcagtgttgtatgtcgtctgcccggccgcgatggcacccctgctcaccatggcattgcggaaaacagctcatctgcgcatttgcgcatcgcaacttaaaggattacaggtacatcaagctccaagaagaaaacatcaaagatgagcaaaggtttgtctgcggccgcgagttcgcaaagccgcttacctggaaggaaagactacctcaaggcgcgtcaaaaaacccatcagtgccgtcagagttaggtctacagtctacatgaacaagaaattgccgttgcatgagcgacaaggggggttgatgaggccaaggaataatttgtatcgttagaggaaggaactggttttgctaggagatcgcgccaaagctcagaaatgttgtacaagcttgttaaatgtccacagcaccccaagcaattagatcagcccaagcgagtgaaagacgccgcagcagctgagcgagacgaaccggaagtctaaggagatggaggctcagacaccaagctcggggaaacattgtatattcagccattaaaaaattatttatcagaagaacgtcagcgcgagcatgatttgctggctactgaccaaaccaagctcaggtggcccttgagcatcctaattctctgcttaacttttgattgattgctggtatctgtattatcaacccggaaggtctgcatgcatcagaggtaaatgtgtgcataacattgcctattccctgcgtaactcaagaatagtgtatatttccaggccaatctaggctccgttgatctcggcaacatggtctgtcaccaaacaagtccagtcatcggtgccatagtatacagtgtactggtcatcagctgtttggcctccgctaagatcgtcgccaaactgccagaacaaatcacctgccatcccagttgcggccaaagaagtatcctgccagtccaaatcgttggtacaatggttattcttgattccgtattcctcaaacaggcacggcttgtcgagagtatcgcagattgcggcgtggtcttggacccattggtttccccaggagttatcgctcacgccccctaatgtcatttctgattagcgcaagacaagcagagcaggagaatgaaacatacagtcaataatatagagatgcaaggtgccaaagtcgatatcaggaatagccagattcagagcaaaacaatgacggcgaaggcgtc

SEQ ID NO: 5778 - DNA, 6480 bp, Emericella nidulans
tgcaaatattgttcttgaagggaaaaagttttgagacttcatattttcggcgggcggaaccacaagaaacttcggcgtcggatatggtccgtgcgttccgctccgggcatcaatcagcacaaagtatgagactcaccatggattgattagtagaaaaaaatttactttggtcactaaatgtatcgcatttacaagcattatatgtattttgctattcgttcatgtgcagcttagcatccaaagtatctgtgctccatccaccgaggttcgctctcctcttcaatacgtccaacaatgagcttgacatgcgggtaaacggcggccaatcgcttgacgcctgactgaacagctgcgcaagtcacaaaaatgattctgtcttccggcacaccatggtcaatcaacacacgcactgccatcaaagctgcacctccactcgacatctgggaatcaagaagcatgacattcgaatgctgttcgatacctgggggcaacttaaggtaatgtagttggggctcctctttggtctcattagtccgaatgagcacgcgcccagtgacacagtcgggaatcgtccgtttgagagcggtctctagacatgagcctcctcgcagaatagcaaccgctgatacgatgccttcctgcttcaacccactgtacatgttatgttgaggggtttcaacctctttgggtgcgtacgaagtataatctaaagccctatacctgctgtcagccataccgtgcgaatggctcgagtcggatattaggatgtacttttcaatcagcaaagcagccaacctgtcgaaatagaacacgaagtcgacttgctccgtctccggattctggaggatagtattcatcccaatggactgaggcgtttgcggcatcatgataacattctgtgataactgttcttcgaatgtaatgcgccggagctcttggagggttgcactgtgcctctcggacttttcttcgagcatgcgttgaatatgttgtacaaccatgccttgctcgttagactagcagtaagaagattggttgagggggctgttaccaatcgcggttttattttcgatacctcgaggaatgataatatctataatattgtttagcatagatacccatttaaattggataaatgaagaaactcatgcttacctgagaccgatctttgaggctcaacaaactttttgtacgaaggcttcacatagttgaaccattgcttgataattccatcaatatctcgacctctttctttgacatcacgcaggactatttggctgccgtcagaaagctaccggtcgttaatcaccgggttacttacctctacggcctaaacagacgtccatatcggcttctacgaagatcttgaaatacaagtaagctccgcgacaatctccctaatgataacggggagcatactttgacgtctagaagctccacaatcctgggatcatggaatgcaaggatcccttctaaaatcaagacatggggagaatagaggggggtggtatgggcttgacgttggtgttcgacgaacgaataaacaggtatgtctaccttttttctttcaggtaggcaaagaacgtcagttccaggaaaagtagcagggattatcgacgactggtgcagcacgagtcaaaagattatggctactatacccttgtttgagatctctaagacactgcactaagacgtcgaaatcaatcgagtctgggctgtcgaaatcaaactcgttgcgatgtgccttggcatgctgctccgggttcaagctcttgtagaatgaatcctgcaacgcgttagacctcataaatcagatagctatattggggcccatttctagtaagagaagcttgttcatgataccattacaaggatgacaacccagggtaagtccagtgacttcacaatttccattgccacagacgttttgccagagccggaactgccagcaattccgataatgctcaaatccgcccatggcggagagtagcgcttgtccgacttagtggcagcagaatacaccggcgagatcgactccatgttgcctactgtacctgggcaatctgaaaatcacacacaagatgaaaaaatcaggatcaagtaggcaacaagggtcgacccaggaagagttggttcgataagactgcagtcgcagagatccatttgtcgctcggcagtgcgatgaggctaaaacattttaagcggtatatcctcccaatgaggcttagcgtaatcacttgttcttcagcagctttactcagactctcctagtagtagaactattactgcatctgaaacaccaatctcacttctgaatcctcttaaagcgttcatacgtacggtcactgggctgtattttaccatagttgcaggcacatgccatgctgaggacaccagttggtctcgatgcatcagcatgcaagagacgcttgcgccaatcaggattagtgctggggcgaagccttcgcttgctgctggcgcccacgtgactagatcatttcatctttcctcttccctcttattccgtctgctctttttcttcttctctttttctcttcagcaccctcatggctcccgtctgcgaagctttccatcttcacaggcggcctatgattcagtaccagggcacttgacagttccagcaagcacattctccatctcacaatcatgtctgctaccaattacgtatgcctctcggcgtttggtgcatccgtgtttgccgctttttaacacgggctgcaggtgtctcccacgtcttcaacatcaacgccaacatggcaccacttcgagcgcaaagtcgacgaagttaagccgtccaagacgtacgttcccttccctccaatattcgtcccttacatgatgcgtttatattcaagttgggaatctctctgaaaaaaatatacttgaggagaacatataacttgtgtttctgatacatttctgcccatgcttcgttcagctggagttggttctttgtccatctgctgacgttttcaagtgatatgaacagattggttatggactacctagtcacaaatggctacccagctgcagcgcagaaatttgcgctcgaagccaatattgagccagtggacgtcgaatcaatccgggagcgggttgaaattcggacggccatctactccgggaacatccaggctgcaattgaaaaaatcaacgaactcaatcctcaggtaagaaatacattcactctgcaccctcatcacacctttcctgttatgattagaccaagtttcatgcaccactcagaacaccctcctgggttttgttgataaacaaacatcttcagtcctcagtatgactacaacctcaacatgatcatagctcattgtcattacttcgtctgcgacatgtgctaactacttaatgcagattctagatgaaaacccgtcgctgcatttttcgctacttcgtttgcagcttgtggagttgatacgctcctgctcggttaaccctgatggagacatcaccccagctcttgagtttgctacttcccagctcgcacccagggcaccaacaaacccccagttccttgaagaccttgagaagacgcttgcgcttctcatataccccaaggagaacctaacaccatctctagctccacttctccattccgatttacgtagggacatttatgctaaggtcaacgcagctatcctgcaagaccaaggtgctcgtacagaagctcttttgtgcgacttcgccaggttgtacgcttgggcggagcaaaaggcccgagaggctaagaaggatatccctgacaagctggatcttgggcttggggaatccaacaatagtaattctaccctggacaacacggcgaatgccccccagcttggcgcctctaacgatactgtaatgaccaacaacggagacgttgattcgatgatctcatgaccggctggacctgtcttgagttataccatgtttatcttgcgacctgatcaactgcttctttatgtttagcctcggcgttgggaggcgtcgttgctgtcagtgattcctgtcaatcagttatccagagcatatcatggaatcgttgagagtacctatcttgtctctgttgctacgattcggtaacgactagccgacaaacatatcttcgtacccataaccattttacatcagtgtcctaacgcatcctacatatgctaattagctgcaccattcacgtaccgtcgtttaaaccttttagtaaagtagctttctatattttgctaagtggttttgtagtgcggtgcgtctgaatccttcaagtacttccagcataacattgaagctattcccaacgatgctaggattctgcatgacccttttgcgtcaattaaagcctaaaaccttaccagcatgaattaacaagaatcttcaataagtgcttctaaacagtaccctagaagcgtgtacatgcttatacagaccattataatagctgcttttcctctagatattgttcttgaatccagcccttcatccaatcccagatagtcttgattggggggaactggcaagaacgggctcatggtacaggatggatcccacatgcagtaagattatacagaacggtaacccgcttggccgggtgcctataatgaatcagttaaagttagatagcttatcgccatattagggtaattatagatctaaattaagaggcccaacccaattgcgataactttctataaggatatatatccattttttcttggctctaggagaggtataagaagatcattatgccacaagcgcttggaatcttgctttggttcgggcacttcaggaggctcgtgtgtggtagggaccatggctaaaacatgcagcaccgccaaaaggtctccaaaacatcagtttcatcactagaaagacggtgactagaggcccacccgtactagcaaaatcaccggggccaaccacagtccataccaacaaaggaataaagataggatagttgataatattcattgacaggtgaagaaaatgctgtcatgtacaactaagtcataaactgtatgaaaacatgctggtccttatacgccagtaaatgcgcatggctgtttaagtgcgtctatgacaactaactggggatatacttattctaccacgtccacgatttagagcttattgggaacggacataatggttcttacaataagaaacaggtttactatcaagaaaggccataactaatatgaactctgacaatgtggatgtaggaggctgaaatgctgatggtgcatagcacggtaaaggtcgtttggataagtggtatcgcctggcaaaggaaaagggatacagggcaagagcagcatttaagctggtacagctgaataaaaagtatggcttcttggaaaagagcaaggtgttgctcgatctttgtgctgcaccaggtgtgagtacaccagatatttgcttctttggccgaaattaaactgaccgtccaccaagtcatggtgtcaagtcgccgcagaatgcatgcccgctcaaagtctaatcgtcggtgtcgacttggccccaatcaagcctatcccccgagttatcaccttccaacaagatatcacaactgaaaagtgtcgcgccactattcggtcgcatcttaagcactggaaagcggatactgtcttgcacgatggtgctccgaacgtcggtacggcgtgggttcaggatgctttctcccaagcggaactggtgctcgaatccctaaaactcgctacagagtttcttgttgagggtggtacatttgtcacgaaggtcttcagatccaaagactacaaccctttactttgggttttcaagcagcttttcatgtctgtcgaagcgaccaagcctccgtgcggttttaatgtgttcgccgaaatcttcgttgactgccgtggttacaaggcaccgaagcgcattgaccccaagttccttgattccaaacatgtttttgccgaactggcagatcctactcccaacaatgaggccaaggttttcaaccctgagaagaagaagcggaagagagagggttatgaagagggcgattggacacaatttaaggagatccctgtaacggagttcatcaacaccacagatccgattgcgattctcggttcgtgcaacaagcttagtttccagcaacaacccggaggagaccttgctttagccactttggatcgacttccagaaaccaccgacgagatcaggaattgctgtgaggacctgaaagttctgggtaagaaagaatttaggaaccttctcaggtggcgtctcaaggttcgcgagaagtttggactggtagtaaagaagggacaagccaaggatgatgaagccgaagaggttgccgagattgctcctatggatgatgagcttgcaatccaagaagaacttctccgtcttaaggaaaaggagagtgctagaagtaagaaggaaaggcgcaaggaaaatgagaggaaacgcaaagagatcgttcgaatgcagatgcacatg

SEQ ID NO: 5779 - DNA, 5787 bp, Emericella nidulans
gcatcacttcgaggaattggcgctgggataactgtttagtatatcacaacgtcttatcgacttgccatatcattaagatcaacagtgaaaaaatgcctttgttctatactgagttgctaaattatagtaaacttcatcgttctatcgctgatagtatacagaaagtcctcatctgttcaagtatgtagaaatgggctctcatcaagaccaaccgaagcactatatctctgtatctagtacccctcctggttcactaggtgaaactgcgcaggcggaagatcgacctccacgggcccaaaatacttctcaaacacctcaaccaagtcctcctcagccaactgcatatgttcccccgacagcgtcttgaaatccaatgctcccttctcgtccaacactctcagccccagccaatcctccttgtagatgtccctctcccgcaagggcgtcacttccccggtagtcgtgttcacctcggcaaaccaggagctctcctttggatgcacaatagtatcatcctcaaacatgaacatggcaaagcgattcaaggtgctcaagttcttcttgtaagtcgcattcttcagcacccgctcgttattcacatccgccaggaagttgctattctccaagtactcgcctagctccgcgggatctcggaagtactgcgccgggacgaagcgcgattgcacaagattcgaccaccgtccgacacgcagaagggcctcggctccccggcagacaaagtcgccccagctgcacgcctggaactcaaaaatcccgttatgctggctgccaaaggtgacgaggttgcggactggagggttattgcatcgctcgacgtatgcgcgtagaaactgtccgccctgtgagaagcctaaagcattgattgcgggcgcagtggagagaattggttcggcggcaagctgggcacagacggtggatagttgctctgtgacgttccctaaaaatgtggcttgacgatcactagatgcggagtccccaatatggattatatgtacatatgttcctgggttggttgattctgcgagcgatgcaacttgtctaaggcctgagcgggtgtagtcgtcgccaagcccgtgccagatcacaagcgggagaggagtgaattcggaggaggccggggatgcaggtaaggcggcagtgagtagaggtaaggcgacgagagaggtatatgctaggggtctcatattggaagttggtgaagcaaagcgtaaaacgtagcaaaagatgtgaggaaatgagagagcctaagaatgttgggttagatatggagacacaagtgcggagaagcttccgagtccccacatgtgatctgacacagcagtgaatcacggaagtatacattaaccagattttgaaggtccagaatcattactccgagagcatcgatactgctacatgggagcttcgggttctaatcggacgaagctcaacagcacaatcttgtttaataaatccatgtacgcagaccagactggaacatatccttaacatcactgaccatgaaaattagaatcaagctaaatatatatatatacgtacaaactataaatttccgtacaatgtaccatgacaaagaactcatataacagggatatagtataaaaggaaatctagaggggtgcaatgtgcagaaggaatggataccgagccttccaataggcaaggacggagaaacaggtagaatatgtgcaagcgtcccaaacaaaagaacatgatgtggttgaagtagtcaggagccattaaaggctgcagttggaaggaatgaaatgtaaaagagaaggtaaagacaagtcgactagtaaggtgggcggccaatgccaccagtcacactacgtcggccactgtagttggaagcaactctcggttgaagagtagaagctggttctgatgatgataaaactccttctaagagtttctgtacgtcgcgtcgctgggaagtctcttctacttcctgcaagccgtacgagtgagttcctgtggatttaccgttgatcgctacctcaggaacttcggcgccgttcactaacccgacaccagtccgagatttctgcctatgcagagtcttgtcatccgcaggggctgcgatgccgaactttccgttgatcaagctctgtttgcgtgatgaagcagttgaagggcggtcaggtgtaggcagcgaacgctgagagtcgttgggaaacccgcccgggatagatatgccatgcggaattggtgggactgggggtatggaggaggacgaagcccgaaacgcggtttgtaggtacccgtagttattcccattgctcagaggtctcggtgtttccataccatcgccatcaagcggctcttgtccatccctcgtgggcagtaggattgacccaccatccccttcgaactcagaattggagaacccgctaaccatactctcactactagaagagatgatgctgccattagaggcatccagccggccccgcaatgggcttagtcggcggtccctatcgggagcctggacagagagaacacgcctcagctcgttcacgcgaacaggagagtctctgctcgagttatggtttggtgtcaccgttttgtccggcatactcatgcgacgagaagtctgaagacccgctgtggcaacatgggctgtagaaggtgagtttgtagagatggaactgccggtaccattggcgtgcgcatggccacgcacaggtaaggtccctgtcctcgaaccgttgagagagagagcttcagctttctctcgctcagcagcttccaaggcgctctgtttggaccagggggacaacatttgttccctaactactggtggaagaaggtcgcttagttgttggtttgcgggtggtagatatcctcctattaccggcttgcccagattgcgccccggggaggttggcggatcatgagcaggcacggtccggttgtaggactcctcgatccgacggacaaactcctcgacgccatctttgaaaagagtcattttatccgtctctctagtattatggctgagagcatgtcgatcatccttgatgatactttcgaagctttccaaagagaatccaatgctatccagccaaatgctgcgggatttgcgcttctcaatttcggtgtagatctcctgtccggccctatgggtgtccatggccgaaagtctcggacaatacccaaaggtatccatgcgtcaggctgccaatattagctgtagctgcttgtgtatttgaattttctaaagtggtcatgtcatcttgtagcttcaggatcattggcagtccaaacctagccgcatttatgccgaggttctcaacgaggctggctaaaagtaaatggagtatcctgatctccttctcttgtgttgaactctgcagagcaacgtcatagattgtcaaatgcagtagacggaggaagttagactgagccacgaccagggccttctctctatgatgagttcccgttgcacgtttagcagccctctcagaagtattggagaaatcacgcctcgctgatattaaagcagtcgtggtagatcgatccttcaactttaggtcgtttttattcgtctccaatttcagccagtataggagtgcatcaacgtacgcatatcggacctccttctgcggatcttgaaggagccagtgggttcctcccagacgtggatccaacagggtttcgcgattcgacaccagctgatgtcataggccgttgagaattagccactagtaggatgtttttgatagccctgagagcacagactttcgcactggttgagaaaaaagatgttgggtttgcttccgataaatgcccgtctagctgttcaggtattactgctgaaacttgatcttgaccatgcggcggtttgattcgagttaagattgccctgagcatatcaacaacttgatccccgtagtagatatgcgtagtaagatcaccgatgcacttttggaggagtacaagcaggtccttcttcttctgagataggttcgtgccgtcgtcgtagcctggcttctcgctggagtcaggctgttcatcagtccctttagccgatgctggtgatactaacattgccatatagcgcatcaatcccagcagaacatcgatcacgctaagtccgatcatattcactgaggatttcaaaaggtagtcaatgatatatatgactgtgaatgcttcgtcaagtgtgtcttccttcggtgggatctcgaacagaacttccatagcagcacttgagataatgaaacgagcctgaactggacaccatttggctacgacttcaatcaatgacgtagcccaattgttttcatcagtatccagcgacaagtatgtgttattcgattgtccttttcgcaaaatgaaatcgagcacgagtctagtagtgaggcgaatctgaccacggctgctaccgttgacaatgacctgatctagacagcgaagagcaagcagcctcatgtctaactcagctttcctgtcaacatccgcaatgttctgggcagccaatgcgcggatccccttccgcagtgtcaacggtttggacggtaacagcgctatacctccgtcgagacgcagggtccggcacattccgctccgcttcatggagtttgtgttcaagagactcaataaacgaatcttccccattgtacagattttccataatgacggggagtattattcgcagcaaatcaccgccatctgctgccaagccagcttcagagctgactgctcccttgatagctcgcagtcctgcattcttccaccgtatcgtctgcggaaggctagagatcttcgacggatgttgctgttcttcatgagcaaagccagcgtatatctgtataacatcccggtattgattcgcaaaatcctgctcagcggatagcgcagccatgtcttggtgtcggcagaaggtctcaaacgtcgcaatcgaatcctctaccatagagatatcgcgagaccgaagtacggtttcgatgatggtcaagacagaccgcgcgaatattggtagatcacggggaaccttttcaatgagcgcgctcagtatttgaagtgtgacttggacatttctaacgaagaaagtcagagtcagcgaaattcagcagtcaaagaatagcaacaagtagtcatctcctgaatcatggcctcccataactcacccgattttacggcgccagacatctcgggcggctcttttctctaggaaagcgctgaccttggggagcttgctgcggcgcgtgctcacgtagtaaagaaggtatgagagttcgctggaattcggcttgacctcttgaactcctttttgatattaagggtaacacttgagtaccagtatctggtgctttgaccggcatgtctggcgtacagtttccatcggcatggggagagggcgtccgtagcgatttctccagcgataacggtgccggttccacgataactgatttcaaatggatcaaatattgaagtccaaagatatccaggcgtaacgaatgagatcgagagggcgatttcgataaggtcgtcgttaaaccatcggggcttcaggagagcttgatgtcacttcgcagctgtgatgagcggagattggtgagattgcttggcgagaggagttcgcagtcgaggcggatactgcgggatctttaagaagagagagaaggtccatctgcagcgaaaacccaagtgcggtcaatctgcacgtagggcgacgctattgaaagacgacaacctgtcgtttgggagatgagggaggcccgatgggggacagccaaaattaacgtggttgggtcgggg

SEQ ID NO: 5780 - DNA, 5136 bp, Emericella nidulans
  unsure (1)..(5136): unsure at all n locations
gtcagcaaaataaagcatccaataactgctttccatgatcgtgataagtgacaccgttggattttccatccaaagcggtaaagatggcatcgccgagggaacatcgcagctaccgttgggtaggatagaaaccaggatggtggtcctggtagttgcccgaagattgcgaaatgtgactaggagtactacattagtgctattgtggtcatctcggatgatagtacgtcagttgctgatgaagtactccagcaagcagttgatactggaaccgccaaagttaatgggaatgtggcctaggggttatgtctcacctgcatgcttgccttgaaagaggagtcttttacgagccattagatctgcagcgaagaaatcatgttcccgctggctatagcccagatatgtgaatggtgaaatagtcgcttaccgtggatagccgtgtcatgcgctctgctgttcaagagcaaaagaataaagaagaatttgtgagcaagaagttaatgtcaaggaaagttggaagctacaaggaccacgcactgtgatgccaagaagcccatgtaaagattggcgcatcgcaaactacggcggacgtactggcctgctgagagggtcaggcaaacctgaatctgattctgcctgtacactgctagctaaattgacaatattgtagctatgacatccagctgagtactctgcaccttggcatggatccttcagatagacgccagatgacggtcagcgtcaagcaatgtctcaccagcatcatcccagcccatcatcccagcccatcaatccatcacatatcagaagccagcttctcgccggatactctacttggcactcctctcaatcgtctcgacatggtttgtgacaagacactcaaactcttcactgccgtaatagaacgtgttcccgtcgtctggagagggaccgctgctcagggtatccccatactgccagtaaaggtcggccgcgatgcccgtcgcgttcagagctgcattctgccactgtttctcaatggcgcagtggttcgacgtcacgccatattcttcgaacagacacggttttccagcggcggcgcaggcagcggcgtgcgaagtgatccagagcttgccccagtcgttatttgtgccccctgcttcttcgttagttttgtgttttgtgcacggtagcgggtcgaaataggagaagctattgagggtgaaaagagaagacagaggaacgtacagctatccgggtagagatggaacgtcccgaaatcaatggtatcgatggttagggccgcagcaaagtcagagccctcggtgtattggaagggatagcttccatcggagcctgtatcaaggccaaatccctctagagcttatcgtcagcttgtccgtctcctggaacgatgcaggtttctgggaaatagaggaatggtttgtgtaccgtcgccgatgcaaaccaaatgcttctcatccaagcccttgataaacgcgctcgtcttctcaatccagttatgcaacacactcggctcacagccggtgcagcgtggctcgttcgcgagttcccacgcgaaaaccgccgttgagttaatgtatcgtttcaccacagcctcgacgtacgcctgatatgcagcctggatgccctcattctcaaaccaatcggccttgtcaccgcccccataagcccgcatgtacgcgttcatgccaccataatcatcccagtagttcacgaaattgataatcagcttgataccgtgtttttctgcactatgaacaacatagtcgaggcgctggagtccgtccttgccggtattgatggtcgactttccgtcctgatgtagctggaagtaaacacttccatcagtgggagcggtgttcacatcgttgaagccccaaacgcggaggatgcgcaggccagatgaggccatgtggtcgaagacgagatcgacgtcgctgttgttcttcaggaacccgatccagtacgcattggagcctgggaagtaacctgcttccccatcaatgacgaactggatgcccgaagtagtagcgaaagatccggatgcggatggagtaggagtaggagaaggtgtagttgaaggagtgtacacaggtgttgacgcgtgagggagcgcagtcncagcgccaggctggccagggaaagcaacgcctgcgagaacttcatttctcagtaaagactgttgagtttcggatacttgaaaaggaacgatgactgttagtcggccgctgccgctgcgtcttattatttacatcctcctcgtcggcatcgtccagctggaccctgtgtcaggtcaccgatatgtatgaaaccgaacccagctccagcaaatcaagaatcaagactctatgaagatcagaacgatatctcggaagtccgtgttcgactgggaattaataggagttgcattgctgatctaggagtagcagctaatctatccgactctataggcgtttcagttttccgtgtcagatctggcagcgggatgccgatcgttgttcgacttgacatcttcacgggagacggatgattcagtgtgcttgtaccatgtcattgccggctgggcaaagaccaatacctggcaaggagagtgattctgacactctgcagtggcgtacaaaatgaggtcatagtaactaagctgataatgaagcccattaaaggttaagctccgcgaagatccgagcatatctcatgcgacgcgcatcgatccatggcatactgggacaattcgacgcagtatccatatccaacagtggtcagattctatgctaagcaggaactgaaggcgggaaggagagagaggttcatttgtttgggccaagtttctccaatgcttgtgtttacgtgagggcttggcatctgtatgtatgcctcaggccataaatcttctccacgagatcctgttttgatgtctgtggacaagcactgaagaacggtctatttctagttatcaggcactatctgcatctgacaaaagacagttacgctaatattgacgcctcccggagataatcagtgtttgcacgtagtctatgtcactgaaatttccaagcgcaaggcattactatatacgttattctacgcattgatggccacggattatggagataccttgtcgtttgatgttttgtggtttccctatcttctattggccaaaagaaaggttcatcagcgtagatataaagaacaataagatttagaatgggcttcagactacaatgacactccacgttgcatcgaactgacgatctctccttgtcgatactactctgagtattccgtacagcaaactccgcaaaaacagaaggtcagccggggatcggaactctactgactccggtcagggccaggcagagatttctgcctcagccttcaactgagaaccgcccagaaagagcaacggccggctcggaagcggaaaaggaaggaatgacgtcgtcatatgattcggctcggaaatagaatcttccacgcttttcccacagtttccaaggccaatgacgagccccgatcgtggaacgcagcctgttacagccaacccaatctagccaaggaatccaaggaatccaaggaatccacaaaaatgatatgtggactgttcggtcggttggcatgcaagcgacttactgctcggcgaccgctacgtcgtcgagcctgagcccggtcgggtggcgattctcattttcagtgccgagttcggcagatcgtcggtatttccggtcgcagcaggtcttgcagaacagccagaatacccggcaatgggtacgagcccaaagaaaagagcggtaatttgtgcgttgcagagaaagagagaaaaacgctcagttaagtgatgccatgatgatatgaccccatactgtactccgttctccgtactccgtccttgaaatcctggggaggctcaccggtcaacttttcaggcaagaatcgcctctccgtgttttctctccgcgtcagtctccatcttctccagtctctccagtttaaacgacaggctcgtgcccgacctggcatcacgtcaccgcaactaatatctggtatggttgtgtccagcgttgatggagtatggagtgggaaacgagtcttcttgatccttcaagccagagccaaggccggcccgtgatggcttccatggcatgccgatttttctgagttcggccgcaggatcccacggcaccgggtgcctccaagtgccttggcccggaaaaggcgtcacaacttccgtgcctgatgcggtccggctgcgccaccaacgtcggcttcggcttctgccaagtatcgctatcgggctatctatgatgtatctctatcggaagggttttcgctcgagaataacgtagatttacagcggtacagtgtcctgtacgacaggacatctgttctcaagatgagccctgcccgagctgactcggctctcgcggagttgtccgtatggggacgactcaggagtaggtggaccctcgttaccatgaggcctgcattgtctggatgacagtcctccatgccctttcagaattctccacacgacccggacgggtgcaatcagaatcagcaccgcttacgttggttcatttcagctactacacttataaagagggaaaggcctgcgcacattcccagaacccggattccccatagttttcttttcttttaaattaaacttggaaccggacccgtgaagcaataccatggggggttgagtcttttttctacccatggggggtatattaacccgggttctggttcccggccggaataattacctcatatcaggggtgaatggggcaccccaaacccgaacccggggggtgaaactcctataccccccaataattttggggggccctttatagggcttggttctcttccttggtgggtttgtttttgggaatacccctgggcttatttttggcttccgggattgtcgaatttccctcctaaaggggacaccaccccaggtgatttattttggccccttcttcccgtattgtgatcattatgttgaacaggataatttacttaggggggacaccgagaaggggccccaagaaccaaacccaagggccctcgcgagaaggggcacccccctctcggctagggtattaagggggaatccccacctactccttgttt

SEQ ID NO: 5781 - DNA, 5833 bp, Emericella nidulans
tgataaaccctgcgtcggttagtgctggctaaataagagtgtactttgacaagagtaggactcaccttttgttaagaacgtcaacgtatccgccgcgttacaagtgatgcccccttccacgggcttcacccatttccatttaccttcgggcgtcctgatctgtagaccagccacttgttgcgagaagagcagtgtaaggcttccaaaatcagtgtgtccgcccttcgtgtacacctgggcgcggtcccattcttcctggcttctgacattgtaaatcatataccgtagatggtcgtccgagcgcttgtcatatgcatgcgcgttggcgagaaagttctctggtaggtccagaatgatggacatgaggacaaagagtttacgcgctaccttgtcgaatagttcgcgatggaagctggcaatctcttcatagttctcgcgcacgatgcgatgacgcggcagatgatcccactcggggattgccttagggatgttcagctggacagaaggatatcagccctattccggttgtctcagctttctggagaaaaataccatctcgatattatccttaacccccgtatcaccaatccaccgctcattctcgcggtatccaaagtactcccccagggcaaagttgcatggaaagactcttttttcctccaacggctgctcgaagaaggcattgccgaagctgaattgtcgcaggacgcgctcgtcgtcgatgccgtggcccacaacaacccagaatccgaccctggtcaaagcatcatacagctgctttgcaagagcttctttgccaccaggctcattgaatcgcgataggtcaatcttagccagcggtgcccagtccaggtcctcggtggtaggcgggggacgagtccaaggcttaactgggacgggatcgatagtcattatggtagacgccaatgcggggttaactagccaactatcacgatctaatctagtattaccgtagtggattgttgaatggcttgcaatcgcagcaaagctatgccgagcatggcgtctttataccacccagcttgcacaaccccattatccaactccgcacttgacgcaaataataacgcgagtcatgttagatggagatgctctgtttatctgtgttagaagcggggttgcgtcgagtatcatttttgtctgggattgcgtgattttgattccaacaggattaacaagccttgtcttgccaaataagatgcagcaactctctggcccaagaactcacatagtctcagcctttgctgttccttgattagtatttcgcttgctctctgaccacggtcaatctcctgattttctctgcagctaccgtgtagggtatctatcctgatagcataccgacctgcaaatattgagactgacatgccaagcagcatgatagagcgagcttcagacacaatagctgagaagatgagcaatttgataatcggcgatagctgtcagaaccttggcagctaacgccgacggtgatctgtaggtagcacatatgaagacaatactccaatgtcgtgatagcctccataatggtatcagcgctagttcaaagtccagatggctgtttgcagagataacccacggcttatttatctatataagctgggtatcgttagcattctaggggtttcccgagtgagagcacggagtcaagatgtcttcttcaatatccgaaacagcgcctaagaaaggccagtccaaaatcactactacctcttcaaccacttcgtcttcgctttacattcccaagatttcaggacaccacactgccaagcagtatgatgctgagtttgagaaacgtgtgatacgtaagatcgacttttggctcgtgggcttctactccttcgtctacattttccgggtgatcgactcaggtactcaccgtttttaagctatttgcccatacaagattattaataacgtctaggtaactacgcaaatgcagcgatcatcaacctcgaagaaggcaacggcatcaaggctgagctcgacttttctccctcgcagtggtcctggtcccagtctatctttagctatagttacatgctgttcgaaccgaccaacaccattctcttaaagaagatcacaccctcaaagtggatgtttattataattctgacctggggaatctgcgccacgtcttcaggcgcagcgcataatttcccagggatgatggtggtgagatttgctataggtctggcagaggctggtttttctaccgtaaaactgcagttacagagcttttctaacaaaaataggcttctacccatcggttctatatcacatggcattttggtataagccatccgagatgccatggcgcgtcgcgttcttctactctcttgggcaattgagcagtgcgttgagtggtttgctagcgtacgcgatcagctttatgaatcgccttggcgggctatctggatggcggtggttggttatccttgaagggatccctgcaatcattctggccttcgtagcactctgggctccagactaccctgagacagcaaagatgctgacacctgaagagagggaatgggtggccaatcgactgttgaacacttctccaaggggaaaagatcgcagctggagctggcagaatataaaacagctcttccgcacttcgaccttatatacattctcaatatactggattgggcatggcattggtgggtttgggatcaattatgccctgcccacagatatttatgagttgggttttacgaccactgccaaatcgcaactgatgaacattgtaggtttcagctcctcctgtcaagaagcttcactgaagataagcggcccagcctccgtacgtagcctgcttcttgttcctgaacacagtagggcactgcctgcataaaaagtggattcgaccatggacgactgcggaggcgagtaaacaaacctatctatatgcatttttccctccccaggttccactaacaaaccctacagtcgagattaccaataatagtctgctacattatcctgataaacgtctctaaaccggttgtgaagtatattgcgctgatcgtcgcaaccgcctgcgccggctccgcgtaccccgtcatctggccagagcgaatccgcgccctagaggggacagtcgccgcgggcatcggcattggattgacaaatgcgatggcccagttcagcggtatctgcggaccgcacgtgtataattcacgttttggcccaacctaccgtgtttcctatatcatctgtttgatctttctgtgtatagccatcactgggattctgtttagttgggtcttagtgcggaggaatgacaaaagaaagaataaaagagttgtctctggtactttggaggcaggagagtcccccgttcgtggagaggggggtgacagcaaaaagggtacgagtgcaggagggtgaggtttagggcttctcttgggcattccggcctggaggtgttgacacttacgatcgacgaatcattgtatgatacaacagcccaataaaactccaaggagcaccttacattgatcagattaaaacggagctctacttaacaacggcgaatccttgcctatcgcatatatgtagaacgatcataacaggcgtatcccaatcgcataaggtgaccacagtgccagaccaatcataaccatcgccctggaagtctggattgtctgatcataacctgtactctacgtcctgggccaatttgaaatgatgctgattgctaggtatgatttttccagtcctcaaaatcaacgaattaaacgcctttccatgtcctccgacccgtggtctgggtgtacgtgagatatttgttggagtcagcaccagtctctcctgggcttactttggcctcttagcactgcaatggaggatcttcctcaatgccttaacccatgttatgccgtgctatggccgccttgccagccatcctagggtcggagcaggactctgcagaaaagcccagcccatgataagtctgcagctctggataaatctactcatgaagcactgcgtggagacctgtgtttgcatggctggacaagctggcttatttcatcgagcatcagatcatagctctggtagctagtagaagtattgatgacaagaaaaggctcactgtattctccgaccctacttttcgcctcaaggctggggctctgttattggcgttgagggttgcaaagaaaggaatcggtttttcctgctaaataaaagactgacaagaaatggcttctatagtatggcccgttaattaccagccccgtgacgctcttaatgttcagtgctattatatgcggactccttccacacccataatcattcatagccgtgatgaatgcccggctaattgtatactctacaaccgacttcctcgttccttgtccctctgcccgcaagccctgtgactcctctgccttggcttcgtatctgtcgggataacttcatcctcagtctcagctgcatccaaccgacaaaagcagctcgcacgaatagggatatccgccccttctagcgcttccctaaggtccttctcaatctcgtttacctcctggagcctccacatccgcatcaaacactccttgtacccgataagtgcccatacattgcgcgggtgccgccttggcctgatcagtgtggtatcgaggccgaggtcagcacggtactccgctgctgcctgctctacatacccctgttctagcaggagagcagcatacgcgtgacgagagggctgcatccatgcccagggttcgctgtacggaagttgatcatcgagctttgtggatcgccgcagtgtctgcatgcgtctttgtaattttgctgccggtaagcaatctccccatccagcatggccgatcccacagccaacgtgtccaaggccttgctattatatgcccgtcgggaggctggaacaagggccttgctcttatggaagaggaaccgctcacgttttgccttttcaatattccccatcgccgcatacgccagccccttggcataatgcgtcgtcgccgtagtgacgcaaaacagccgctggttatgcggcaaatccatcccaataagctccctccacatgccaaaccgtatcataacatgcactcttgtcgcaagaaaattctccacccaatctgccaatggcggggacctgatactcaacactccctcccagctaggaacactcttctccatccgcgccaccgcgttaatggctgtcttctgctgccccgcaaacatcgccgcatagatcaaactatgaaaattatgtagtctgtaaaacgtatacaaattatacccccttgtctcagacatggccagataccgatcatcagcaagcgttgctttatagttactctcaattgactttttccagtcgccgaccagaacatccagatgcgtcggcatatgatggatatggcccgcatccgggacaaggtcgcggagtttgtccgcgacgtctaatcccctgtctgagtcaggcgctggagacatttcgatgtaatgaatatatagatgcagaaggccagggtgtttatctgcgccttcttgcaacaaagcccgttctaggaccggtttcactagcattgtgggcgcattttttgccggcgcgcctgtagccagattccagagagcccatggcgtaacgttcatgagcgcatcagcatagagaaccgcaatatcgatatcattgccaaaaacttcataaactcgtcccatggccgccgcataccgccgatttacagcgcttggatccttcggcggtcttccgttctcgaaacgggattgcattgcgaggatgacagctttttccacggcttcagccgtgtgctgc

SEQ ID NO: 5782 - DNA, 3728 bp, Emericella nidulans
cattcaagtgcatgtgctttggtaacgagccgtaagcacatgacctgatgaatgggcttagtagatgatgtacttcgtatctaccccgcgtgctccaggctactaccgcgaccgccacatcggtcttctgataagcttctggccttttaacactctcgcaagacaccctgctaaaacatccagcaattcccattatttcatcggcttcatatgcatcaagacccgaaaacgaagcaagcctaagatgaacatcctccactcgacattatccacctggcgtgaccgcctcgcccccgtctcacgaacgtccaccttccgcactaccggccagatcacacctgaagaattcgtccttgccggcgactatcttgtttacaagtttccatcctggtcgtggggcgacgcctcatcaccctcaaagcgagtctcgtaccttcccccgggtaagcagttcctggtgacgcgcggggtaccttgccaccgccgactgaacgagaatttcgccggtgatgcacatctcgacgatgagatagtcagggactttttatctgggggtgcgggggattcagatggaggcgatgataatgatggatggttgaggacgggtggaggtggaaagcgccatgagagtacgattcgcgatgtgaggaccgttgatgaatcaggaaaggaggaggcagaagtggaagaagaagaggatattccggatatggaggatgatgatgacgaggaagctatcatccgtgaacctgcagggacaacgagcactactcagtacgaatttcgttatcgttttgtggtgctggcacactgacaaaatgtaggcctacccgaacctacaacctatacatcacctactcaaacttctatcggacccctcgtctctacctatccggctacctgtcaccgtctgagccgctgccgcccaagctgatgatggaggatatcgttggcgactacaaagataagaccgtgacgctggaggacttcccttggttcgatgggagtctacaaatggcaagcgtgcacccgtgccgccacgcctcagtcatgaagacgctcctcgaccgtgccgacgctgccttgaagcttcgccgcgaaaagattaagcaaacagctgcgtcgtcctcgccacaggaaaaagctaagcttgcgcagccagagagtggacttgagggtcttgtcgacgacattaagggtctttcccttggtgacgcccaaaaacagtgtcagggcgataaggggcaggcgggcggagacgaatgggaagttcttcagcatgatgaggaagaggaggttgcaattcgagtagaccagtatcttgtcgtgttcttgaagttcattgccagcgtgacgccaggtattgagcacgatttcaccatgggggtatgatatctgcggtaaattgagatgcgttgctttgtgtttaaccatttcttggagttcatgttttcttgcctggtctaggcgttacggttattaggttgataaatgatcgatacgatcacaaagacagtattgcgtttataataaccacacatttctattcttactcgctaggggccgatgtcatgaatcgtgctgtttccacctccgagtcatacaatatgttggcatggccaagattctacatgtctgcagtgggaagatatcgcagtggcctgatcaacggcctcaccgcagcctcctgacaggcccacggcatcctccgaagtaattgcgagttcatcccgcttcgtgatgattgtatcttggcaatagaaccatgtctgggctcatcgttccataagctataaaatcttaggttccggccttcaccttcacgcatctcgtcaccaactcagctttccgtccacgactcaacaacacctacacacaatcgcttcaaactacaatcgatgccagaatctccctttctgctcttaccccccgagctccgcctccaaatctactcctacgtccttgacattccgaccccctacacaaccctaacgcaacatagcaaacctctgatcgtgataaacgacacaggcaacaaatacactacgcgcgcaatttaccgctcgctgcacatctctccaaattgggtcggaatcagcaagagtgaaggcccaaatgaacgaagtaaaacgctctctctcctatctgtcaaccgccagatccacgcagaggtcgaacactttctctacacttcacacacgctcttcttcctcaatggctttgacctagatcatctaggcgagttcctggatacgctctctgctacggcgagatcgtgcatccggtctatcgggttcgaggtttacttgttcgtgcataatactcccggaccagtcaaacggggtttccggcagtacgagcgtgccgcgagagttgtcagagagaagctgccgaatctgaggggcgtggtgttttactttgacccgtggtttttagcctgttgtggagatgctggttttgggccatggtgtgacgagagaagtgtgctggctacgggggttaggtatctgctcaaagtgttcggaggcattgagcccagggataaagacaacgacaagttaagggctagggtcgaaatggatttgcactttttgccgtcaagtgcgacgttcaaggttcctgggttggagcaagggcatgcaaagagcttggttaaggtgagctgatctggggtagaggtgagttcgatttgatgctcttccatagatgaacatatagctaacatcgagaaagcagtggtctataccaagaacacaatgtgttgatactgatcgttgaacgcgacctcaggtacatccaagttacactgctgcctttgcgggcaaagctaaccactaactaggctgttcgcaaccggctccatgacttgcataaccagtgccagtgatcaaggaaattggtgactttcacgagtactgtcacgggaaacgaaccgatccctacctgattgtcttcattggtggcaggcataaagcaacgaaccatgatttcgagctcggccaaggcatccacctatactacgagaataattctcaagcacaagcggggcgaaagaaacaccgaagatcaagccgccggtcattcctgtggctgggttgggggcgcacgagctgcaggatgacgtttcgagcaatgcgggaaaaagccgccaatatgtagggagccgtgtgtggaagacttgaactcctccgatccccgcggtcccatcagtatgtcaagcttatggatctctgtcccggaaacttccttggactggcttagtacacccggcacggttcatgagacatgcgagaagccaggctaggtgggggttagttttgcagcgcgagattatcatgcaggatgacaaaacaatgatatagttgcgatgctgaacaatatggtgccatacggggaattgtctaagatattttgcaaaaaccaagcttcaaggagtccgcctgcatagtaggcccatggattatcgtgtcaagtcacgctaaataagagatgtgcgaagctctggtgttaaatatcttgtgagcagaaatatacctacataacgtcatggaggagcaagtcagtgagggccctcaccctataggatgcggaaacagattcctgagaatcagagtgtgctcggagtatggattattttcgagttgacggtatataatgcgctgtataccctctgcatcgtttgctgcttcttactctgtccagactggactttggcacctgcgatttgt

SEQ ID NO: 5783 - DNA, 6032 bp, Emericella nidulans
acatgcagcattagcagtcgcataatactactcactactggtatcatgcaggcatgaccaaatggatactctagacctcttttttgtacaattgagaatctgatttcatttgatcgggcaaaagggtatatggtaagttttgcttgccacgattgccccgttggggcttaaggtttcccagtgagtcattatggagctgtctaatgtttaacgtcgaatctcgaagttaattatgaagccatctagaagcgtcttagaagcgcctaaatgcgcctagaagcacctaaaagcacctaaaatcgtgcaggagcttatcgcctcgatgatggcatgacatgacaccttgctggcgtcgattatttctcctagcagacggttacaacggacagcttctcaggtctcgtttatgaccaacctgaggcctttgaataataaacatgctctgcgtgaagactacaatttctatgccaaaggccacgcacgaccgaatcctcttcgccgtcaccgattttctccacccttcccactcctttgataccgtcaacacccctatctcatctccatatctcggtaccccaatgcattcgcgactagaagataagccgagcccatcgggcttcttggcgctggctggcgcgggttagactcggggccagcccgttctgtttggctgtgtttggctgactctgcggggaaatacggtcgatgctactctgaaggacagctgacttggatttggatctgcccatccatatctccatcccatcctgcggtcgtatttattctttttcttcctctcctctacatcatgagctttcaatgaatatctacactcgcgagcactatggccgccgaaaaaccaacacccgccccctatggcaaccgtgaccctgaagctgtcccagagacagaaacaaaagctgggactctccaggctctcgtcgaggcccgaactccctcgattctagatatcagaacactcagcgcgggctgaaaacacggcatgttcagcttatggcgctgggagggacaattggttcgtgtgctttcaccctcccaccttcctcttaccccgtcctattggagtgactcttctaaaccggggctcaggaaccggcctcttcgtcgggtccggacaagccctcaacatcggcggacctctctcgcttttcctgggctatgtctttatttcaaccctcgtctactgcatcgtcacgggtatcgccgaggtgggcgcatacctacccgttcacggaggcaccatgtcttaccacggctttcggtacgtgagccgtagtctcggctttgcgatggggtatctgtattggtacagcttgggtatcttggtcccctacgaaatcgtcgccgcctcgctagtgattgattactggccgaacggtgtgcctttggctgcttggatcactatcatgctggttgtcattgtggtcttgaattatatgcctgttggaatatacggagagaccgagttctggtttgctgggatcaagatcatcaccctcatcgggctgttactgttgagtttcatccttttctggggcggcgggccgaatcgacaacgattgggattccattactggaaggatcctggggcgatgaacacgtacctcgttacctcaaatgagaacacaggaaggttcatcgggttgttacagtgcatcgtcaagtccgccatcgcattcatctttgccccggaactcatcatcgtcacagctggagagatggagtcgccgagacggaacgtgcccaaggctgggaggagatatatttatcgactcgtgatattctatctcctcggcgccctcgcgattggcgtcatctgctcgagtcaggaccaggcactcctcacgggcgacacgaacaacgcctccgcgtccccattcgttgcagcaatccagaacgcaggcatacctgttctccgccacattgtcaacgcggcgattctgacatcagcatggtcggcaggcaactcgttcctgtacatgtccagccgtagcttgtacggtcttgctgtatcggggaacgcaccgagcatattcaagtcgtgcaacagatttggtgttccatggcttgctgtcactgtgtctgcgcttttttctctcctctcatacctcgccgtttcttccggcagctacaccgtcttcaactggcttatcaacttcaccaacacgtcaggcttcatctcctggatctgctgctgcatcgtgtactttcggtttaacgccgctatcaaggctcagggtgtggagaagccttactcgtctcgcctgcaaccctatggaatctgggtcggattatcttttgccatttttctgctactgatcaacggcttcacatgtttcttcccgcaaaattggtcagcagcgaacttcttcacagcgtacatcggcatcccggcgtttgcgctgctttatgtcggacatcgcatctggttctggagcgacccgtgggcttggaagagcaccgaggtggatttgcagaccgggctgcaggagatccttgcggctgagaagccggcgaggccgcgtgacacaatcgggagaaagctaatggcgttggttgagtgatttgtcatttgttgaccaaatcgtgggatgaatataataacgtacttagatacctcagtatagtatgcgacatctgtatgaatcaatgccgcacagcctgcgctggaccgttacggatccatatcacgagctcacctgtcagtttgatgctctccgcgccgtacggagattttgatccagaggttaatggctgggaacaccttgcctggctataatggtttctccatcagtcaccgcagcgccgtagcgagtaggtgaatacgctgcaagatcttcttgtgtaatgagcaacgggtggatcttctatgcctccagctgttcgatctactcggaccagcctgaaatgcccgggttcctcccagacgaattgagcccggtagtatccctgacattcaggctcctgaagcctagttgatgggcactcaagagcgggcgggggatcggaatagagatgaactgagttactagccttctcttcgagacgctgtgccagagacacggtgaagaaacagctggaacaattcaggtacataattcccagttgagagtaggattactgactattacttggattgcattgagctcatgtctacttggatgccctctcgaataatgagcactactgctagatgatctaactgccaggcctgcctcgattctgattgatggaagaaatgttccttacgcattgacagatagagagggcaagacattgagctgagaatatctcctcttagacgaaattggtgctctaaaagcgatttgagcaatggatacagatgatcagcactaaatcacattgctatgatagtacgagtttgtactaggtagaccagttgcgccagcacgatagacgctagggcttagatctatgccagcctcgctcgcacctcctgcaccctcttacttgacgcatccaattcatcctgcgacaactctccgctctccagcgcagcgtccaaggcagcaacaatgctctccccctgggtgacattcctccccgacgcaagaagcaggtccactccagccttcttcgccaacagcgccctgttgttgtcgtcgccaaatgcccccaacgaccctgcctcaattgcatcagtaataatcaccccatcataccccagtcgcccgcgcaattcctcctgaatccagcgcgagctcatcccagccggccgctcggcgtcgagcgccgggtagatcgcccacgacggcatgatcatggctaccccggcctgtatcacatcatgatacggtacctcatcaactgtacggatttcgtcaagcgatatatcgatcgtcactggtcgttcatccgtgttctcctctgtcgcggctgcccccaagccggggaaatgcttcgctgtcgcaaggacattcgctccctgctgattctcgacgaactgcgccgcacagcccgacaccactgtcgcattattgctgtacgatcttccatagcgatccgtgaaatcaccctcctctcgataaacagccaggacgggcgccaggtttgcgttcatgttgtagctcgtcagcgtttccgctgcgcctgcgcccatctcaccagctgccgcaaaagggtccgatgagtcgccaacttctcgcgctgtttgctctggcgcgcccgggagacgacggatttgccctccttcctggtcggtcatgatcaggaggggtgtcccgttgtacgctgggctctcgcggtaagtcgagaggaaccgctcgatggtctcagggaggtcctcagtaacattctcgccgaagatgatgaccccgccgacttcacctgctctgatgagatcaaagaggtgctctgggggcgtttcgccagggtaggagaatatcacatgctgcccaatctgggctttagacccggccgcagcgagtccgagcaggggggcgagacaggctgttgtccacttcatgtctgttctatttgggtagaatactatcctctgaggacgttcagggtgttgagggcacagtgcttgtcttatatgtctcatctgatctcttctggagacgatcgtcgtcggatcgacaaacaatatgacgggcgcagtgctgcgttatctcgctacacgagacagcgcgttaatcttgtagcgacgatgttaccttgaaatcggacgctcgggtcgtgttgctgatcatccatggtggacttttcgtattttccgcttggactggttactgtagtgagctgtaaccagccttttggggttacccaaaggttagtttcgccttcttcaattaatctggcttctagaatacgtaaacagaaaaataaagcaagacaccgtcattgaacgtgttaacggtataattgttcggcgatatcggtagggccaagtggggacaggcactacgcctccaattcagttagccaacctggccttgagattcatttgggagctatacttgatcaagcaatatttgacggagtgccatgcaaagggggagtgggaggatcgcggcgatacccggccatgaatgtatgttatatgggctttctaatcgaaggaagcgctaaatgtcaccttacaaactatcaaatgtacggctagaaagacgtagcccatgaccagttaccctttgcatggctgtcctgatgagtacgacgcgttggttctctgagtatacttgagcgtgtctcctaatcatcgctgcgtctgatgggtggcgataacttgctctgtggagggacctcaaaccgtatatagactctcgaacccggacgcttctgcgtacagatgacggttccgtgtctctggcgccccgagactccgtttaacatggacgggcacgtcagttagtgctgtcttgccgctgcaggtgccccattcgtagctcatcaagagctcccattgttcaactcaagcaacggttaccatttgggggtgtgctttttagcctgcaccgcgacgttctcacggcagcgccccgagtccatattattccaggatctggatctctggatcgccagaggagaaactgaagcgcatggtggagcttcccgtagctcttccaatgagccgcccctagggtgattgacgaggcagctgaggaactctaagataacggatgtgtagtgcatacacactgcgtagcactctattcactgctctcgtcaatgatgtagttgcacgtaggccgttagttaccttggagtgtccttcgcgtaccaacgtccacaagcggccatcacttgccattagaacaccggcgtgctggaacttgatgattcggcatagcccatcccggttgaaggacttaagatacctatcccatctggattttcaacagctcagagaccagaatggccagaaatatatagtcgagcgccaaagacctatcctggcaagtctactgagccgagccataatgtttgcgatctttgagcatatagaaaagaaaggagaatttccgatggtaatcttcaagtactct

SEQ ID NO: 5784 - DNA, 9559 bp, Emericella nidulans
agaggaagaaaaattataggtatatagaatgatagatagacaaaaagggaagagaagaaaaagataggtgtgacaattagtaggatgggggagagaaaaataaagaccataaataacaactcttgacgcccctaaaaaaatcctatgttccagaaaaagtccagctccagggcccccctattgggaccaattcgcggaaaaactgtccgtccgggcagtctatcccgtaggaaagtacctaaaaaagctttcggtgttgcatttccacgaaaccgccgctattaattttgagggaaatggcttcaggctggttaactcaatacggcaacccagtccaaaaggtctcacaaaaaatcccttttgttcgggaattcaaacggccgcagaataaaggtactgcagccaactccttgccaaccaacacaaaatagaactggccgatcctacaccagtggccaagaaaaagcctgaatgcagcaactgcctgcgacactctgttacctgtgactataaaaatgctacaggagacaaaagaggtgccgaactatgccgtcagccatcagatgcatgtgattctgcacccgagcaacaggcggacgattcgtatacctttatttcctccaaccagacgcacttcaagcctccaaagcgacggcatgctaggcgcaatgtcacaccaatgcaggtggagctgcagataccggcaccagagccgtgtgctgctgtggcaaacaaaccgttcaacttctcagccactgacatggtgttattccatcatctcatctcctcgaaagatctaggcggctcaaatcgaatggcaattagccaattcacccgactcggcttctcgttccattacctcttgcacttactgctcgcaatttccagcttccatctcgcgcgccacgggggcgatgatcatctgagccagatagcagggcacagtggcgactatctcgccgaaggtgagcggcactattctctagctgttggtgtagttgctgcgcagattccgtctttgggaaaagaaaatggtcttgcactttatgcggccgcgcttctcatctttctgtgttcggttgcaaggggaccgcagccgctggagtacttggcctttcgggacgatggccaggcaggatctctggctctcttcatgggcgtaaggacagtcctggagacttgtaccgcgagctttgccattgacgcctctctgatgcatgctgcggaccacaaagagccgtcctcagacggggagggcaaactcaacagttgggcgagaaaccccacagtcctcaatgaatacagcagtgaactgtcacagctcagccagatacttctcactgtcccctcgaactgtgatgccgcaagctatcaccaggcatttgagcacctccagtgcatttatcagtctttatacagccccgattctaagttaaacgagctagacctctggccgacgatctttggctggctttatactttaccaagcccgttcctcacagcattgcaatgcagagaatcagtttcactagttttgttttccttctttctcgtgctcctcaaggaactcgactcagcatggttccttcgcgactggccggaacatatactgattgggatattgcacaacctggagtcttcccaccagcctttcattcgctggccaatggaggtcttgaagtgcccctcgtattgaacacctggcccgcatcacggtgatggataaatatgcagccccacaaagttggatttacctatggagttggtttgcgaaatagcttctgtcaagacccggtctgacagtaaccacagctgcttctccctgaagagcatcgcttttttaagaccccgaactcatgttgcccccttttcaacaacgggcttatgctgctattatgacgttataattggaaaacaacacaaatccagatgggccgtgctatgtcctaggcggcggcgaagcgacattctcggaaccagaaaaagtgaatgccctgggattccagtgtattccggctgtccgatttctcgccgtgcaagttaggatgaactggggctctatgagattgctggtcttctgaatgccggtcttctaaatgccaggggctgatgctgaactgctacattagctgggaccatgtcagtctgcctgctttgcttacgcatacctgcctgtcccaatattagctttatcgcgggagccatgggtgacgcggcgggggaagcagaggtataatggcattgttacccatgttgcttcaatcaagcttcgtcggtttgctggtaggttctacaactcacaactcattcaaacgcatactgacccactctagagcattccaatttgcagcctatcttggctcgctacccattcgaaacatacagtcttgaaaattcttgcgagcgggcatacgaagatcatacgatccttgtcacgtgtaacccagcgtaaagtcctgtgcaggacgatccggatatattatacggctggtgacaagtttgggcgacgaactacgccttaaactatagatccgaaacacgattcaggaaactggattatgatggactcggttgattggcggattgccagaccgtagcgtctttcgtcatagaacgaccccaccacgtgacaggaacgaaaccggggcttgatgtcacttaatcaaatctcgaccctcgatggccacgatcttccgttataaacccaacctagcactaactaccctcatggttggatttctaagcgatagtattgcatgatgtcaatgtttcaagcaggcgaaccagcctcttgcattacttatcatcagtacggccagcgttgcaccgggaatgccccgtgccgcaactgtcgacagcgcatcaacgagcatgggccgcaagttgacggtgaatcaggcgaagacgactaccacaagaagctgctgaccgatatctttcgaaccattcagtcgactgacgaagcagggtcccagccactactcgatttgatccgcaacggggccacattccccgaggtacggtgctggctggaccagaccttaaggtggggcccgatgccgaaccaagcctcgaccacggatgtcagagactcgaagctgcgcgcttgatatgatgtggagagcggcgcgcccccatttcggtcaaaggttatggatatccattacctgtgtgattccgcgcccgtaaaagtgcccgcgaagccgtggacgacagtaacagatgatgacggattggtgtcgcatttggtttcgctgtattttacttgggactatccattttacgcctttgtcgatcccgccattctaattaggcacatgcgcgaggggaacatgcagagtgatttctgtagcccatttctcgtcaatgcgcttcttgcaaatgcttgtgtatgtcttgggcatgcaagcaatggattggaaccaggctaatgaaatccagcattattcgcactactccgaggcttatgcggtaccaggcgacgtcaagacgaaagggacggattttctagcggaggctgagaggcatctgcagaataatcgctttgaaaaaggatcggtcgtccgactggcatctatacaagccacactgctgctatatgaaaggtaggctcggcccagcagttgtgggtttgttcctgtctgtgactgatggtttcgacaggtattcaatggtaggggacgatgatcatgggtatattatgctcaaccaggcggtcgagatggcagaggcgctggggataatcaacagcccgcagctcgatctgaacaactcgcaaatgtcggaagagatgatcagatcggtccagcaaacggcatggggtttgtttcagatcgatacgattgtgcacaccaatttcctgcgaaaaagtgctgtaaaggacgtcagcattccacggcttgaccgtgagacctcaaaaccttcggacaaatgggtggcgtatccattgaacaagcctgaccgaccatcgtggctgagtcaggcatttgatgaagcatgcaagctgtcttacatcgcaagggacatgtcttccacgctcatccccaaagccgatgaccctgcggggaacacggctgaacagaaatgggagctctacaataagctacggcactgggaggaaaacctgccggccaccttcagtctggccgagaggccggcgccgcatatcatcctgctacggtttgtacagcgataattctccgtgaggaaaagaactgaccggttgtctaggatgcggtatcatgccctattgataaatctatattgcgactggttcgaaggcaagccaccatttaacgccatcacgggcgaggtaaaccaagaaccttcgacgcaggtcgccgacgcccaggccctggatattgcgctcgcctcagcccgtgagattgccactctgacccgactacataaagccgagtatggaatggaacgcgcccaccaattcgccatgtacgccatcctgctcgccctcttcacctttctcgaacaaaactcatttaacgtcctcgaccacgacttccttttactgaccagtacattttcaatcattgcctcccgatcccaggtcggcatgcatctattccacatctttcgacattcagtgaaattccggctgcagtgcggccaatgggagagctcggtggatatgccgcccgagctgaatgagctgttcttcaagaatacatcgcccgagattccagaccggtggaaccattacgcagaagggctgcagaaactggctgataacggggagtacatcggcagtctggacgggcgatggcagtcacatgccgcatccggcatcaatgatatgctgcgaaagtacgagaccttgagcgttgggagggtggacgagctgacttggaaggaccagtcggctggctttgggttctcgccgtcaccggcatgagaatcttctgtacataggcagtaatgaccaacaccttcctgtctacttcgtatactctcccagattaggtataccccggtattcgcaccccgtattccgtttcccccagtaaatactcttaatacgccaagtatttgtcagccaatcggctgccgctgatcgacatccttcgtggcagcgctaagccactcttggcggccctgtgttcttctccaattcccctcctcaagaatcctgtgatcgtgttcccccgtcagctagccagtctctcccaccactctggtaacctaacacgcctgccgcagattaatcaaatcaatcaaatgtgaccattcatcctttagacttatagcatggaaaagcccaagagcatccgcatcggctcaacaaaagtacgcactggctgcattacctgcaagtacgcttctccctgcctgctttagcctattctcacccccgtctcctaatcctccctcagatctcggcggatcaaatgcgacgaaggcaaaccaacctgccgcaactgtatccgctccaagcgctcctgcacctacgccaacaatcatgatggcaaacccaatctgcgcatcgtggtgtacacgccgcgagcgacattcgcggccaccagcgccgaaaaacacagcctcgatttcttcttagcccagatgcgcactcgctttccgatccatttttctcagcgcgttctgcaggcggcgcatcgcgaggatgtccttgcgcacgcgatcattgctctcggagcgatgcagcagtgtttcgagtacgatgatgctagtgcgatcggggcttggagtcctttggcgacattttcgatgcagcattacggcagggcattacggttattgcaggagcgtgtgaatgaggctttcattctacaccctcgtacaaaaggacgggggagagcggctggcgctgagactggagccggggctggtgcggagccggatttgattctcatctcatgcattttttttgcctgcttcgagtgtctacggggctcgacgcaggcggctattgtccatatgcgctctgggctgaacctgctacgggagtacgagcgggaccccagaacagggtcaataatccccaaacgcacgatgcgttcgctcttcacacgccttgataaccagcttattgagatgcgcggaagtagtctgagcatggcctcgtcggatgataacctcgaggtcgtagcgcgcgatcctttgccagaagatgatgtgcatgattcactaaatgccttatggaaccatattttacacggaatgctcgactcggcacgcgccttagcgaagggggaggcgcctagcccttccatctcgacgccccaggcggatgtgcgggaaaacatgaagcagctccatcatacctttactcgtctctgcatctcctcaacatcaccatcatcaccgccgccaccagagggggtcgactacggccaagaccccgacatcctccgcatctggttcctgctgtcacctatgcttttgacaagcaacacctgggacccggcggatgcatggggcccacacaacgacaacttcgcgcgcatcgtcgccatcgccgaagcctatctcgcccgatgtgctgcagcaaacccatcccgaagacggactttcgcattttcgctgggtattgttccgcctctcacacttaccgcgacacgatcgcgtgatccgcgcgtacagcagaaagcactgtacttgctaagcatatgtaatcgccgcgaagggatctgggactccaaggtcagcgtacagtttgcgctgaagacgattgaaatggatcaggaagtgcgggaccaaccgactgaggagcaggcggcgacaagactgaagaatcgggctgccgcgtttgatgatatccttgttgacgatgacgatgagcggttagttaagcatgagccggaggaggatgatggatagtgttagacgtgacaaggtggttatagacagggggcatattgaaggagtgcgatttttttatgcgcaaacacatacccgggttttgggagtttctgagataaacggcatgatatggtcctaatgacaccacatttgtttataaacaaatttgcagagaatgtactcagtacctgagcatttatggtggatttgtcttatattggagatcgaaggttgaacctcttttgtataccagccatcctcaaaacagtgttcgacggtcacagatgaaatgaaacctcaaccagcacatcaatctttgtatgtatgaggctggtgggattgaagaacctggacatgcttatgatccgtgcgttggcatgcttttaatactgagccctaacttcgaggcatgggtggttctcaagatgtgcctcacatgatatctcaacattagccaacaatagcccactcaactatggcggtttggtgatgatcatagctaacagatgtttcagagcatgctaggctcagttggagcggggccatttcaggttagaccggctcagcttgactgcctctgcttcccaatctcacttctgagtccctttcgctctcacactacgcagactccagctcaagtctatcatgcttcgctagacagaacgtcttatatcctgaaaagctgctattctaaccagaagacttcggttagaagacttcatgatcggatggatctgccctcgccctcgaatacgcgcagagaatcaaacctcgatgagccgtacgatgagactacatatgcgaccggtcgtatccatcaccaagatatcgtattgcctgcctgcccgccggtcaaataggcacgaacgcggctgccgcttctacagaacgaatgcgcgtcgcttttccattgttgaaacacgcgcttctgggcattgctcgtgaggaccctagcgataaggcggttatttgtctcggtgatgttgtcgtgggccagtcagatgcacaatacggggaatcgtacaaaatgatgtggaaagacgctccctggcggattccagagatgggtgctgaaaggatcgccacccgacctacttgcagcagtttcgaattcaaggcaaatctggtcgcaaagacagataagattcgaaagggcatattgaatctgctaccatcacccgacgacgtcctctttcaaccttcatatgaccatactgggggtgatggttgtgctggttgtcaagacatattactctcaccggtgatccgtgacgaaactacccgtatcttgctaccgttgcttccgagaaccaggttattaaagacagagtcagaaggaataagagcagtagtgagctagatgggattcttggcttcgagatggaagccgctgggtggtcaacctgatgccgtgctgttattcggggaatatgtgactgcgccgattcccacaagaacgcggtcattcagccgtttgctgctgtaccgccgcctctgctaggaaaatcctcttgtaccttccccgcgccttgtgcgtgaggctggatgatcgacaaactccagcctgctttttaaacagccttaacaaaacccaacttgtcgcccctgagcttggccatataccgcgagctatctaagcgataatgccacctccaggtccatagacgcgggcagtggagaaccgacgcgatgatacggcttatagtacgctctgtcaggccgatagttatacagccaacgagacgaggtatgttcatggtccaagcccgtagctctctgtatagaacgctttccgcccactaggtgtgctgcgggcagcaccttaaaatcacatgcatggctggcttgtgggtattgaataatcatggctttttattcctttatacttggccataccccgtctactgttgtccccttacaaggctacccagcaagtacccagtcatgaacccaatatccattttgtgactctttatatacatcatagcatctatcgctgccacttttctattcatctctatgaagcaagctctattctccaaggccacccttcatcctcactgtccgtccgcgttctttttctgctcctcctcctggacgagctcttcaatgtgagcgttcaaccagtaccccttgagtccgtctctccccagccccttcgctcccttgataaaccctttacatttctcgcccgccccgcaggtacactggaacggctggtccatctcccattcagagctcgggtagaagaacgtcaactgatcgcccttcttcagaggacggttgtccacgacgcggacttccatctttcccatgtcgaaattgagcgtcgggtcgcaggagtggttgcagtagacgaggtcggaattgagctcgatgtgcgcatcgcgcgacacttggacggatgtgtacgctttggtagccggagtggcagtggtgattttggcgaacagcgcgcccgctggcagcgagacctcgctgattgccgacgagccaaacgcctgcgcgctgcgtggacgtggaggaggccgggtgtgtgggctgggggtgggatttggcgtccgctttcccgggaacggtggtgggggtggctggtgttgggtcttgcacggcaataggcattttgggtgggttatatggtggctatgtggtagatggcacgaattgggcttgattggcgcttggaatgagcctgggtgaagaagagaagagtattgagacgacg

SEQ ID NO: 5785 - DNA, 11351 bp, Emericella nidulans
aaccgcctcctcaatctatctgtggttccgccaaacccgcgttaaagtgcctcttccgtggctgtccacgtcctgatgtcttgcctgcaattggagggaacaagaaaggaagcggcaatggccaagactgcgctgccacagcgaaagagtccctcgtgattatgaaacgtattgatggcctggaatatctccttttcatggatccaccaatgggtaagaattgcctgtcgttcttcctatatcggacaatagatataagaggccgcgagaacccttcgatcgacacgttgcgcaatcagctcgtcacaccattactatcagtttcatcgtcagtcatgttgtccaagctcgctctagcatctaccctgatccctgctgctcttgcctgtctgggttatgaagggggtgttccgacacctaccgcctcatactccaacagtgccccgatcgagatcgctgcaggccagacctttgatgccggctgggcccggtacgaccgcggatctggcgcttgcaccgatggcgagggcggtaacgacgatgccgtcttcatcctccggtctggcgctaccctgaagaacgtcatcatcggaaagaatcagaaggagggtgtccactgtgagggtccctgcaccctggagttcgtctggttcgaggacgtctgtgaggacgctatcactgtcgtacgtctctgactctgtcccaaacactggttttcgtgtactgaccgttggcaagcgaggtgactcggcgggagaccatacatggatcatcggtggtggtacgttcctattcgcgaaagtgactactcgtttttctctgaccatggcaatgaaaaggcgcatatcacgcgtccgataagatagtgcagcacaacgggtgcggaacagtcaacgtgagtctttctattcttatatctttattctttatcttctctctcttcttcatagagggatgccgcacttactgaccattatcttaagatcatcaacttctacgccgaggactacggcaaggtctaccgctcctgcggtaactgcagctcccagtgcaagcgcaacgtctacattgagggcgtgaccgcgtacgacggcggcgatatctgcggcatcaactcgaactatggcgatacctgtactctgaacaacgtctgcactgacgccgaccacccctgtgtgctctacgagggatgcgccggcggttgcgagcccgagaaggtcggctactgctccggttaagtaacctagtgagcaccaaaaccacgaggtggaaacgtggaaacggaaccgtcaaggctgagacaatggatgcggggagactgagacttggttgtcaccatgtgattgtaaataacagtactcgctaacgctcctgctgctgcggccaaaaactggtggagaatccggcgaaataacaattcattccttattccaatgaatagctgaaccttgggagctagcttcagtggttggtgcgtgatagcgtgatagaactgggctatatagcctggcagccacccatgcttaagacacctgcaacgccactgcgtcgcgctaatgtaagtcgtgctccattaggaggggattcgcggcgggcagtgatcggcagcagggaccgcgaatctgagagcgaagtcaagatggggaagcagatggggttgctctgtaatccaagcgatatccaaacctggcggctaggcgaagcgaaagttattctggggtatggccagtatacaatgcaatgaccatatactttgaaatccctcaacaaccccagcttcagcagtgctttaaagttgatgtactcagtcgtaggtattgaccccacgggcacgggaactaaatgatagaatgatctgcccgaaccagacttccaaatcacgacgatatctctccaaagcttccagagatactaggcgttcaatttgggtcaagcggtgaagcagggtccttgcaccggcagaactgcctatttattctgaagggtgcggaagacatgttgcttgtttgattatggtcaatatgatgatggctgatgacgcctcaagcataagatgtggtctttctagcgatcgacagcgaccaaagcaaggtgcactttacctatcgcggggtgcagtgacaaaggaggcctgcttatctcttggctttgcgagatcaagtcacccatgacgtccgagtccaacaataacgagggaaatcccggtgatctctcctgctctatacgctgcatccactttgtcatgggatgagcgatgtgactgttctggttccggttgtggtcgtagttttggttgtgggtgatggcgagtcatctgccactaagacgccattccgcgactttctcctcaccgtttattgtctctcacctcccgactcttcaaccttctctctctttcaacgtacccatccgcctttgtgctctccttttcgttcttgttgcttttacggtattataatatattttgctttcttgtcttccttgttcccgccttactacaagagtacataagggaccaggggtcgtcgtgatcgggtaccgtggtagctggagctagactcaatattgggcctgaaccaacctaacccacatctttcctcccagccttcccagtctgcaaggggatcatgttggtcggtgagtaatcatagcaggcatttaattccgatgcagctgacaagctccagaccaccagaaacattaaggggaaacgtcttcatcatgccccgatcgattccgtcctatttcacttccgctccaccggcggaagagcaccacgacccggagaatgtcagcccaggcccaagacttaacccacgaaccgctccgccgtccccgtccgtcatgcggagaacctacagccatctatcagaatcacatactgcctaccagtctttggagccgcccttagaggctggtgagaccaccagccttttgggcaaggcgaaggaagggggctctggccggatggagccgcaacggtcctatactactttttctgcatcctctgggcctgaatcgggattcaggtatacgctcctggggagtagtctgcgccggtcgcgtcaccatagccgggcgaactcggtacatcagcggttcagtcggcgggccagcatggatgaggttccggttgagagcacggctgcttcgattaaagatgctatgacctcgtcgttcatggacgaccggttgtggtatgaccagttcacctcgacggactgggtgcatgatagtgtggctgacggggtgcggctacgggagctgcgacggaggaaggatatacgcggtcgacttttggccttgtttgatggcgcgcagggctggattctggttgcgttgattggatgcatcgttgcggcgattgcatactttgtcgatatcacagaggagtacgtttttgggttgaagaatgggatttgcacgactggttggttgcgaagtcgggagacttgctgcgcggatgaggaagagtgtcctgcttggcggtcgtggtcggagatgatgaaccaccatggtggagggagtgtttcggttgatttcgggatctacgtcttgtggtcggtgattcttgccgctatctcttgtcttttgacgttactcaccaagacggtcgtcccgtcatcggtatcgctgactacgttggacgagaacctgggtgccaacggctccagacaagccaccgaagctgatggctcgcccgcgtcggtgtccggctcgtctccatatccgccgctgccgctgcgtcctgacatggtctactattcggctgctggtagcggtgtcgccgaggtaaaggttatcaatagcggctttgtcctgcacggttaccttggctttaagacgctagttatcaagacattggctctaatcttcagtgtggcctccggtctcagtctcggaaaggagggcccgtacgtccatatcgcgacttgcgttggaaacatagcctgccggctgtttagtaagtacaatctcaacgatggcaaacgacgtgaggtcctcagtgccagtgctgccagtggtgtggccgtagcatttggagcaccgatcggcggtgttctatttagcctcgaggaagtcagctactactttccgccaaagaccctcttccggacattcttctgctgtattgccgctgctctatcgctcaagttcttcaacccgtacggcactggcaaaatagttttgttcgaagtccggtatcttggcgattgggagatctttgagctggccattttcatgtttttgggtgttcttgggggcgcagcaggtgctctcttcatcaaggcttcaagcatatgggctaagtcgttccgtcgcatccccgtcatcaagcgctggccactctttgaggttggcctcgtagcattggtgactggactgatcagcttctggaacccttacacgaaactgccggtaacagagctgctgttccaattagccagtccgtgcgagcactcaacttcagacggactgtgcccccatccggaaggtattggcgaggttatccgcgcacttaccatagcattcgtgatcaaaagctttttgacaatcgtcacattcggcattaaggtccctgccggtatttatgtcccctcaatggtagtcggtggtcttatgggccgcattgttggccatgtgacccagtatctggcgctgcagtaccccaacttcttcctcttcggatcctcgtgcgccgctggtacaggcatggaatcttgtgtaacacctggagtttacgccatggttgctgcaggtgcgaccatgtgtggagtcacgcgcttatccgtcacccttgctgttatcttgttcgagttaaccggcagcctggaccacgtcttgccattttcgttggctgttctttgcgcaaagtggactgccgacgccattgagccgcatagtatctatgacttcctaactgaaatgaattcctaccccttcctcgacaacaaactccagactgtctccgacgccgtgctcggcgacatagtgcgcccaatccgccgcagccgactcattgatattactgagacaccgctcgtcccggcacgcgagctccgctccaagctccagcatctccttatggcaggcgagctagatagtggtcttccgatcctccgcgacggtgtcttaatagggcttatcccggcgccggacctggagtatgccctcgataaccttgaagatgaggatcgaacatcttgtctcatggctactgatacctcgtctgttgtatccgacacggacgatgaggatacgctgcaagtggatttcacgaagtatatagatccggtaagatccccttaccctcttttttctgtgatatatgctaatatttgtttattataggcgccccttgccctggacatccactcccccatagatcttgtttaccaatgcttcgtcaaacttggcttgcgctatctctgcgttttgcatgatgggcagtatgcgggacttgtacacaaaaaggcttttgtgaagtttatgaaagagcagcactagaaagactctagactccccggaaactgggtgggttttgagcatcagtgcatactataaccatccctgacatactaccggttctcaggtttctggataaccaaccgacctcgatttcatattattttttttgtctgtgaaactgtttagatgtttgtatattagcgttggcattctgttttgactccctatggttgtgccatgtctgattgttcccccttcctttggggtgcgttgcttgtttgtcttttacagttctctttgcatatgcatgtgcatgaccagcggttacatatacgatgacatgaggcatatattggatttctcaaccatacgccagggtatctattcaatgctgacacaactactaaaagtggcataatatgtagtatgccgtcgtcgactagaccttctcatacccaaccatccgcactctgacatccccttcctcagtccactcgcctgtaacctcctcaccaacccaccctgttacttcagcagggctaaccttcctccatttcccactgttaagttcctccgcatcaactgggaaaaaagtatcacattcgaacccactcccatcaagtttctccacatccgtcatgacaatccggatcgtccgctcgttttcggatctcgagcccaatttcaatgacgcattatagatctccgcacccccgatcacgtaaatattcccaacaccttcctcaccggcagcagcattatcaagcctactcagcgcctcctcaagactcctctccacaaacgcccctgtgctcccctctttcacagggggcgcaacaactgcagtcacagcagccgcattgactggctcctcccccgaattcctaccctcagcctgattctgaggctgctgtttggccttcgcctccgcagcctccctctccctctccaatttgctctccaaatcgattttcacgcgctccgcaacgcttccatctggatcccttgaaatcaccacattcagccgtttcccgagtggacggagtctcggcgggatggagtcgtacgtcttgcggcccatgattagagcgttcgtgcggggtttattggagatggatggagatgtggagggagggcgagctgtgatgcgcgcgaagaagaacatgtcggcttttatgcgtggccacggaagcgtcccatttgcgccaatacctagccggaacccatggccaggtgatgggcgagaaactggtgtcgttgcgacgacaagggtcagagggagagggggaggtgttgttggcattgtagggcgattgcgtctaggggttgctgagagttttgaatccaatatttggtggacaagtgagtatcgtagattcttgtcaaccctgtatttgttgtgcggaagcagtgggctgtgaaattaggttcaaaagtgttggtgctgttccgatggaagctggcggggagcagttttcttatcaaatgggccgacatgcaaggcggagggagctatgctctacgcctaacccttacctatagtagccttatgatatatgggccagcatcaaataaagaactccagttagtcaaagaaaagaaggtatgtttgctttgatagtattttattcgggtatcatcatatccccagcaatatatagcaccaaaacaccaacgcgccaatcttcatgctctagatccatgagacacataagaccaacgccaaactatcagaatcaccagacatgaccatgcataaacctaaatggtatctgcgaatgccgcagaggaaaatcgtcaagtcatttcttgggcgcctttaatattcccgcatcctcaatgatcttctgaatgacagcggcatcctgctccaatccctcgcggcgtttggtctcggattcgtcttcgcccagtgtgtcaagcttgccaaatagccaagtctccttcattgtacgggtgagtgagaggatgtcttccgcggcgcggatctgttttcgtcgaggagtggtatcagtatgcagtgatagacgaattggcctggtttaagagtaggagcgccaataaatagcgctagaataaggacgtaccagtgccgtagactcgacatctagctgatatgtctcgacggcagttgtggtgtggcttgtgctttcgacctggcaaaagcagaaccagtcagcggccataattaccaaattacgcaattccgatgccaataaagagagtgagaacagcgcaccgtagcagtagccatgatattctcgaaccgctgtagtaattgcgagatgtcggtgtttatgcggtctatttattgagatacgtaagcatcatttccatctgtccttcaagccagattgcgcgtgtcttcgcgattcataaattggacatactgtgcatgttcttagacgtcggttgtaggtccatcttgattttctggtttttttaaaggctttcttttgctggtgagctgaaggtgagatggcggggtactcggcggcggtggatttatgccggcataatgatatgattgtgagaacagatcatgtacttctaagaataatttggactgctttgcttgcaatagatgatcaggatcctatgttcatttacttcgctaaaatgccctaacaagtacaggtctgtatcgcagcccggacgcctcaacgccatgtatctgtatgccggctagaatcatcacctaacgacgaatagtatgccaaagacggtagatcttgattgccggagcaagttgttgacagtccaactatcgcacatacttcgacataaacttcttgtgaaagtcagaccgtagcaggtcgttgacaaactcctttcccctcttgtcctccgttccgcgagcttggttcttaaaaacgacgtcgtcatcccatcgtcgctttatgttaaagtctgaagggttgagtagcggattgcctcgcgcaatgtccacctcccgttgttcctcctccttggcggcgcgctcgcgttcctgaccaagtaagcatcatttgcttacgcatgatatggctcttgacatacctctttttctttctgagctaagcgttcctttttgattttctcaagctctcgcatgagctcggcggcctcgtcctcgtcatcactgggcttgttagctcgcaacagagcactggcaccataccactaacctctcgtcctcgctgctatcttcttccgacgcttccgaatctgcatctatctctctcgtttcctctaatatccgccgccgctttgcttccgggtcttcttctaattctccatctcctccattcgcaggggcgccttcaagctgacgcttgggagtgctttcggcagatgcttcaggaacgggagctccattcttcttggcaaagtgagcggcctctgcctggagcagctccgcgcgcaggtcgcgacgcgctgcttcaccctcggttccctggccagattgacttgttccgtcaggatcacccagataatacacaacacagtcgaagtgactcaccgaactttcaggtgagtatatgctgggaggaggcgttgatggtatgctggaccgcggagggcctctttccctcgtgcctaaattctgtgagcggttgatctgaaaggaggaagataggtcttacgggatcaaaggtgggtctgtgagctgcggcatgttagctagagttcctgaaatatagggaagaggtgcataccggtagtcatgatatgtagcgcgagtccagtgagtcaaagatggttgcagttcgtgagattgccatgttgataaagcctcaggctaacatatttcgtcctcaccgccttcgaaacaagctctttattggccggaacatcaatgaaccgctttcatcaaatgacgctgccggacaggaaatttcccaagcccgctcgtctgtcttgaccccctcatcggggccgagtccgcccgcaagtatgaacaaagaagcaccgctctcaattgctgagcgcgactttatcctcgatgctctccgcgagggtgtgaggctggatggccgtggggccgaccagctccgtccgctcactctgtcgtttggtgaagagtacggccatgtgaaagtgcagcttggaaagacaaggtttgttttccatcgcccgtatgttagcactgctaactttctcagccttgtcgttaggatctccgccgaagttgctaagccccacgatgatcggccgtttgacggcatcttcaatattgccatggagcttactgcgatgggctcgccccgctgggagaacggccggtatggatgccgatatgtgtatatggatggagctaatgctttcgcaatagacaaggagatttagaaacctacgttacgaacgtgttagatcgtgttattcgccattcgaacgccttagatccgagtcactctgcatccctgaaggcgtcagctgctggacgatacgcgctgatgtacacataacggactacgaccgcaatctgatcgatgcatcgtgaaaggcgtcatggctggactccaacatctctgtcgtcccgacgctgtggtcaagaacggccaagtgatcgtttccggactggatgaaagagttcccgcgcccctgaacatcgctcataagcccctttcggttacgtttcatacattcgacgacggaaagcttgctattctggatgcgacgcggaaagaagagcaggcttcgaaagcggacgttgtgattgggatgaacaatgccggagatgtctgctacctgtctaaattccagggctccccggtggatgccctggtgtttatcacaaagacctcgctcgcacttgagaaggtcaagtacatcaacggcattattgacaaagctctgcaggctgatcttgcgaaacggtctaagggtgggctcgcggagcaagccagagcagagaacgatcggccagtcgcataggcaatctaagaacgcttctctacgagtgaattgtaatgtatgatagatgaatgaatgcatgatccaaagtcaatagcagtatttttgcatcaaaaaaatgaaagtcttccccgtctgagatacggattgactcttgacagcgttatagatcaggggagtttaattttgatcacaaagagctcttttctgctggttgaggcattgtaaggaatcaaatcgcagagttatatcttgaaacagtaataagcgagtatgttacctaaaaatactaatataaattcttcttgtgagaggcgccactagatccttcttgtgaatcgcccgcgtcaagctccaggtcgacaaagatcaacggggcttgagcaccgccgcacgccaaacccaaccagctgctagcgcatcccgaactctgcttcttaattctcacctccaggcattcaccatattaggcgagcgtttcttcttttgcattttttccgtttcgctttactctgggatcgctacctcttctccatctctcggtcgctttacatattccacgtggtgtaaactcctttccagtctcccaccgggccaaacaaagcaaagcacccactcgaaatcgatgctccccctgggccgcaccaccacattgacggtgttagccctccccgatcatcatggccagcggtagggctccaggtcgtcatcccgccgctggccgggatgatgacctgctgcagctggaggagtcgactcccatctacaacacgggacggcctccgccggtaaacgacgaaagcctcttgcgacagtacaacattgacgactctgaaaacgctcagccccgtccgtccgtttcttatgacaattttgtcggtgggagggtgacaccacacgccggcgcccatgcgacaggctccgcgcctccggtgcatgccggagtgtacatgaacgatccctactccggacaggacgtatgccgt

SEQ ID NO: 5786 - DNA, 3151 bp, Emericella nidulans
ggcacgtatacgctcatgatgcaccagcacatccatatgggcgggatcctaaaaaagagtttctggtggtttgacgggttgtttccgtacatcacgaacccgctgatgggccatacctggaactcatattactaccatcatgtcaagcaccaccatgttgaaggaaatgggccaggtgacctgtcttcgacgatccggtaccagcgcgatgaactgatcgactttctgtgctatgtcggccgctttttcttcttcatctgggccgagctgccgctttacttctggcgcaagggaaagttcggtatggcggccaaagctgcgttctgggaactaggaaactacctcgttgtggcgctgctctggcattatgtcaattggagagcgacgttatgtgtcttcgtcttgccgcttctgcagctgcgtgtgggattgatggtgggtaaataaagacaacacgcctttgtcgacgaggtcgatccgaaattcgaaactttcggacgagtataactcttattaatgttcctgtacgccatctccccctccatcccccctccgcgcgctggattcctcccgtcatttgaacatactaatatagcttgccgcagagcaaccgcttctgttacaatgatggttatcacacgtctcaccaccttaacccccgccgacactggcgcgagcacccggtttccctcctgcagcagaaagaccgctattccgccgaacacgcgctcgtattccgcaacatcgactacatcatgattacgaaccgtttattgcagaaagattataagtatcttgcgaaatgcttggtcccaatcggaaatcaggtaggaatgacagttgatgagttggcaattatgctgcgaaagaaaacgcgaagatttagtgctatggatattagatctaagttctagcacgaaatcgaaatcctggcaatctgtttccgttttcatttgttttttataatctttagatatcgctagcattcccgttcaatcttgatctcctctttagattagctagatagtccttgttttgagttattctgtattaagctcatatctgcagagtaagttatggtggaagaaattgccacccaacatcaacatgaccgaagcttacataggctatacgtcattgcaagggccttatgaacaaaatacgtatcctttgctcccctttggtacaattgccttacttcttgcacatatcaacacttaccagcatggatactccgcctgaaatactccctgcttgcgagctgttgggacgtggtatcactctatttccaggtattattgatcttccgtttatcgtttacagggacgagctaattaagcatcaggatctaatttattcgactacctagaaattttagggggcgttgagaaggtccagcttctaaatttcaacctaaacaataagccgactacagttcctggatcgaataagcaatatctagttccagaggatgtctttattcttcccgcgggaacagaaattatcgctgaacatttacttttgacaactggagccgctttagcgaatgagttggcaatcaatccatcaatggcctatcgttactttggtatatcggcggacgtaacgggaaaattggctacagggtatctttcaatgatagatatctgtttggcctctggagcatcggtgatctcaattatactgtccagtttgatatgcaaagcctggaaaggtgtattaacgccgacttcatctgggcggcaagaagactcccttgctgggacgagaatgatgcttcagcgcgagacgcgtttgcaaagtttttcgcgacatggggcacacatgttaccacaggttgttgtcttggagcgcgataccagctccaagtcacaaggcctgacgcatctgacgaatcgaaaaagaacttccacgaacatattgaaacagagtatagctctgtcctcggcattaatggtgggacaagagacacagctcaatacagagaatacttaggccgacgtgagagcaaatgctctgtcatgggtgggcatccacagctaaagagaagcttgtcaagagatccgactaactccaggctattcagtcagtggattagaagtataggcgcaagtggaacgcaagacgttattcacgtgttggctgacagcatttacaatttcctcctcaggagccccaacccggaacacaaggaaattggggacaagattcagagagcctcgcggttccattcgaagtttattactgccacaggagtttttaaggtgaagggcattggcggcgcaacaggtcgtgtcagctcttgcgaggttcggggtgctcctggcatcagcttacaagtgatcccccgtcgaggaactgcagcttcctccctgtcaaaaatcaagtttgaagcacttcaattgtctggtgatgagattgagtgtgatgtcattatgagcgcaccgcccctgacgccggttgaggtggtccttgcatcatcgaaggaagagttatctcaagacaatcctttcgtgtttgacctgcagttgcagctttatccggaacatctatcaggagcaataactgtgggtctgggtaacaagggtcatgaaggaaaggtcaccctgccaagtttgactgcaataggcaattatgttgctgaataagtgatctgtggcctttttctatttgccaaacacagtttttaaacttcattataagcggccttggtagacgatgattggcagccaagctccgattgtcacatcatcacgacatgcattcaagtattttcccagtgactgcatgaggggagttcttgtcagtttccggccggtataaaccccagttatatcgaccctataattcaatccttgccccctcatacttatcttgtcatttcttttttccttcggtagttttccgttcggattagttcactggcgcggcgacctctgatatcccccttacctccatacctccctacttgcacatcaaatcttctattgaacgcttcttactacaaaaggccgatatcaagccgtataagctcacatggccaagcctcattgctcgtcgcggtccgggctcctcgcactgcctcgtgggggatcaggacagccagggtacggcactcaatcgtcaagtaacgttgtgggagacattgatg

SEQ ID NO: 5787 - DNA, 4120 bp, Emericella nidulans
aagctagtacaggacgttattgctcagttcgggcaaaactaagctttcattgcaaatgccggccggagtgggtctttttacgttcttgggggttctgttaacgactgggaggaggtcgtgcagacagatttgaacgggacattccactgcgcgaaggcggtaggaccgcactttaagcagcgtgggaaggggtcccttgttatcactgctagtatgagcgggcacattgccaactacccgcaagagcagactagctacaatgttgcgaaggcgggctgcattcatatggcgcggtcgctggcgaacgagtggagggactttgcgcgcgtcaactctatttcgcccggttatattgataccggtctgagtgactttgtcgacaaaaagacgcaggatctgtggctgagtatgattcctatggggcgccatggtgatgcgaaggagcttaagggagcgtatgtttacctggtcagcgatgcgagtacgtacaccactggtgcggatctggttattgatggcggttacacctgccgataattggatttctacctgtatttagtagatcagtacaagcctggtgcttggtgaattggacttggatatgaatataatgtatcgacgtttatattgcgaaatctggcattttcttggtcatgcctcaccagtgtaataagtctaatataaggagtattttaagatcacgagatgaacttatatatagcatctctctaactataaatgcagtccagtactttcctggagggagaagggggcgtggtttgaaggatcaattgaacacaccacataaccttctatatcataccacaccttcagcatgacggctctggataactagcaaaccatccaccggccaagcgtatggagggcttcacacactgacaaaaaacatacaacagctgggattcgcatgtggtcacccaccatactactaaccagccggcgtgtggcttaagtacggctgagcggacgggaagccctgttttccacaccctatggtcgtatgtgccagaatgatgttggcaatggcctatatggaacaaatggccaggaaaaacacatgttatttgaaatagacctcacgccaataaacatattggggagctgcagttgcagtgataactttctgagctaagtaagctgtgcgtcgaagctatcctccctagacttagtcttgttgaggagctgttagaaaacatacccacctgtaacgcgttttcatgcggcaagctagctaccctccctctgttaccacttgaattcccgccaatattccgtgctgccataccgtgttcagcacggtgcatatactctcgctccgtctgacaaaagacccaccatatccacagtctctgacatgttgtttcaagtgatgcatggaatgattggtgctatatcttgcaactaagctttttagtgtatccagtcctgctcctctgtccgggcctaatgcatatgtaatacgcgatgctagagagtcttgataagtaataaatcatttgttggctcgcagagagtctgttgctcaggatgatatgatactgaagtgcattcgagggattgttcggctcgagaaacagggctgatagggttaggcgccaatgaaggaagcgaatcgagttaagtatgtgcgagttgggttcggatccaaagagttggttataagtgcacgggtgtatatatcatcgtaggaagctccaggaggaagatcggacctgggactgcaggtgatcagtggtaactgtgttactcagctgcggcgtgagatgcgcgagtctcggccaagtttcgtattcacgacatgctcctgcggcgggctgtggattgtgatagtccagtatgttgccccagttctacccaatcatggtgccttggcaatatgtacgaggtaacctccgtatcatcataaaattggaggggccaccatgccattgtatcgacatggatgcacctcctctatacgaagcactcagggtggcagaggcagcagtgatacgtgaattatacacatttggcgtcgattgtgtaagttgttgattgaattgataatacgtgcggcctttctacgcttgtaagcaaagccttgtgaagaagaggagcctagggaatcgagttgagcggggcccaagggcgagagtaggacctacccaccacttcactttgccgagatattggcaagagtggcaacgacaggccacaggaggtgattggccggccgagaaagctttgaccttttcgagctcgtgttgttattcggctggctggggaacgtcctggctctattctgcgaacgggggtagtggcttgaattgtggcgttgcgcttgtattaccttagcttatgagactgggacagttagcctacttgatgaccataagaaatcgcatgtcttattcacatggcataccagagtataagtggcggagctatatactttgcgcaagtgtgttctccaagattcctagttcagtcagttcctagtccagcgctaatgattgagtatactgtagaggcagtaggagcaacgcatcctacggagtatatatccaatgcaggaacagagctggtagcagatctctctagaaaccagcttcctatcaggtcaacaattccgtcccgacccatttacgggttcgcaaagcacgagatagtcttcaatcctcagtagttttcgaaagatgccgctactcgccagatcacaaagctcaagccacggcctcagcttgctgagaagctctctgtctcatcctctgcacagagcgagctgcctccttggtcccttaaggaattgataccgtctcaatactctgtaatcaaattcagcggctagaacggacaagagaggccccatagttggcgtttggtgttctccacatggtatgtctcttcaaccctctcgcaggggtaggaaggatgtcgagaacggcgcaggcgactgtatccactgaaattcaggagtacgtctgtacgggtttgccaatcagcagtgagatctgaaagactagagtgaagggcgactgtactccgactagggcagaatgtgcacgtacgacctgtgagaatctggggggactcgcaagaggggttttcggccttacagtctgccgttcatctatctaaagatctctgctggagccgaacgatgcatattttcttgtttcaggaaatgcgctggctattgaggagtaaccgctcgctgaaccattggctgcgcatagcaaaatccgctagtcggatattgggcagacatgtcgtgcttgacaattgcaggatcagagccctggccttgtcaccagagtccgacactcgctcgacactggtctgctcctttctctcgacttgtagcagtgcgttgtaagatactgatgtgatctgctgcagcagctgcttcccgttgcgggcttgctgctgtaacgcctcgctggtgtttctgtgacgtgtctgcaatcgacaatggctcttgccaagttacagtaagcattgagcaaggacggggctgaggctaatagacaaaacaccatctgggtttaatgggttatgtggttttgtcagtcatatagcaacgttttgatacggtacgcactcggatgcccagttacaaaaagggcagctaaatacataaacagcttacgtcgctttccacaaacaaaccactgtgcacccccctcggctatctaaatggaaaaaagagattggggagaatccgcgtcgcagcctgtattgcattcttcaggtatcgaaatgtggtcttggtgagatcggcgtgtttgctcgcagtgcgggtctcttggagggcaaaaggcgttttcgccctccagttatgcttgcgattaaagtgaccaagttcggggcgccctgacagcgcagagtctgctagttaatctcgggacacctgaatattaaatctttggaacgtctcgctcgagctaggaacgggaatcgtttgggaagcggctgggaccatcctgtatgaaggccctgtgagatgaacgtacacaagtaaaatatgagtgtgcgtggctaaggccgatgtcttcatcgccatatactactttactaatgattatcaacctgacgggtgcgtgtccgagtacgccagtac

SEQ ID NO: 5788 - DNA, 2994 bp, Emericella nidulans
agtgagacgagaaagagcaagtataacatgcagaagaagcttaaagttccagtaacccgaatgcagccgtgggagaaaagccgagggtcgggaggaacattaactgaggtcaaatgcagagtcaaactaagtctgtcaggtggtcgtacctcactaactacctaggtagtgggatagggagttctgggaataacaacatggggtagttttgcctccatagcttccccgcactttccagatgccggacggccgggatccgaacttactttcgatataagcccgcagtacagaatagtaagttaacacgtatgaatcatcgttatattactagtatttaacctgatcggtttggcgagtgtacccaattgttgttatacattctagctgtaatcatatcattgatgcataagcttctatcggcaatgctgtactcatcaatattttgggtgcagatgcatcaaaattcacaactcaaaaaaaagctcagccgtagggtatcatatcgcaatgcctgctaaacggtcgactcctcttctcttgaacctgctagttctgtggccgccactagggtccttctgacacctggccactccaatctcggcgagagggaaattcctcggtatcaggcgtaggcggagagacacgaaggcaaccaagccaggaaacttcggggaaatgaggatgtaaaggtgggaaaatgaggaatcggggaaaagggaaatttcgagaaatggtacgccggaagaaaaagttgatggatatcgccccagatccctgaccccttaaacacacggcgagaatcctcacatgtccagacacctgcgatagattcaaaaataaaatggtcctcccgaataaacaataatagtaaccataagcccttgcacgaagcatattcacatatccacctccgcagccgcgggtcgtcggctgagggcgagaaaaagaggagcgaaagatggcaagcaagcggtctgaggaccaccagcgcttctgatagccaatatagacaagagaaggatatcgtcatggagcaagctcgcacgatttgtctaaaaagcgattgggaaatgttgtagtagaggatagattgtagggagagggggtggggggagaagggtgattgcactcaagcagccggagcatcgatcgcaaagttggtagaagaggtgtatatatttgagtgtccctgagagcgcttcgctgcctgcacagcatctgatattcatcaatcctcgactcaggccagggaaacggtgcaatcggccggcgccaaaatctgtagctcacaggatttgacacttgataccgccgcggtgtcgagggcggtcggggcgaaatgtcctggggtactcggggccagagtcacgcatctggccaagaccagtcgtccggcgagtgtcctggggtctttgctgttgcatgcgctggctgcgcagcattctgacgacatcgtaaaacgccttctcaacgttgatgcagttcttcgcggatgcctcgacaaactcgcatcctaggtctttagcaagcgcctggccttcctgggccgaaaccgcccgctcaaccgctttgtcactcttgtttccgaccagcattacgggaactggaagtggtggccctgagggcgagctcatcggggagcctagatagctggcgccagacggcgagctggaattcgcagactccttgaccatcttgatttggttgtagaacttcgttattctggagaaggaagcacgcgacgtaatgctgtagacgaggacgaacccctcgccgtcccggatccattggtcgcgtagtgcggtgtactcctcctggccggcagtatcgaggacctccaacatgcatgactgctgatcaatgacgacttgcttgcgatacgaatcttcaatggtcggatcgtatgtttcgacgaaatggtttagacacaactaatggcaaagcatctgattagccattcagaacaacgcggccgaccagagacaatggctaacctgaattgtgagagcagtcttcccgacaccaccatctcccagcaccaccaatttatagagagtcatttttccggccatcgcgacctgaagctgggcgcctctccagggcaccttctgcggttgcgtaaagaatagaaaaaaaaaagaatagaacacaggagatggagaagaaagggccagaaatgggaagaatatcgatatttggagggagaagggagaaaattagagcgttctatcaggacaccccgatgagcacggacttcgtggaagcggagaggagcgaaaagctgggcctaaaggaacgggctattttggtggtagtgcgattattagccaccggagaaatcgacctgcgtcgctttaggctgctgtctcaatgcacatgccaatgccgcaagagcagcaggaatggcttttcttttagccgacaataaccacgtacctctcagctgagatttagaaagagtctcagattgtgcttttggatcgattttgggggaatggagccacagatgaggactcagattctggaggaggggaggggaaaagaacggggcctccaactaaagttttggactcgagcagctgtcgcaaataagcggccaccaacagctgccgaacagtgcaagtcggataaacagaaattcctccgaatatgccggcgaatgtaggggaaaaaatagagggaataaagatgttcaggtattagatagctttgacggtgtactgaagaagtaatcggtatcgactccctgagctttgggtgagacagaattgtctggctggtgctgccacgtgaggggggaacaggggagcggagatcgctggtttccttatctcgttccaaggcagaaagacccaagtagtggaatgcgaaagacccgggaggtcagagtgtagatcagaggaatctaccagcaagcgggagctggaattctcactcgaaagaggccgtggacgagggaggttggatggtgtggtgatgccctgaaggcggttc

SEQ ID NO: 5789 - DNA, 4540 bp, Emericella nidulans
atggatctgtagatgacatgtccacgcacaaagacaacagaagaatgcgacgggagcctcgtcaggccagtgttgaataatgcggcgcttccgtaagataatcctcgtcagatcatctcctgcatgggatgctgccaggtagggtcatgtattggtattccctgattaccctgcccactgcctgggttgaaacggaaaggcttaccttaccgacgaaacacgccagaaccgccgtcggagaggcctgataaagttggcggatcattgctcaggaaattgttatggttatttctagactgtctagacggaaagttaatgcatacatagcccctggaggtatccgtatattctaagtgaactaaactgcaaaatgtagggcatggcagaatcactgtccaaagtccagtctacatacttttcctttcttttcttttcaactgccaggcccgcaggcaacatcgccgctaaaaataatccacgagccacgagccttggaatcgtctccatcagggttagagtcgagcttataacatgtgctggatttgagctgctggcccaaattgttagcgttgtcagcctgtagatttgttagtcaatactaataataatccaactaagttggattttggcaaaggttgacaataaaccttattaataatcagggactttgtgtcagcccttcctccttttgactgggggtttggaaatccttgtttcagtataagtaggctgcggcataaccgcaaccgcggctatgagatcgataaccatcaccgcaattgcggttatggtcatgagatttgataaccatcaccatcaccgcaaattcgaggttaccagaggggggtatagatcgggctcagccgggttgagcatgccagtaagactaatcaaaagatgaaaatggtggtatcgtggtatcaaacgctgagataagaaagtactaaggggagaaaaaaaagagaaggaggaaaggaaagaaatgaaaggaaagaaatgaaggtcgcctgcgccgaggagagaaacaaccacacaaacagaaaggttctaatctctaatcagccccttcagactagaaaattcatcttgctgccgtgttaccacggattcctgcgaaatttttgtagtgactttgatctccgtcggcggcgaggaggaaagaccgtctttggctttatcggaccgttttggaaacgtattcatactataaccgtgtgaggtttcgtttccgcctgcaacagaggcctggaagccaggcaagttcatgctccgacttcggccgtagtggtttgtagtgctcttgcttttctcggttgagaagaaacgggggataagctttgagatgaaggcacgtgttgcgggaagacaagcgcaaataatggcaacattgcactcgatcgcggaccaagttgctgctcctacgttgtcgtctagaagctattagtcgtttctcgttttaagacatggtcaagagggtgactggagtaaacccacaggttggatcgtcggagtctgatattaccaaaaggcttttcagacgaaggatgctggtgacaagcacactaaggactagtcagttactgtagaagcgaagtgggtatggacatacaaagcgccaagtgcgaagactgccataagggcgagcctctgccgccgtggtagctggaggtttctgagcaccggcatagggaaaataaggaggacgatgtcggtaaaaatatggattgcggaattggagaaccatagggccttcttatccaagcaatagccatcaatagtagggtcccagaatcttgcgactgggacgcaattgagccacgcactaacgaacgtccaagttccccataccccgacgaatccgatcaggatccaatttgctatgtgcattccccgcgtagcaaaaacgcgcttgtactgcaaaaggattgatgcttttgtggtgatcaggctggcttgatatatggggacggaggcccaaaaacactgcaatgatgaataacactgttagcgttgcagaaccagcaggtaccggaaatccatttgttatccgcggcacgtacgatcatctgcttttccaatatgtcagacggaatcagttcttgatgctctcccatgagataggcggtttctggtggcggagaagtaagtatcaattatgcactggagcttggagcgtgttcgggattcagaaaatgggaacaaaccgccgacaaagataccgaagaaagcccaactgaaaacctgtgtgcataatgttagtgggatctcttcctgacgacctggcttatgccgaggcacgtaacatacgagagatatgatgattgtccaatcatccgaccccatttgtttcaccatgaaggctcgtgtgtatatgcggattgctgcgagcgcggtggctagacaggtgaagacggcacttattgccattgcatgtcgaccgcgaggtacaccgagggccattgtgacgctcgaatgccctggaaagccgagtcaaagccagcacaggagacaacagtgagatgaattaaagctcgactttttggtgtcaggtagtagagtcagagaatttcattctgatgaatatagtctgttgaaatgaaattcggaaatcactccaagaactctggggcagggagggaggcgctaagtaaatgaatcgaaaccgtgctcacggaccagagcagtttgaccagtggcagcctcacggttcaaagagatcgcccaagccaaattaatatcagtttgagattaactgaggctagagccactgttacggcgccgctaattcaaatctgatcagaatagtcggctaccagcgcccgcgcgaatggctattattgacaataaatgatacaaagtaaatcgtgggagagtcttggccatggccggagctcctgcagccccaatcattgtagaaaatttctgggctgcggagttgcggatgccgtcaatcggcccggtttgcctctgtcatgatgtcgagcagcgagaccacttggacacaattaaccgctaagcgagtggccctcaatgctggctagaccatactcttgtagtaatcatatttgtagcagggtagcatggccgttggccttgcgattgagaccaagaccgacaacagcttcagcgagcatagcacagcacttccacacaaaggttcatagcagcaaagaactcctgtatggagcgcggaaacctcgggcctccgcggaaatgtcatgcccattgtaaaaagagaaagttcacattattgacccaatcagttgccatttgcctgaatcagctttcaagcacgcctcccaagttgaaattctctggtagacgcattccagacatatccacacgcgagtagacagagagcgcggattcgccacgctgggtgggaccttaatgccatgcgagtcctttactgggaatgaacaaccgctaagagccctcgaccacggttaacagatatgacagtcaagcgtatagctgtctagacccttggcgagtaacaggtcgtgacgcaggctctttaacggcaggattctttcacaacggctgaaactgatgcgatagtcaaggttcagtatctttgatgcaacgaaggcagcacgcagaaggatgatcaaggtctcgctagtcatcgttttagtgtgtttcgggacgtcgagtggccactgtcggccgagctaatgctgacgttcctgatcctgttcattgcgccaccgatttagccttattacaattttaactcgctaacgctgaggaatgacgatgtgcgccaagcataacacccacccggagcttcgggaagggacgattgcgattatcttcgatttatcattggcagtatagttaatcgcgggccaacttccaactcctgcacgttttgcagcggcgatctcctccagacgggaacccgattctgggttctgctctgtgggacaacaagtcacggagatggcgtcttgggacttcgtaacttgctcttagttgtcttcagcctgcgtagagatctgaaagagcgagacgaagggacgactgctgaacgggtcgatgcgtattgtgggttgtttcggggtctgggcgcgagggacgaatggctgcagtcccacggcgcgtgacggtggaaggaggaagcgaaggtcgtgctcttcctcctacgacttacatagcgatcaactgctcataagtcgctatagtcttaagagtatgaatgccgagttgaagcgggaaaagagccatcgcccagtcagagaccttgacgattcgtgatagttggtgaaactactcagaatagaaagtcagtccataaggcccaccagcaatcggggatctctcttattcaaagctttgacggaccctctatagtggaaatgtctcggtgccaacggtatgggtagagaagtagacattgaacagcggtaggcagtacccaaatgaaatagggctccataattcatgactcagacaattctcccactattgacccagttaggaaaaggaacgtggcccgtgacttccaggaacgaggacgatcattgcaaggttggag

SEQ ID NO: 5790 - DNA, 4341 bp, Emericella nidulans
attcaaggtctatcagtcagatttttgccttgacgccttgacgttttgtttcacgccttagtcttgacaacaaaagagccatgcgttctgagatccctggagctggcgcccacccaagcctcgtacgtaccaggagcaactgcccacttttggtgctggacatcccagtagaagatgtcacggcggcggagctcgaaggtcaccttggtcgactgacccttcttgatgtagacattgtggaaaccacgcagctggcgcactggctgcttcgcgacgtccgggtacgagatgtagagctgaggcacctcggccccatcaagagagccggcgttgcggatggtcacggtcaccttggcgactgtatcccacagatcttcatagccaccgaccgcgagctgacctgtagggtaggtggagagggcagaggggccctggatgtggaggtttgagtaggcgaagtcggtgtaggaaaggccgtagccgaactcgtagcgaggagtaacgttataggcgtcaaaatagcggtagtcgatatagttaccctcggtgaagttgcactgcgctgtgtagcagatatccacattgtagtcggattcggtcttcgcgatggtgtaggtgaggcggccgctggggttgacatcgccgtaaaggacatcgacaatggaattgcctgattcctgacccagcagactgccgtacagcacggccgtgacattttcgtgctcaatccaactgtccaggattctggcgccaactgtgttgattacgaccacggtgttgtcacagttgtctgcaacctcgttaatgagattgtcctgatcggtgttgcgcagctccgtgcgatcagcaccctcgccagctaatgcgttgataaaaactaggcagacatccatgttctcggagtatgcactgacggagggcgtgacagaggtgctggatgagccctgcatgaccaacgcagagccagtggaggaggagtaggtgtcgttggcaatccagcgcagcatggtgccgtcctggctcgccttgatgttgagagcgttttcgggcgtgatcaggtatggcagagaagcctgtccagatcccgagtccgtcgcgatatggccgtcgtacgtaggtccagaaccctcgacactgaactgcatgttagggccagccaccgccgcacgggcgtgcgagccaaagatggccatcttgtgaggcttgtagaggggcagggtattgttcttgtttttcagcaataccatcgacttagaaccatgagaacggatcagcttggcgtggttggcgcggacatcgacatagtcatcttgcgcggcagtagagggctgggttccgttatcgaggttgacgtagtagtagcccatcaggttgcgaatagccatgtcgttcagacgagcttcggtgatgttgttgctctcaaggtacccttcaatcgttgattcactccagaggctggacgaaccgtaatcaagtccattagcagcagaagcaagggcatcctgctggccgttcgtatcaggccagaccataccggggaaaccaagctcggtcttgagaatgtctagaaggagggaggagctttggcatgagagcgtgccgttgactttggtcatggcgcacatcacaccaccaaggccggaatggaccgcgtcgtagaaggaccagaggtatgtctcgtggagggtcttgtcatcggcgttggatgagtagggagcgccggaggacgacgaggacgagaaagcactgctaccagccattccaccacccattccagagccgccgggggtcgaagtggacgatggaatggctcccgcagagcttgtaggagacatgcccccagggacactagagctaaactcagcgcctctccccatgccgccaccaccaggagcaccaccgccacctcccatgccgccggtccggttggtctcctgctcgttaaggataaagtgctaaaccgcattagataggcagtaatttgtcggtcaggtgaaatgcttaccttagccccggcgataactcccacgtccgcataggccctagtttccaacccggttgcaataccattcagatacggatcaggtccaaagctttccaccagtcggccgccccatggagtacggccaagaggctgcgaggtcggaccggcaaccatctggattcccttgccgtagaactcagccgcaatggccctgccctgctcgtacatggcctccttgtcccaagtcatggccaaggcggaggacagactaaacgccgagacataatagtaggcttgcgcgcccatgtcaccgtcgagaatgtcgagagccgtaaatgtctcgccattggtagtggtcacactgctgccggtgatgagcttgatcttctcggtggtgttgagcttggcaacaaattgcgaggctttctcgtgtgcggatttccagtcaccgagagacactgtcaagagtcagccactggcaaagaactggtccctagtgcagagaggatacctttgccgctggacagaaggccggcttcaaaattgctggcggcggccagcgcggtgccgagcagaaaggaaagaactgataacgaaggtaccctcatcgtagtgaggagggagagtgatctatagtgcggtaaaaggaacggaagggaaactgaattccaattgatcaactgaggctattcggcactcaggacggatctttatactatggcccattatggtcatagagaagcatacgcgtctgccgcgcacaggccatattctctcggaaaacccgagagcttgtttgatccatttagtttagggtctaccgtacactggggctcttgcgtctatgatgacgtggatattcggtagcaaaacagccggttcggcaagccgagcgctggctgaacaaccaataggagctgtatacagaccaagtagtgggatatacccacgtgtgtgagcgaactacagccaatcacggaggatataacttctgcagggtttgcacaatacagtattcaataaagagtatacaggaaagtacggcgttggttcttgcagacccagcggatgatgatgttaagagtactggtctgcagtcatagacatagaactcaacatacaattactcgttatcttagtaacaacaagcagcgagtgattccgcttaaagactggcacctcttcgggctaacttcgggccagatgtcctgttcttgtgggtcggccaagagggttctgcgaagagcgttgaaaaaatctaagagggcagaaaagaactggctatcaagatatgagacattgtaagatgaaacttctgcaacgtaccctgaaacccggcccacccggtataacagtaatgttagtctcacaaggctgaaaactgcagggaacttggtgcaccacgagttcatgaatcatgatctctcaaccggcggcatgtgtaaaaatatgtgtgcgaaagatgttgaacctacagccagtcgcagaccttccatcgaccatatgttgatatccagaactttcgcctaatttccgacaatagtgaaatcaagacgctcttcgaaagctttgctcaatggatcacatgcgatctgaagtacttaaggggaacaaaacgctgctacgagctgtcctcggcccaaaattttagtatctgttctaaaagctatagtccgccttgggcggatgtttagacttatttctcaaatctaagtgacataaggccctgacgcatagacagcggacgtgaaaacttcgttgacaatggctcgtgatcgatacgcttcaccaacttagtagctagaaaacaaagtgacaacatagaccagagtaacagttttcaattatcagatgattgctgtcctcattccccatatacgacccagcaatgattgcttgggcgtcgggttgagcctttcttcctctctttcctcttcgtcaatcctgtcaaaatactttgccgggccaaaatccatgtctttgggcgctactagcttcgtcttgaaatatatctgcacaggctgtcagttagacttctatctgggaagggcaggaggaaaaagcaccttgtataaggcgtagtccgcgaaaaacagcggaacagtgatgtacgtagcgaagaaattctccgcactaggatttcctttgaacggatagatggcaaagtataattgcgcggcaaggaagaggattatcagcaccattccaagatactgtgagtagggggcgaagcgatcacggtaagggagcgttctgttgtcgattccctgggacttgagaccttggcggaatcgaatatgggagacatagatcaaaaaccagttgcaaaaggaggagatgccgacctggaccttatg

SEQ ID NO: 5791 - DNA, 8141 bp, Emericella nidulans
ccgagagtgaggtcctcgctctgaagaaagggtacgacgatgcaaacgctcgagacactcccggtactcaatgccgttatcaaggagaccctccgcttatacggtgctgctccaggatctctcccacggactgtgcctcgtggaggtgcgactttgggtggatatttcatccctgagggcatgacggtgagtacgcagagctggacggttcatcgcgacgagaatctctttccagacccggacagtttcaatatctcgaggtggctggaggagaacgacgccgggtttccggctgcacagctggcgttttcgccgtttggtgctggtgggaggatatgtttgggtatacacctggcgtatatggagctgcggctcgccgcagcagagttcttcaggagatgtcgaggggtaaggctgtccccggatacgacatggaagattatgaagcccatgaattacttcttgattgccccaactgggaatcggtgtgatattatgcggggatagcatagcaagcctatacatgatagattgatgatacgctgcgctacttatcagcgtttagtagagatcaacctacagtagccaacggcaacctccaagctttgataattcttaccctctcctgtcgtcaatttaaatgttaccgtattagcgagtcgcgtcacgagcccaaagagtttatatcccgcttgatctgcggtgcggacgggtgcagtggtgagttcagcacggagtccatgacacctggcgtgaaaatcatggaactatgatcctcatatgcccggaaaactgccatatattgccgaaacgaagcagcggcggctcagtacaagttctggttgggcgatttgataacttggtcgcgcttgtgagatcttcaaggaattcccctttcgaatacaagatcttcagactagcacaatttaaacagtaccatattccgacgatttatgaggatatgcctctacacgggtcaaagctcagatcccgtctctactgcagtttcttccaccatccttcatgttcgccccttgtaggagtttctcgcccgggaacactacaactccctacttggaccgatcgtcctcatatctgcttcgcagtaaagaaactatttagacttaaggtgggccgcaagaatctcctgcttggtcagttctggccttctgggaccgctttcatggcggccttccctacgtcctgacaactcgctttaagtggtaatttgtcaaatgggcttgccttttgcagagcgttcacaaattcccgtatccctcaccagtgagatatagacggccgcggtgaaggcacttgtagccccaatcatgtgagggatggtgacggtgtctggggagatgaatgttggggtgagttcccaatagcgcgggatatcgagttagaagcccctgagatcgaccctaagttccagtactcattgcagatctttcccacaccatttttcaaagtcataccatcgcccccgagagctgacattcggtcatggctcgatgatcacgcatacagtaagatgccgagcgtaagtatagtatggccttgataaaggtgtcgagggtcagaagaaatctgcagtacgtaggttggtccatgcacctgctctctgccttgctgctatataatagaatgcacaggccaggtcaaagagcgccatctcaattgtttggggcatctatactctctagtattatgctgcttatctaccagggcgagaatttaggcatattggtcggtgccctcattctttgtctcgtacgcttcgagactgggtacacgcaacagcattgttgatattatttggcaaaacaggtatgctgtgagcgacgccaacactcctcctacacatctcaaatgcatccaaacgcatgtcagagcctattaaactgagaatttgcgatacggctctgcaataccaaggaaaacaaacatagcgctcctaacttccagtgtatctctgatcgagtttagcttcgcgatcagattgcgtcttcatttgtgcgatggaaatttcacgaatacgcgagctcgtcagaatccgggtacagacggtctggaagaaagtctgactaggttttctgtggcgtcgtcaatggtttcatcttccgctactgtggtttcactaggagggatgtccaatatatccccatctcctagagaatcacgttgcccactctgtttttcggcttcgagaaccggcgatgggtcacgagcgaatgcagaccagagtcagaatatctcgcacactgatggacgactcgaacaggagtcagcaaataaacaaggaataggacccctgttcctgcgtcagaagtgtggcacggttaacagctacggcgggccaggacgaagtcacgcagctcattacatcagccttgccttgctatcagaaagacatcaggtccaatttgtgccctttgctctggctattaactgcgctcgtgtacaacgggtctttcgccaacgcgcgaaagtcacccgagcgcttccggtactgcggacgctaagactagtaaccctattcgatttatatgaagcgcgatcatgccgaggtcgccgaagagattcatatggcaaccgggctagctagagtgaatatcgggtgagaacgtttgcacagacctctctgctaagccatagcaagtctgaaggctcgaattgaccaattatcgtcgcgcaatctactctcagccagatccatttcacgtcccatgtcaggactactgagtcaagcagcggggatgcagtgaaaacacgacgaaactagggctcgcgtgctctgcgtagaatccaaacctatagggcaggctccgaggccacgcaatattagtagttggaatgactcgacagccgcatattcctgcattgattccagtccccatctccacttccccaggatttctcccaagaggcgaacggtgggggaatataacagcctcacttgctcgtgggccttctcatttccccttgatcattcagaacttcgctttttactctctaccgccaatgtcgatgtacgctttgtcggcgccatggacagtcttccaagctgcgcggtacggattacagccctggcattctaacacatggacattgattactgacaatgggataggtttcctgtctgatcagcgccattaacaactccacctgctccttgaccgattttgcatgcatctgcgctgacgcccagctaaatacgcagctcacgccgtgcatgcttgcgagctgcacgatcagggagtccctgagttagtcctcacctcgattgccgacgggccccttccatataaacagctactgatcgggctcgtagcggcgcagaactactcctactcaacatgccaatatccaacgagcgagaacaccaatacctttcccatcataaatatcgttggcatcattgtggcgatcgtttccgttacactaagaggaatgtatcgcattctcgctggacaactaggtctagatgactatacaatatgtgctgccctggtacgagcttagctaatcggcgcgtggtttacgcaattagaggaagaatgctaatcgaatcccagcttgtcgcggcagctatttgtggcgttggcgttccgtgtatgtctcctcacccttgcatttaaaaaacgaagctgaagcagactaaactgacaatgatcaagtgaaggatcacggtttaggcaaaaacatctggaccgttccgttcagcgacatcagtgagactctcaaggtatatggaacctttcgcccctttctcttcccgctaggccgctatcccaagatattaacaccatctgccgctgcagctgttcttcatagaagaagtcctctacacaatctgcacagcattgatcaaactatccatgctcttcctctaccttcgactcttccccaatactcttctacgcaaagcagtcttcgtctcgctggccataacttccctttgggcaatcgggtcatttctcgcacaggttctctcctgcaagccaatatcctactactggaaccaatgggatggtgagcatgaaggcagatgcgccagccataactcgctcctccttgcgcactcgattatcaatatcttcctggatgttttggtgattgcccttccaatgccggttcttgtcaagcttcagatgagcattgagaagagggtgggcatgtgcctgatgtttgccgtggggcttgtgtacgtcgtctttctgatatgtgagagtcagggttgacctttggtgaacatatagtgttaccattataagcatcctccgccttgttgaaacagtcgggttcaacgacactaccaatccaactagtgcgtcaacactactcctccttgcacaatagcttttctgacagagttccttcagaggatttcgttcccgtcggcgtctggagtcttctggaaattgacgtcggaatcatgtgctcctgcatgccgggcattcgggcgttgacgaaacggctgtacagtacattattcaagactgatggccagccgcgtagcggatacagatacggctcgagacagtcaaaaccaggcagtgggggttcagggtccgggtcagcacatcgagttcagccctcgttgaaatctggctcgtcgaactcccaacgcgggaggggagggtcagttcatcagactcaacgaggtcgatagtcgagaggtagatacgacaaatcatctatggccttttcgtgaattgcccgccggtaacagtgccgccaaaagactccgtgagagtgacaagggcgtacgtgcagactcaagggcacccttggcaagaatacagcgatgactcgaaaccgtcaccattgttaccgccagcgaggtatgaagacccgcgtgctcattattgtctgttttcgaaggctgcgatagccagggcgagcaagggctcatcgcacttcacgtggtttcgggatggtgactctacgtattcgaagtgtctcaattgatggcgtatttggagcaaattggtgttatggtgttatgtggtctgccttcggtgctatatttagtttgcaaattaaggtacgcagtcttgaactttcactgctagtcggtttcctcttaaattgttaggtttctgtaggaactaaacttccaggccaggacctgtgcaaacggcaacgtctattcttctcgcgtctcttgagtgatagacatgataattagctgccagatggattaggtcgtagagtaaaggctcctataacaccaacgcttgcgggtggtcgcttgaatgagaagccaaatgtcacctacaatggcagggaggtccaatgttttagcaatgccctaaggcatagctggccctatcagctcgctcacggttgcaataacatatatattacctactactctaggaactacttcgatctttcatgtattgaagcacaacattacctcctctctccgagactgtatcctcaatagcaaccatgtcactgcatctccatccactccacaactattcccctgccgacgcccaactcctcaacatcccttccaggccagttgctacctgatgacgggtcgggcggcatcagagccaatccacccttcatctctgcgtcgacgccagcgataaaatcttccagcgcctcgtcgagcgaggcattgattccgccggccccttgtcttctcgctgtccaagagaaaatatgtccttctaggggtatgggtgtgtccatgagtggagcctgatggtcctgtggatgtctatgcaactgtggagcgtatctggttgtattccactgctgatgggcctgcatatactggcaaggtttggtcggcattgcgcaggaaggccgcgtgatcttgtgctgcgtgaagggttcatttcgacaggcaattgttcgggtagggaataaggttggggacgctcgtgggccgatagtgctgtcgttgaacgaggaagccattgtggctggggtcgtcggttacaatgatgctttgtgaaggttgcgctggcacttttgttaatgcagttgaaggagtctgtggttgaatgtgcatctgcgttagagttgctggaaccgaccgaggtgcctggggtatgttcaaagacgtagatggtatcgggggaactgcaattgttggatgttgcgtgaggccgacagcatggctgaatgaccctgcaggatgaatgatagagctagatgtccagccaacgcccggcacctggcctctcgaagctggtagtattccagctcccgcgttcactgcagctgccatcaagcccacttcgtctaggttcgctgtcgtctgtctcagaatggtggttgcttgcacggcaaatggtgtagagatgcggggcagcaaagttgagttcatggatgactaggtttgaacgccatctgggacatattggtaggaattatgttccgggatgattgtgcggaatgaacttccaaagtacgatggcacgtcctggctcaagacattcttcggcttcagtagagagtcgcaataataagttgtcaggatttagctatccctatctggccgcccaactaggatacatcaaatgagctgcaaaccgtgtagttagtgatgtttttcgctgagataacaagaccataaagttttcagaatgcgtactattgacacctctactgcttccgaccaagagtaagttctatgagccaggatatctctatcagccgctagggcagaagacttggagtttatttgaataccacattgtactggatgcaggaaagaggcgcaggcactaaatgatgcaatccgatgtgatgcccttgatacttcccatatcctagtagtcctcaatttgtcgttgagaggtagcgcggcagtaagtgcagttgaagttagggaagggcattggtattgggccatttacagaaatgcgttaacgtagtccaagtatgaccaggctgcattatccagggtaaccaaaagcgaactcgtttatagagggactctcccggctggaatgcagggactctcccggctggaatgcagcgacgatatgaaagggacggagaatggtggcattacaatggaggctcactggaggtttatactctataccaaatatcagcttccacgctaaaaggcatattgctagaaaagctcgcttcatatgaatttgccatggataacggacatagctcatgtcagacccccctccttgctatttatgctttacaacaggcagtgtacttccttcgccagtggtaccattataggagcataaaactctgttttgctcttcttttcccttgattggcgcctggtctgatgtactccatcattattattttcttttctaccttttccatgattgcctagcggacagtataccgtagcttcgccttaccctagtccagcttcgtgttcgttgtcaaaatgttttcgttgcgttacaggtgccgcagggcattgacagttaattgcaagttatagatgaccctgaaatcactgtgcaattccgtattatacccaagacaatgggcatctattctcctgctccctaccgcatctctactattcgccatcctagtggcctacctcaccaaaatacctgaaattggcccttaagggcttacaccaactaaagcctcctaattccaggctgcaacgctgccatctgtcgatatcccacctccgtccagacccttaggcgcttaccaaatacgatcattgggataatcgtcagcgtcatggccgtcgcaatacacgctaccacaataaacatattgattaaacccgaagcttcgatccacggtgtcagtgcaaaaacgaagacggtcgccaagccgttgcggacgaatgcgacacccactagggcatcaccaattatctactcacgcttcgtcaggatatgcagaacatagaggcaaaaggctagacgagcatacttcctggtagcaatcagcaagatatgtaagtgcacaggcgccgatgcagaacatggcaaagcaaagactgcactacctagagcaagggaccaccacggccaaccctgctaccattagccaccactttgactaggcccaaacctaagctcttaacttactcttgctaggccaataccaaagacaagcaatccaatcggtgtagcgattatagcaggtaagctcatatgcagtctggt

SEQ ID NO: 5792 - DNA, 3686 bp, Emericella nidulans
ccaacatgtgtgcgcggtagttcaccatggaggtgccgggacaacagcgtgcgggctccggaatggccgcccaacggcaataataccgttcttcggagagtatgagacccaagtcttcctcagattctgagtcacgttgctgattcactcatccagccagccgttctggggaaatctcgtagcagtttctggcgcaggacccaaaccgataccgtaccgagacgtcactaccactaaacttgcagaggtgattgaattctgtttacaacctcagattcaacatgctgctcaaactattgcgtcgagaatgcagtacgaagacggagtcaaaactgctgttgattcgttccatcgaaacctgcctcttgataagatgcggtgcgatctgctgccaaaccgcagcgcggcatggacgtgtaaaacgccttcactacgcttatcgaagcttgcggcgcagatactggtagagcatctacgggttgacaggaaggctctgcagttgtacggttcccccacttgtattttaccttagaggaaaccatatactgaatatacttacagctacgaaaccaaccccgtggtgatagaaaatagacgctgggatccagtcactggagccacatctgctgcaataggaacaggaacagacatggtcaagtcgacagctgatatcttcctcaaaccctatcaagagtaccaagatcttcgccgaggacggccccggtcaggagacagacctgatgataatgcatatattcctccagcgccccgatcacttagtacacctccagccagacaccctaacccagcaaccaccagatatgcgcttcagccccagcaccttccacacgacaagcacgattgccaccgcatctgccaaaagcatcggcagagttctcaccacctacttcaaaggcactatggtcgacatccccctcgcaacagctgagggcctacgcgcagtcccgcgtctctatggcgaagaagacaaagagcataaaccggtgaaggactggaaatccggcatggctgtggggtgtctttccttctcgcagggaatgttacccggtattacggggattgttcatgcagccgtacaggggcgctaaaaagaatggcgcactgggtccggacaaagggtcttgctaaggggactgtggaagggacagcgagtcttcgatcgggtgtgtgttccctttgcggcgtctatctgcttttatgcggaaaggggctaactttgacgttctgccagctgcgctagggcttgtggcgtacccaggtcagggtatctgcaagagtatccactcctcggtgcggtcgaagactcgcgaagcgctcatacaagcaaggcataaagaaggggattatctcgttcggaatttgacaactgcgagtggggttgataggggtgcggtgataagagcgttcgaggccaagagacgtggccacggcagtggacaggagagaaggtttgatacttgggatcttgcaagaagtcaggatagtttgggaactgggtaagcagtgcctgtgctataccgcccttctcatgctctcgatattgtctaccggggctcgccaacgtcgaggtcacacaactaacattgcacagctcctaaccatcctgctttgctataagacgcatagaactagaaagaaatatgacacaaacaaagcaatcatttccgcacattcaacattagatcaaacacaacttttcccctcgcatgcccgctctccaatcgttcatacccaggctcaaactgctctagagaccaaacactgtccacgacaggccaacatttgccctcctccacaaatttcgtgacctgctccaagtcctttccactaggcgacataatgaagaacttgtcagtcacaccagttacttctaaatcctctggccgtttctgctccggcggctgcacaatcccaataatcgtgccgttgtcctttagcgtccaccaggcatcttcaagcgccttcccacccacgcagtcaactaccaaatcgactttattctccggttgcagtccccaggccttgaaatcagtcctgtgatagtccagaatttcagtcgcccccaagcccctcacaaactcgctgttcctcggtccacaagtcccaacaactctcgcgcccagtaacgccccgatctgcaccagccagaccccgacaccccccgccgcagcggtaacaaggatcctcttccctttccactcctcactcccgaatttcccgattcccgaatgcgtaaagaacgcctgccacgccgtctcagccgaaagcggcaccgccgcactctccacccacgagagatttttcgcccgatgcgcaagctcctccgtcgttgcgatcgtgtagtctcgcgcatcaccaggacgccagtagcttgtgcgcgcgtagacttcggtgcctggctggaagggggagctgggtggggcagaaacgacaactcccgcgacgtcattgcaggtgataatctctttgtcaatggcgaccattgtgggccagttgagttcgccagcgcaggggcatgcggcgtgcacgcggatcaggtgttcatccttcgagggatccggggacggtaccgggcgctgcaccagcgttaccgtgcgtgatgtgggagaggcttgcaggagggcgcggattgaggtcggaaggctttgagcgttcataactatggttgatgtgaaatattgttatagtttgagtagaattgaaaaaatagatgtgccgcgtattcctcggttctgtagcccgaatgatgctaggatgaacagagagcggaccagctggaagactttatacttttttacactaaaagcatgagtgagtctcgtcagaacccgaacctattgagatgaatattgtagcgactttgcgagtggtggtcccggcctgaggctattgaggcttaccggcaaggtccgcgccaagcccgcaataggctatccaccagggtactactatgaacccggcaatcagtgtgagcatgcaatatgctatcctctaaatggtattattcaaaatagtgttaccgcgtaatctatttctctttggccctctgatgacactgacgacagacgataaacgacagattgcaggtgcgtattcgtccctgtcggaaagccctcccaaaacccgttaggcacgtgacgctatcttagggcttttggctacctattcttcacttgctcgtcctctgtaaccaaaaaacaaggctgcctgtctcgtccctctacccgttacactcagcttggttgcgaattgcatgcacactttcaagccacgcttatcatacaaagtactgtccagcttcccgtactctcctgtattagggcacagtaaatgttctacctaagctctgacggaatatctagacaaatcagcacagcttcagcgtctctataggtgaatggcactgatatatctgtattccatctatgtctatctctttattcgactatatataataccatttgtccatccctatactactaactactctctatacggcacaactccctaccctgccgacaggttacactgcctaaacaacctgacctcgccttctacaaaggcaccgaccaccgaatgcagcaccccacgattatgaaacaggaccagaccccctttttccagcatgcgcgacacaactgtgactaaagcgggccgtgcagtta
